United States Patent Application Publication US 2018/0305689 A1 - sequence listing, part 84

SEQ ID NO: 1241114 - DNA, 4001 bp, Homo sapiens
gacttgcggcactgcttctgcgctcgcgagcgcgccgcgcccgaggcctcgggcccgccgtccgcgccacccccaggccgccgcgcgtcccacggcatgctggcggcggggcgttcctgggcctcaaggcatggatcccgcgaaggcacacctgcggggaaaggaagaggccacggtgaggcgcggggaaactggggaggcccggggactcccctctgcccctcacacagcccctccggtcctggcccaccaggcctgtacctacctccagcctcggccaggcccttccagtcaccctacagctccatctctccgacgcccagaaccaccgcctccatccttgatctagctgtacctgttctccctccttgaaactgacttgctctctggcacctctgctggaaatgcccttgctgcccatgccctcaaatctcccctcccctctccaacccagggacccactggaagagcttctgttcccacctaagccaggttcatacgaccccaaataaagaaaaggccagggaggggatgagaaagcttgggcccacatctcaagctgaggcaaatccactctccagcccaagcgcaaccctgaccctgatctccgaccccagaccacttggaggcccctggagcctcttcctgggctgttcagaggcatgatccagactcagacctacctggttcctgcaccgcgatcacctagttccggggatgtgggtatatcacagtccctggccgagcctcagctttatctgtaagaaaggggaggggtggacgacggctgtgcgggcggggtgagcctggggcgtggcaccagccctctatccaaacatgtttgcttacacgttagctcctgggaggagataggagggtgaaaacaacctggagaccggtgtgcaccgcactgcacagtctgccatcctcttcaggtcccatacctctcttgatctccccgactactagatgaagcgggtactgccatcccactttccagcagggcacaagcttctccaattctccaaggtcagcaagccacggcagagccaggcctagaactcaggtcccctgcgtctcagtttgggctcattccagaattggtggggacccccaacccacaggcaatcgagcttaggccctgaccctgccctctgagtccccagccccgacctgagcctaggcgtctgacctctggctccgtcccaacctccctactgccttctttcaagggtaagcccttggtcacaaggggcctgggacagaaggcaggccgcgtccacacacactgactgggtcactatcactggcagtaactgagttaaagagagcggcgcggtgcgggtaggctgtggcccgtgggcaacaccgtgactggagccccttccccaagcctgggcctccgggccccagatatgccctgtgccggcacgcgtggggcgccgggcgggttacgtaaagttcggcctccccacgtcaccgggcagagtcacggccgcggctcgtgaataagggggttgggccatcgaaggcagcgccgcgcccggggccacccgccacctcctacccgtcccctcccggcctgcacggccagacgtcgggcggcggagggtcgcggggccgagcggggcgtccgcgcgcaggtggccggcgcagcgagggctgcacctgcgtgcgcgtgtgccggaggaggagggggcggcggccgcgggcgcggcgcgggggacggggactcaccatggggggcgcgggggccacaggccgggcgtccccgcccctgccgcggaccggagcgcgcgctgtcccccgcgggcgagcgggcaaaggtcccacgacggacgcacgggagggagccaccgccgcccgcgcccgccgcagccgcgctctgagccgccgcggccggatcgcagggcggcggtgccgtcgccggcggcgggcggcgggcggcgggcggcgggcggcgcagtgcggccccggccaggcaggacagcgggaccgtccgccgccgccattggcccgcgccgccggcccccgccaccacccattggccgccgcgctgcaccattgttacgtcactggccggcgggcggggcgcaccgctggacccgcggaaaacttcggagaaacttgagggagcgccggcggggagaacggagaggaggggcggggccgtggcgaaaggggcggggcgttgatgggcgggggcggggctcccggaacccgagctgcgggcgaagaaaggctccgagctccgagctgccctagcccgggagggcgccgctgctctgcgaactcgggcgcgcgcgtaggtggcccgccctccgccgtgcgtgactttcctcgtcgcgtccagctccccttttctttgaccttacgtgaccttgggaaaaacctccaggctgctaccccatctgcacatgggagggccgggggtaggagccgcgacccctaagggctccaccgccttctgcccggccagggtcgtgcctggcgcgcccccgctccagctgacccgcgcaagggagggaggggcggacggatggggacagctgtttaggagcgcgcactgcgcccatctcggcctcaacactcatgtttccacttcgtttcacgaccaccagccacagtggacacgatgatccccagttcacccgccagcaaatcagggctcagagaggtggcctcaaagagaggagcggccaggagggaagccgggggtttgccctgcggttcttcccacatctgggcgggatagattcgattgggcctcggccacccccaccgtctccgtcgggggttccaaggtttggggtcatgacctagggggcttaggagcctgggtccatctcaactaatttatggcctcactcgcccccagcggctgggaattctaggcccattttacagatgtggacgcagatctggagaggggcaatgactgctcaaccccccacccatcctcccagacacgaccttccacctggaatccccccacacacgttctcagaggccaggcagccggggtctcatggtgaaatccccacattccatgcaggggctctttctggttccttccctagaatgctgtccctgcccttccagtactatctcaccagggagaccctcccactcccccactccgctccaaccaagcaaggcctctgcctcgccccggtgggaggggcctcgtccagagggcacgcccctgcacacacaatcagccctgtcctggcttctctgtgtgccccagccagtcagtctgggtggaagtcttacctgggccctctcaacagacctaggcaggcctctgtccccagcccaacgagctcaatcccttaagcacacacgccacagagcagtcctgagaggccaggtggacagtaccatgaggcagacaaagctgtgaggcccagagagggtcaggccaccccagcccaggtaggcactcacatgtatcctgcccaggctgccatgcatggacccaccagggggatgaccagaccccaccagccctgccccacctcagggcgggggacgttccaggccacgccatctctcccagggagtccatggcaactgccaagcttacagcagccaggttgtcagcaggagtaggggtatagagggcactgggcctggcatccgcacccgcctttgcctcagctccacatgtctcctcctgtatctaggcctatctccctagggcttctcccatctgccggttctggatgcctctgagtacgatggtggggagagcaaagtgagtgaaggtcctggagtcaacaatcggcctttgggagcccaaaccctgggggacatcttggggagatggtgcccatgtgggctgtctgtggctcaaggctcccctgctctcttgccctcttcgaaggctggagttgagatacagccgtctccatggctactggtggaatgagggtgaaagggcaccagtggatgccaggctgtgcactgggcctcagggcgggtctctctccacccct

SEQ ID NO: 1241115 - DNA, 4001 bp, Homo sapiens
tgcagggcttcgttcgcagagctccgtgatcagcgtgatggtgcccagcaggatgcctggggtcagcgtcggggaagtgaatggtgggggccaggggcaagagagtctattgcgtgtgtgcctgtgtgtgtgcactacccttctcctgtgagctggggttcccatccgattttcaattcttctgtccatagacctgaagcaaaggatggggggccccacagccttaccatggtgacgctcatgaagcagttgggcacagggtgggaggaagacactggagagttcagggaccttccggatcatgtgcactgcagtcagaatagcctgcagaggtcaggggcctcagacaggggtcagaggagatggacccctgcatctactactatatagcacgcagcaggcagtgtgcaggagcacgtgccaggagtcccgccatctcaccttcttgcgcacgtagggactgggctgcaggagcagtttctccacctctggggccaggtctcggcacatctcagcagagcccatggtgctcaaagtgcacaaggccaggccttgtactggctgaatcccctggctcaggtcactgcagggtttgggaggacggtcagtcaaacctctgagaaaatcagtccttttcaatacccacaacaggcagtcccctgggatttccaaggtccctactctcccatctccctgattccaagtgattgccagaaccctctcacttcttgatgctgttggtaatgagcaggtgggcatcgtgcctctcatccaatagaagcatggcccccaggtagcccaccctcttgtctgtgaatctggaggaggcgatcagtttcaggcactccatctatagtgaagggggcagaccaggaagaggcaggggtgaaaccatagacactcacatccctgttccatcttcctctttaaaaccagattaacctgtggggcatcatatctcatcactctcccttcaacaagaggagaagcttaggaaattcaggcgttagtgggtaggaggaactaggagttgaggaggatgggagcggagaggaggagatgcctgccctaaaggaggctggccagagaatgaagggttcaggccagctgatgaccagtaggggtagcaatggggaaagaggtttgcagtgcaggctgtgaagactctgaaattgtagaatttaaaaaaccagggcataaacaggtgagagagtctgggactctgccccactagccttcatcaagctcaggagggaggtattcctggccagtacctgtccaaagtgggcggggtagcccaacatgtggacgtagagcagtttggccagctgccggtgcctgtgcactgggtccccgtcgcggaaggaggcccggatgtgggcacactccttttggatcacctcccgctcctgggcctgagtcttggccccgcgaatctcttcgatgaggtcctgaagcttcagcgaaggcaccaccatcctgactggcagagtccgggagtggagaaacactctctggtcgggcgtgcctgggctttcggcccaggcccgtcctgtgtcaagaccctaagagcccgggtcccacaggtaccctaaaattgcgcccgcattttacctttcccgaagtgggtctccaaattccgcgcccaccccaccgcccgagaagcccactacgcatgcgtccgcaccccaccggcgccccttcctattgagcatgcgcgggagccccacctatttctctctaccgtttcctccccctacctggtaccccatccctagctcagccattgcttttttttccacgaccctccgctgtttcttccgcgagcttcctcccccgatttccatctcaggcagcggcagcggcagcgacagcctgcctaccccaggactccagcctcacctggcttctgcctcaactccgctcctctgccccccagcgcttcctggtacggggccgagcaggggttggtgctccgtgcggtccttccctctccccgcctccaccacgggaccccgccctcctgggccgactgcagagccttcctgaatcctctgacctcgggcctcaggctttagcggagagacagcatgataggcctggagttcttcaagaggcctcctcgcacatccttaccacccggagagcctcagtttggatttgaagccatcgcaccccaaaggagatgacaatccccccccttttttgaacttttttattaatatattttttttgttaaatttctttgtatttttttcctgcaagacttggtgttggcggcactgttgtagtttaacttcaatcccaaattccatgaaatagaaatcagaagtaaaggttgagaggggaggaaggagggaggcaagccaaggaataaacaagagtttgactagaaaaaaagaagagggtatgtgtggtgggcattcctgggcaaggccattccttgagggagggggttggcaggcagcttgcctctgcctcatgcaggggagggaggaaagatcccctggggaccctgcagtcccctcttcctagggcttcctgctcccaggggaaaaactaataccagagagggatcagccacaacctcaaacagggctctccacccacctgtcacccgggtttgactcccacctctgccctgcctgggaagcatgtgagatcagctatctttgatcccctccttctgttgttttcccatttcacaagattctgatgtaaagggggaagggatataacccattttgggactactaaacttgtcacagcttctgcttccatgtgagctcctgttatcttgtctggtcctatcccccagaagtgcctcctcccaccacaactcccagagttgggatgtgggggccttgctcaagtgcctctaaccctctgcagtagaaatgtcttcttcaggccccttaggaatttaatcaaaggccacaagtgagtccagaccaaccaaataaactattatgggggagacagaagggtgggagaagtcagtggcaaagtctgggcagggtggacttgactgcattggatattctctgttcctttacacgttgctcttggcatggcatgccaccagagggggctggaggaggggctggccgatgaggagaaaaagagggaaatgctggggagttactctacttttcacttcccttctctccttcagggaaggatggaattgggcagtaacccagctcagtgcttggaggtaagataatagcctccaagattagaggtggaggatgcacctcctgcagctttttcactaggcctcagagggacagcaggccccttaggctagggagccacagcagctcagccagtgccttgcccgacattcaatcactccttcttcattttcttcctcctctccattcagcttccaggagtctccttaggacaccaaacccccacccgcagcgaagttgaggtctaaagaaaaggtgggagggcgtggagcaatggtctgacttagatttgtgtgtctcagagaagacagcaactctgagagagaaaagcccttcatatgtaaacaatctagagaaagaaggggttgggatggggaagggagtgaggaatacagagacagatccagaagaaatgagataatctgaaagaagacagggaaagaaaaagcgagagaaaaaaacaaaggagcacagaaaagaaaggaagaagagaaagaaagataggagaaaacacagccaggaagaggagaagagaaaaaaggcaggtcaaaggggtgaagaggcacgcaaccaaagccagaaccaggccaggaagtagcctcaggtgaggagctgggagaacaggaatgccaggctgaggtccaggagggccacggctcccaccaccagggggttggcagctccctagagagacagagggggaagcagactcagtccccgaggacagggcccaccttcctgccctgactgaggtggcagagctgaagggtctcaggcacctccctgcacagcctggagcagggg

SEQ ID NO: 1241116 - DNA, 4001 bp, Homo sapiens
ctctgggaggaaaccactggtcatggtcttactgctatgccctctctgatccagggatacagcagtgaaaggtcaccccacctgcaggaaggggtcgctgactccagatatgctgtgttctgtggagtatcccattgtcaccagagtccggaggatgtgtaccagctggggtaccacctggagggagggcacaactttgggcattcgttctaatcctctccagctaaagccccattccttccccactgaccctgtcttccaggcccagggcctgccccttcaccagcccacctttcggaagtgcctgagggctgcagggcttcgttcgcagagctccgtgatcagcgtgatggtgcccagcaggatgcctggggtcagcgtcggggaagtgaatggtgggggccaggggcaagagagtctattgcgtgtgtgcctgtgtgtgtgcactacccttctcctgtgagctggggttcccatccgattttcaattcttctgtccatagacctgaagcaaaggatggggggccccacagccttaccatggtgacgctcatgaagcagttgggcacagggtgggaggaagacactggagagttcagggaccttccggatcatgtgcactgcagtcagaatagcctgcagaggtcaggggcctcagacaggggtcagaggagatggacccctgcatctactactatatagcacgcagcaggcagtgtgcaggagcacgtgccaggagtcccgccatctcaccttcttgcgcacgtagggactgggctgcaggagcagtttctccacctctggggccaggtctcggcacatctcagcagagcccatggtgctcaaagtgcacaaggccaggccttgtactggctgaatcccctggctcaggtcactgcagggtttgggaggacggtcagtcaaacctctgagaaaatcagtccttttcaatacccacaacaggcagtcccctgggatttccaaggtccctactctcccatctccctgattccaagtgattgccagaaccctctcacttcttgatgctgttggtaatgagcaggtgggcatcgtgcctctcatccaatagaagcatggcccccaggtagcccaccctcttgtctgtgaatctggaggaggcgatcagtttcaggcactccatctatagtgaagggggcagaccaggaagaggcaggggtgaaaccatagacactcacatccctgttccatcttcctctttaaaaccagattaacctgtggggcatcatatctcatcactctcccttcaacaagaggagaagcttaggaaattcaggcgttagtgggtaggaggaactaggagttgaggaggatgggagcggagaggaggagatgcctgccctaaaggaggctggccagagaatgaagggttcaggccagctgatgaccagtaggggtagcaatggggaaagaggtttgcagtgcaggctgtgaagactctgaaattgtagaatttaaaaaaccagggcataaacaggtgagagagtctgggactctgccccactagccttcatcaagctcaggagggaggtattcctggccagtacctgtccaaagtgggcggggtagcccaacatgtggacgtagagcagtttggccagctgccggtgcctgtgcactgggtccccgtcgcggaaggaggcccggatgtgggcacactccttttggatcacctcccgctcctgggcctgagtcttggccccgcgaatctcttcgatgaggtcctgaagcttcagcgaaggcaccaccatcctgactggcagagtccgggagtggagaaacactctctggtcgggcgtgcctgggctttcggcccaggcccgtcctgtgtcaagaccctaagagcccgggtcccacaggtaccctaaaattgcgcccgcattttacctttcccgaagtgggtctccaaattccgcgcccaccccaccgcccgagaagcccactacgcatgcgtccgcaccccaccggcgccccttcctattgagcatgcgcgggagccccacctatttctctctaccgtttcctccccctacctggtaccccatccctagctcagccattgcttttttttccacgaccctccgctgtttcttccgcgagcttcctcccccgatttccatctcaggcagcggcagcggcagcgacagcctgcctaccccaggactccagcctcacctggcttctgcctcaactccgctcctctgccccccagcgcttcctggtacggggccgagcaggggttggtgctccgtgcggtccttccctctccccgcctccaccacgggaccccgccctcctgggccgactgcagagccttcctgaatcctctgacctcgggcctcaggctttagcggagagacagcatgataggcctggagttcttcaagaggcctcctcgcacatccttaccacccggagagcctcagtttggatttgaagccatcgcaccccaaaggagatgacaatccccccccttttttgaacttttttattaatatattttttttgttaaatttctttgtatttttttcctgcaagacttggtgttggcggcactgttgtagtttaacttcaatcccaaattccatgaaatagaaatcagaagtaaaggttgagaggggaggaaggagggaggcaagccaaggaataaacaagagtttgactagaaaaaaagaagagggtatgtgtggtgggcattcctgggcaaggccattccttgagggagggggttggcaggcagcttgcctctgcctcatgcaggggagggaggaaagatcccctggggaccctgcagtcccctcttcctagggcttcctgctcccaggggaaaaactaataccagagagggatcagccacaacctcaaacagggctctccacccacctgtcacccgggtttgactcccacctctgccctgcctgggaagcatgtgagatcagctatctttgatcccctccttctgttgttttcccatttcacaagattctgatgtaaagggggaagggatataacccattttgggactactaaacttgtcacagcttctgcttccatgtgagctcctgttatcttgtctggtcctatcccccagaagtgcctcctcccaccacaactcccagagttgggatgtgggggccttgctcaagtgcctctaaccctctgcagtagaaatgtcttcttcaggccccttaggaatttaatcaaaggccacaagtgagtccagaccaaccaaataaactattatgggggagacagaagggtgggagaagtcagtggcaaagtctgggcagggtggacttgactgcattggatattctctgttcctttacacgttgctcttggcatggcatgccaccagagggggctggaggaggggctggccgatgaggagaaaaagagggaaatgctggggagttactctacttttcacttcccttctctccttcagggaaggatggaattgggcagtaacccagctcagtgcttggaggtaagataatagcctccaagattagaggtggaggatgcacctcctgcagctttttcactaggcctcagagggacagcaggccccttaggctagggagccacagcagctcagccagtgccttgcccgacattcaatcactccttcttcattttcttcctcctctccattcagcttccaggagtctccttaggacaccaaacccccacccgcagcgaagttgaggtctaaagaaaaggtgggagggcgtggagcaatggtctgacttagatttgtgtgtctcagagaagacagcaactctgagagagaaaagcccttcatatgtaaacaatctagagaaagaaggggttgggatggggaagggagtgaggaatacagagacagatccagaagaaatgagataatctgaaagaagacagggaaagaaaaagcgagagaaaaaaacaaaggagcacagaaaagaaaggaagaagag

SEQ ID NO: 1241117 - DNA, 4001 bp, Homo sapiens
aagctggtctcgaactcctggcctcaagtgatcgcccacctcggcttcccaaagtgctgggattacaggcttgagcagccgcgcccggccatattcacttaaacatttaatgacccaggagaacattcatctaggattttaagttgtactcacagtgcttttattttctgtttcgatcaaaatagtctattgatgacaatatttgtgagcccattcatttctaccgtatcaaattgttagtctagccagtctccttcaaacttctctccctctacccatcatcgtcaagatctaaaggaattcactacctcttcttctcccaagaaaaaaaaaatcgctcctccccctctcccaacccccccacaacccattccagaaaaggaaagaagaggggacgcaaagtggaataagttacgacgggcgaccgagcgcatagaaatgggaccaaagcccaggctcaagacagagacgaggaatcagtaaccacagccggaggatcttggctatttgccagcagagaactgactggttctaagaaaccagaggcagagcgagtgacaggaagggaaagagggcccacccttgggactgcctgaaacactcaaagaatgaaaaagaaacgtcaggaatccgagacgggatgcggtcggccagagcgaccagccaggttaacaaccagctcagaaagccgggacacgggtgagagacccctgggaaggaaacagcgcccggggacggcctgctaaaaggaaactgataaccaggaagcctaaggccgcctcgcttccaaaagtcagagtcggagcccaggtgtccggtagctgcggccagacaccggatcgggtctgagggcgggcctaggggcggagcccgagctctttccccgccctctaacggcgacccgggctgcgttctcagtgcgccggcgtagggtgaggccggactctatttggcgattaagcgtgaggctgcgttcgctacccagcatgctgtgcgctagtgacggccctccgcctatccccttcccaactctccccccacccctcccgccgaggcccccccttcccctaaagtgagtgagtgagacgggcagatggaggagggattgtaatggcggcagccggcagctccctgctctgacccacggcaggcacacagcaacgaccccttccccgcccctctcccggccggcctccgccccgcagccagcgcggggccaccctctccggcccttcccccagctgtcggcgtctcgccctgcgccccggccggggccccacacacaatggacgagcttgccggaggcggtggtggcggcccggggatggcggcccctccccggcagcagcagggacctggggggaacctgggcctttcgcccggggggaacggagcggcgggcggcgggggtcctccggcctccgagggagcgggtcccgcggcaggccccgagctgtcccggccgcagcagtacactatcccggggatactgcactacatccagcacgagtgggctcggttcgagatggagcgggcgcactgggaggtggaacgggccgaactgcaggtacctcgttggggtcggtgtgcgggagctgcggcggctgggttcccggccggggggtggggctggggactccactcagccggagccggcgccttgggaggccgagcggaacctacctgtgctgctcaggttgtgatggtcctctcaacggcttttcctggagtccccctccctctttcccgcataagcttgctccccaaccttcactggctacgcggtgcgggcctcctcggggcagccattttggcttttagtatggcgtctgcgggggctcctccggaggcggccttcccgggcctccggggcttgggaccgagcacctctctgtgggagagtccggtttggggcctctcaacactgagtttgctcttgtttgttcctcttgagatgaagagcccgaagagagggactaggataggcatcttaccccccttttccggaccacccccctttccgatttggcgtatctggccccctccctcagacttggtacgcgcttgccccttgacagccacgcttctttcctgggctgctagggtgcacagtgacttgggactgacctgtgaagttttatttcccatcgtcaactttaagtactttctcacctgagatgctgccttactcacttggattctctgtagttattccttacttagtgactcatcaacgctttcagcactgaatttttctttttacagtactctccactagatctcctttcccccatccgtttctttatctataaaaaaaccaaaccagacgatcgatgctgtatttatgaaacgactgaagagatttaatattcccttgaagtgaaacgtagttatatcatgttacttactcttgcaggagaagcaaagtgagatgttctcggaacccttcatagttgagcttgactcgatcctcataatgtgaacctttgataggctgcacatttggaagctgttggtagttaacagctcatgtcctggatctcaaaattgctgcatctttttgaaagggttatttaactttcttgggtatttgtgtttatttttaaatacctttccagggcaaatttaggcttagaaggaaaaagcgtgtgtctaaatagtattgcacctgttcttcagactgttgtgtatttagggggtaagcagtatttgctgtcatatatgtcatatgcctatggtgaatcgttaggcaaatgtagtgctgaaaggaggaggattggattaactagaaagggtgtcctcaaatatgcatctctttagtttggttctgaactagtaaacttttatatgactccacaaagtgggtgaagttaaacttttcaaaagtaaaaaatacttgggtattttgacactgtatgaagtcttaaaaaaaagtaacacttgttagtcatttcagtgctttacaattgtgttttgatataatattgggctttaaaattacataactttaaaaaagctgaagtcaaaactggtttaagttgtgtacagtctgctttaacatacttaaaatttatagaattctgttggtatacagctttctactacatactgcaaacttaattttctgtgtgagtaaagtaagtaaggcatttgtttttaaaatttggattgacaaatgcagtaaggcctaagctcactaaataatacttcaccagtccctgctatggtttcttagacctttgtactgttgtatgcaagtttggatttcaacactcttcaagttagcaattgcatttttcacccataaacttcactaatgtaagcagctgagaagaaagatatcttgtgcccaaattagtaaaacctatactatatattaaagaagcctttattgcctgctctagcatttgctttcccttctaggtctccttaacagcagcagcagtgttttaaggtagattccttttgcttgcttgcttgctttcaattctattggtacagtactgttattagccatcctaagtttttgtttgtttccttgttttgaagaagtcctacagtgtttctagactcttttttatttcatactgattcttttggaataaaatgttcatgatggcgttggtttttttttttttgagttatatatttaaaatgttttattgggttaacttaataaggtttctagtttgctttaggtgccttcagtctactgagattgcttgtgagatgcgtattttaaaatgtatgtgttgaatacatatttgtgggagggtgtagtgaagcatcagtggatttttactgtaaacttaaacctatttttaagaaagacaatctagaaataagacaacttacatattattatgtacagtctccagtgcactgtcatgtacacagatttttaaagtgttaattattgaatagtttcaatagagaacgtgaagagcttaaggaataccccatattgatgtaaaattttaatggggaataatattttccct

SEQ ID NO: 1241118 - DNA, 4001 bp, Homo sapiens
accgcacctggccacaaatgtctctgtgtgtgtgtgtgtgtgtgtgtatgtgtgtgtatgtctttgaggcagcataatttttctgagctttttatgtgctatgacgccccctaaaaaggaattggatgaataaacaggttgtatgttggtaactctaagataaatagtactttaataatttgaagaaatatgtaatcttaacactttgtgaagccaaggtgggtggaccacttgagccaggagttggagactagcctgggcatcatgacaaaaccccgtctctacaaaaaatacaaaaattagctgggcttggtggatgcacacctggagtcccagctatcaggaggctaaagtgggaggaccacctcagccagggagctccaggttgcaacaagcagagctcacaccactgcattccagcccaggcaacagagtgagaccctgtctcaaaaaaaaaaaataaataaaataataatttgaagaaatggtccttaacattatagtactgcaatctaagatctcatttcatatagaaataaaacatggcagcatgagtaacaggtccaatctgctttccattaaactgtaataacagtaaagcagatgtgataaaataagatgcattacttaatctcttttgaaattacttcctgattggttggtagtgcatactccatagtacaagttttattggcttttgcagtaaagaaaaaaaattttaaaaagtaacaaattttcaatgcaattttcctgcatcgctattaatataattactgaacctaatttccttatgttgttaattatttttgtcttatttttcaaacaaatgcttcttagctatattaatttttagaaacacactagtgcattaggatattttctaggaaactaagcacataaaagtacccactattgtacttaaaatattagccttgtctcttatgtatatgttacattcctcaaactttttaaattttttgccgacacggagtctcgctttgtcgcccaggctggagtgcagtggtgcgatctcggctctctgcaacctcagcctcctgggctcaagcaattctcgtgcctcagcctccccaggagctgggactacaggtgtgcgccaccatgcccggctaatttttgtatttttagtagaaatggggtttcacaatgttggccaagctggtctcgaactcctggcctcaagtgatcgcccacctcggcttcccaaagtgctgggattacaggcttgagcagccgcgcccggccatattcacttaaacatttaatgacccaggagaacattcatctaggattttaagttgtactcacagtgcttttattttctgtttcgatcaaaatagtctattgatgacaatatttgtgagcccattcatttctaccgtatcaaattgttagtctagccagtctccttcaaacttctctccctctacccatcatcgtcaagatctaaaggaattcactacctcttcttctcccaagaaaaaaaaaatcgctcctccccctctcccaacccccccacaacccattccagaaaaggaaagaagaggggacgcaaagtggaataagttacgacgggcgaccgagcgcatagaaatgggaccaaagcccaggctcaagacagagacgaggaatcagtaaccacagccggaggatcttggctatttgccagcagagaactgactggttctaagaaaccagaggcagagcgagtgacaggaagggaaagagggcccacccttgggactgcctgaaacactcaaagaatgaaaaagaaacgtcaggaatccgagacgggatgcggtcggccagagcgaccagccaggttaacaaccagctcagaaagccgggacacgggtgagagacccctgggaaggaaacagcgcccggggacggcctgctaaaaggaaactgataaccaggaagcctaaggccgcctcgcttccaaaagtcagagtcggagcccaggtgtccggtagctgcggccagacaccggatcgggtctgagggcgggcctaggggcggagcccgagctctttccccgccctctaacggcgacccgggctgcgttctcagtgcgccggcgtagggtgaggccggactctatttggcgattaagcgtgaggctgcgttcgctacccagcatgctgtgcgctagtgacggccctccgcctatccccttcccaactctccccccacccctcccgccgaggcccccccttcccctaaagtgagtgagtgagacgggcagatggaggagggattgtaatggcggcagccggcagctccctgctctgacccacggcaggcacacagcaacgaccccttccccgcccctctcccggccggcctccgccccgcagccagcgcggggccaccctctccggcccttcccccagctgtcggcgtctcgccctgcgccccggccggggccccacacacaatggacgagcttgccggaggcggtggtggcggcccggggatggcggcccctccccggcagcagcagggacctggggggaacctgggcctttcgcccggggggaacggagcggcgggcggcgggggtcctccggcctccgagggagcgggtcccgcggcaggccccgagctgtcccggccgcagcagtacactatcccggggatactgcactacatccagcacgagtgggctcggttcgagatggagcgggcgcactgggaggtggaacgggccgaactgcaggtacctcgttggggtcggtgtgcgggagctgcggcggctgggttcccggccggggggtggggctggggactccactcagccggagccggcgccttgggaggccgagcggaacctacctgtgctgctcaggttgtgatggtcctctcaacggcttttcctggagtccccctccctctttcccgcataagcttgctccccaaccttcactggctacgcggtgcgggcctcctcggggcagccattttggcttttagtatggcgtctgcgggggctcctccggaggcggccttcccgggcctccggggcttgggaccgagcacctctctgtgggagagtccggtttggggcctctcaacactgagtttgctcttgtttgttcctcttgagatgaagagcccgaagagagggactaggataggcatcttaccccccttttccggaccacccccctttccgatttggcgtatctggccccctccctcagacttggtacgcgcttgccccttgacagccacgcttctttcctgggctgctagggtgcacagtgacttgggactgacctgtgaagttttatttcccatcgtcaactttaagtactttctcacctgagatgctgccttactcacttggattctctgtagttattccttacttagtgactcatcaacgctttcagcactgaatttttctttttacagtactctccactagatctcctttcccccatccgtttctttatctataaaaaaaccaaaccagacgatcgatgctgtatttatgaaacgactgaagagatttaatattcccttgaagtgaaacgtagttatatcatgttacttactcttgcaggagaagcaaagtgagatgttctcggaacccttcatagttgagcttgactcgatcctcataatgtgaacctttgataggctgcacatttggaagctgttggtagttaacagctcatgtcctggatctcaaaattgctgcatctttttgaaagggttatttaactttcttgggtatttgtgtttatttttaaatacctttccagggcaaatttaggcttagaaggaaaaagcgtgtgtctaaatagtattgcacctgttcttcagactgttgtgtatttagggggtaagcagtatttgctgtcatatatgtcatatgcctatggtgaatcgttaggcaaatgtagtgctgaaaggaggaggattggattaactagaaagggtgtcctcaaatatgcatctctttagtttggttc

SEQ ID NO: 1241119 - DNA, 4001 bp, Homo sapiens
aacccattccagaaaaggaaagaagaggggacgcaaagtggaataagttacgacgggcgaccgagcgcatagaaatgggaccaaagcccaggctcaagacagagacgaggaatcagtaaccacagccggaggatcttggctatttgccagcagagaactgactggttctaagaaaccagaggcagagcgagtgacaggaagggaaagagggcccacccttgggactgcctgaaacactcaaagaatgaaaaagaaacgtcaggaatccgagacgggatgcggtcggccagagcgaccagccaggttaacaaccagctcagaaagccgggacacgggtgagagacccctgggaaggaaacagcgcccggggacggcctgctaaaaggaaactgataaccaggaagcctaaggccgcctcgcttccaaaagtcagagtcggagcccaggtgtccggtagctgcggccagacaccggatcgggtctgagggcgggcctaggggcggagcccgagctctttccccgccctctaacggcgacccgggctgcgttctcagtgcgccggcgtagggtgaggccggactctatttggcgattaagcgtgaggctgcgttcgctacccagcatgctgtgcgctagtgacggccctccgcctatccccttcccaactctccccccacccctcccgccgaggcccccccttcccctaaagtgagtgagtgagacgggcagatggaggagggattgtaatggcggcagccggcagctccctgctctgacccacggcaggcacacagcaacgaccccttccccgcccctctcccggccggcctccgccccgcagccagcgcggggccaccctctccggcccttcccccagctgtcggcgtctcgccctgcgccccggccggggccccacacacaatggacgagcttgccggaggcggtggtggcggcccggggatggcggcccctccccggcagcagcagggacctggggggaacctgggcctttcgcccggggggaacggagcggcgggcggcgggggtcctccggcctccgagggagcgggtcccgcggcaggccccgagctgtcccggccgcagcagtacactatcccggggatactgcactacatccagcacgagtgggctcggttcgagatggagcgggcgcactgggaggtggaacgggccgaactgcaggtacctcgttggggtcggtgtgcgggagctgcggcggctgggttcccggccggggggtggggctggggactccactcagccggagccggcgccttgggaggccgagcggaacctacctgtgctgctcaggttgtgatggtcctctcaacggcttttcctggagtccccctccctctttcccgcataagcttgctccccaaccttcactggctacgcggtgcgggcctcctcggggcagccattttggcttttagtatggcgtctgcgggggctcctccggaggcggccttcccgggcctccggggcttgggaccgagcacctctctgtgggagagtccggtttggggcctctcaacactgagtttgctcttgtttgttcctcttgagatgaagagcccgaagagagggactaggataggcatcttaccccccttttccggaccacccccctttccgatttggcgtatctggccccctccctcagacttggtacgcgcttgccccttgacagccacgcttctttcctgggctgctagggtgcacagtgacttgggactgacctgtgaagttttatttcccatcgtcaactttaagtactttctcacctgagatgctgccttactcacttggattctctgtagttattccttacttagtgactcatcaacgctttcagcactgaatttttctttttacagtactctccactagatctcctttcccccatccgtttctttatctataaaaaaaccaaaccagacgatcgatgctgtatttatgaaacgactgaagagatttaatattcccttgaagtgaaacgtagttatatcatgttacttactcttgcaggagaagcaaagtgagatgttctcggaacccttcatagttgagcttgactcgatcctcataatgtgaacctttgataggctgcacatttggaagctgttggtagttaacagctcatgtcctggatctcaaaattgctgcatctttttgaaagggttatttaactttcttgggtatttgtgtttatttttaaatacctttccagggcaaatttaggcttagaaggaaaaagcgtgtgtctaaatagtattgcacctgttcttcagactgttgtgtatttagggggtaagcagtatttgctgtcatatatgtcatatgcctatggtgaatcgttaggcaaatgtagtgctgaaaggaggaggattggattaactagaaagggtgtcctcaaatatgcatctctttagtttggttctgaactagtaaacttttatatgactccacaaagtgggtgaagttaaacttttcaaaagtaaaaaatacttgggtattttgacactgtatgaagtcttaaaaaaaagtaacacttgttagtcatttcagtgctttacaattgtgttttgatataatattgggctttaaaattacataactttaaaaaagctgaagtcaaaactggtttaagttgtgtacagtctgctttaacatacttaaaatttatagaattctgttggtatacagctttctactacatactgcaaacttaattttctgtgtgagtaaagtaagtaaggcatttgtttttaaaatttggattgacaaatgcagtaaggcctaagctcactaaataatacttcaccagtccctgctatggtttcttagacctttgtactgttgtatgcaagtttggatttcaacactcttcaagttagcaattgcatttttcacccataaacttcactaatgtaagcagctgagaagaaagatatcttgtgcccaaattagtaaaacctatactatatattaaagaagcctttattgcctgctctagcatttgctttcccttctaggtctccttaacagcagcagcagtgttttaaggtagattccttttgcttgcttgcttgctttcaattctattggtacagtactgttattagccatcctaagtttttgtttgtttccttgttttgaagaagtcctacagtgtttctagactcttttttatttcatactgattcttttggaataaaatgttcatgatggcgttggtttttttttttttgagttatatatttaaaatgttttattgggttaacttaataaggtttctagtttgctttaggtgccttcagtctactgagattgcttgtgagatgcgtattttaaaatgtatgtgttgaatacatatttgtgggagggtgtagtgaagcatcagtggatttttactgtaaacttaaacctatttttaagaaagacaatctagaaataagacaacttacatattattatgtacagtctccagtgcactgtcatgtacacagatttttaaagtgttaattattgaatagtttcaatagagaacgtgaagagcttaaggaataccccatattgatgtaaaattttaatggggaataatattttccctggctttgggaaagatattaaaaggaactttacagtatgattctgttctctgtaaaaagaatttagagtaaaggtctgtcttagaaacttggaaccaaactaaaggatcacatcttaaagctcttctgtctctgattcttccttaccttagactcaggtaaagcattgttagtaaggtcataggacagtggtttcttaacttttatataacatgaattaccaaaattccacagacagtccattttcttcaagccctagatcaatccagatctccagaggataagaggcctgcatattttttagagttctacaagtgattctttcttcacagtagtgcctgttaaagagaaaaattactacactac

SEQ ID NO: 1241120 - DNA, 4001 bp, Homo sapiens
catggatgtttctttaaaatagtgttgagaaatgtgacaaatgtaacattaggaagtgaagtctaaagcacacttaattatgtaatttgaaaaatgcatacaatgaaaaagagtaacatcgaagatgttaagagttatctgtcagtgggaagggaacggcagttagaaataggtaaccaaagggaatataagtaaaatgagagatactttgtacggactgatgcgcctggtaaaaccacgtactaaagaatattattaatctcctgtatttgaggtccaacaacaaatgttggggttagtgtcagccagaaatcctggggggaaatggtaaactccaactctgatgccctcaggaacaaaaactgttaaggttgcaaagaaggaatttttcatatccccattgccaaccaattttcatttaaaattaaaatcttttttttctgcctcaatctcaattctactatggtactacttcactataagctttcttcagggaagaacgaattgtgacaaaaaagaactatcaatggccagagaataaaaggtgaaatagacccactcgattgccaccaacattttacaatgagttactgtacaattcccttaacagagctattttgattacacagggcaaattctaatagtgggaccagatcaacttaacacaatatatgaaatagtgaatacatttttttgtgtttctattttcttcaacaattaggaactgtaaactgatgatttctaccattgacacatattaacaagataaaaataaaagcctgggcggggcgcggtggctcctgcctgtaatcccagcactttgagagccaaggcgggcggatcacgaggtcaggagatcaagactatcctggctaacacggtgaaaccccctctctaccaaaaatacaaaaaattagccgggcgtggtggcgggtgcctgtagtcccagctactcgggaggctgaggcaggagaacggcatgaacccgggaggcggagcttgcagtgagcggagatcgcaccactgcactctagcctggggaacagagcgagactccgtctcaaaaaaataaaaacaaaaaaataaaagtctgatataacttagcatggatttttcagtagaataagttaaaatgttctggaacgattttgtcaatgcatgttgaaaaatctgaaaatgtttagtgctcagtaaattttctaccgttcccttagtcatctccattttaattctaagcagacggaggtcattttaaaacacaatactaatagaaaacatataccgtaaataatatgtaccagtcatcaactcaattctcacaacactgtaaggtaggactattaaaatctccatttaacagacgaaacagaggtctgttaactggctagcccaaggtcacgcagctattcgtggcaaacctgggccacgaagcaccacaaaactatgctacttcatcgatcttctgatccatcatccctgaggattcagatttgcatttacctggagaatctcacggtgccacaaagtggagttcccggttcgtggcttatgagccacactgcccgctgcgccatggttaagtcagtaaagcattagctcatctcataattaaggtcgccaccgaggaacagcgcagaccggctttctcagacagactcttaacagaagccctgaggctcatcctgcgccgcataccggtcgcgctcagcagagaggttagcttttttaggtgaagtcactaacgcttctgagtcgctctaggccaacacacaccacaaaaagttctaagaaccccaacctataaccttgagaaatttacctataccctgcaactccggtattttcttcctctaaattctacttccggaatggtggcccgcaaggatcaaagttcctcatacacggtagcgtcgagccttttttcggttctttcgccgctcgttttattcgccggcccctcccgacaacctccctggcgcgcgcagttccacttccggcgtatgaggcggtgacaatgggagcagcgcgggcggcgccgggaggcagctgacaagcgtttgcggcttcgcttcatggccgctctcccgcccctcctgggatctgtggggagctggggagcccgcagcggcccggagccggagctggcgagccgagcggagacctgtgcgccgcgcctctgaggcgcagcatgtgaagcggagacggcatccagtggggggcgagcctctcagccggccgggatggctaccacggccgagctcttcgaggtgggccccggcggctctacagggagtggcaggcccggggtttgcaggcagctgggtgggcgggccgaggagcgggcgtttgctggctgcccaggaggagccctcgggagagaggtgcgaaacagaagggttggggtggcagctccgtgtcagcgcgggcggagcgtgaaatgggggaggggtgcttggggccgaggtgggctgggcggccggtcggcagagaggggaagccgggtgtcccaagggaggagggttgcttttgtttgtgggggcaagagggaaagtctggaaggttcgggtgttggaagatgtctactccggatgagtagtgggaagggctgactcaggacgaggaaagagagccaggagcctcaggttgggcgagtcttgtcgctggggtcctcgcgggaataataggaggaagccacttgagatcgggactcttgggggcttctcgttttgagtaattattccattagtaaggttgcaggtggcattcataggactgccagtttaacctgacatttgaaaaggctgggacaatttttttttttttggacaataaaggcctacttatctctttcgactgaagagagatagactgaagggaggcaaaattcaagtgaacactttatttcatgtaatacataataatacactcgaggcatttacgtgtattataaaataaaaaaagtttataaaataaaacgaacacttcgtttcatgtatataatgcaccttaagtgtattatatgcatttacatgtattataaaatcacctaactgcaagctagagaatccttaatatgtaatagtgagaatactaatgtctttcctcgagcgtttacagtatctaaaccttaaaatttaatttcgtgaagtccgttgtaagaagctgtgataaaagtttgagataatagaataggaaaactctaattaggctacaaaacaatgacacgtataaagcatctccttgtgtgaaagaaatgaaaacggataagaaaaaggaaagaaagaccccttttttgtgtgtgtgcttgtgtttcacattgagtaacaaaagtgtaataattgagaagactgtaatccacaatagggaacttctccataagtgaaaatggtatcctttttctgcgtaagattcagcagtttttgtggcttacaatttgaatgccacagttttaataacaaatggaaatttacatttgttattgttactatattttgcatatcagtcagcttttggatagataatgctttttttgagaggagtaatatatgttattgttataataagttgtaataagacagtaatttgtgaatgaaggattgtaattacaagaaagacttcagagatattgtattttctcacttaagtgttgggagatatgctacattaatttctgtaattccaaaattgtgccatctgtttattgacacaagaacggggagacatttttcctgctaggaacttttactgtgtccctaggtactaagtagtgctgtggttccttgttttatttttcacatcttaaaaagggagaaaacgatgaagttgtatgagatctttaattaaggtatttgccggcaagccagctcttaactgaaaactgttatatatgttgtcatacagttcataagacattatcctttgagttaatcctgcttgacagttccagttgtaccttggaccatcttatgtatatttttatttaaatgtttgaccacatgatt

SEQ ID NO: 1241121 - DNA, 4001 bp, Homo sapiens
tgcgaaaggcttcatcccagcgctgccggtactccagtcgtaccagacctcggcctgcattaggtacatatgctgttaccagcacaaacgagtcaaattcagccacaatcacccggccttcctgatcatgctcctcatcgcctatagaaatgaaacagaattagcataaaaaactataagaaaagggaaagcaatcaagaggtggggcagagatagagaattagcaattggttttgaagagttcaggcattaggcatcaatagggtctcacctatgccgtaagaaactttgagtgggcactggcgggaaagcaggcccacgccactgtacccttccttgtccgaaggagctgaccagtattgatgagagagtccaggcagctcctgaagttcagctggtagtttgttctctgaacatttggtctcttgaaggcacagtatatctggggcttcttcctttacccactgtaagtgaaaagaaaggtggaaaacgtattatcaattcagcagaacatttattgaataatctatatgctaagtcatagatacgcacgggttaaacagtctcttggcctaaggagttcgagtcaagcagcacaatattcaaacaattctaagctagataaatgaaaacaaatatagagaggtaagaaagtcttacatgctatgccaaggagatgtgttttttctataggcagtggatagcaagctaagatttttaagctatggttaatggaatggaggacatgcttcatatggaatgcaatgcaggaagataaaatggaggaagtatagtgaagaggtttttgcaacattctgggaagaggagagaacactaaaaaagaaaatggcaatggaagtgaaggaacagacatttaggaaatacaactggcaagactggggaagccccacagaaaactacgggcaggagaaaaataaaacagcctgaaggctaaacggagaaaaggggtgactaaaccctaagaccattcaatactaaaaaatgtctctttccctcaaattccactcacatctaatcctttcttcttaatccaggctcgaagcccatccacattccaagagcagatcttgagtgtggcaggtttgccactgggtgaggttttctgatctggggggtcctcatacagggctgggccctctcctgctgcctctttgtcatttttctttgcggccgtcttactcttcttggcctctggctctataaaatgagtaatatatactgacaaaaagctggtggtttccaactgcgatccggcgttaactatagacccaacgaaagcctacggttcctgcgacttcttcacaaacccctgcaaaaatgagtcggcccgtacttaccgtacatcaagggaatgacaaacacccccgccgcagcttctaggaagaagggctgatttcattcccttacctgtcctgagctcatccccgtcttccgccaccgctccctttttcccacgcttcggcattcccgttacgaacgcccttgggcagctgtaccgcgtcacccaccgaagcaatatttttaccgcgttgcctacagacgcaaagaaatcatgaaaccagctaaggctggggagaagactcctcccaagagcgtccccgcaccaggtcccgcctttcaaaccacgttatctctaaatcctttccccgcctccgtgcatcataggcccttcagcccctcacccacgaaactagatcatttcatagtgccttgtaccctactcgcgagatctgccctccagccaattgaggatcttaattaagggtcctgactcaagcttgccgttcagactgccagcgaagcccctcttatgagcaaaagagcaaccccgtatctgcaccggcccgatggcagcctagctcctcctaacccgagcacaaagaagggtgcacgctgagcccccacgtgggtagcggacctggtcacgtgatcagaggcgcgcttgtcgtggccgaagaatgcgcgtgattggtctgtctgacaccacgtgacggagacgcttagcctcgcctccctcctctaattctctaggacacttaggtccccaaccctccctcgggctgtttatcgttgtgccagatgcacagcacattgtgtgacactgacttaagattctaactatgtgcaagagggaaaaaaacagtggagaaggctgggctggaccacgggaaagagataggaaaacggatacgaatgtaaggcacagagttggctcggcgtccctggcagttaggaagacaggtccctggaggggccttggcgggtctccgctcgcgggagttccgcggtgtctttcccagtgctatctgcaggctggccagcttcctctgcgctccggaaagctgcggcccagcgcggactagtgaggacctccacagctcctgacattgccaggagtcctgtcggcgttttctcccagcctccgccatgccggcggtgctgggttttgaaggcagcgccaataagattggcgtgggcgtggtgcgggatggcaaggtgctggcgaacccgcggcggacttacgtcacgcctcctggcacaggttggtgagtaggggacttaagagttttccgcgcacttccccgcacagaatcagccttccatcttcctaaatactagtgaggtgcagctttcgatccgagtctcattgaaattatgtgacattattaacgtcacaaggctgatgactagaagagttacaggcacttggacgtggatctgatgagttcatttaccttttactgagcgcattttatgtgctaagtattcagaaatagatgttatactgctgtggagtcagacatataaatagatgtttatactacagcatgataaacagtataatagagatggactcgaaatattctgtttaaaaaacgcttagcaggagtatagattccagttgccctgaatatacactccctttttaaaaaaaaattattttttgaaatattctaggatgagtagagagatgagagtggaaagactcccggcttacatgtcagacagaactggctggctttgctatattcatattaaatatttttgttttggacatttggtctttattttttattttattttatttttttgagacagagtcttgctctgtcgcccaggctggaatgcagtggcacgatctcggctcactgcaatctctgccttccaggttcaagcgattcttctaccccagcctcccaagtagctaggactataggtgtgcgccaccacatccagctaaattttgtatttttagtagagtcggggtttccaccaggccaagctggtctcgaactcctgacctcagatgatccgcccaccccagcctcccaaagtgtggaaattacaggcatgagccaccgctcgggcctggtctttgtttttaaaatgggaataatacctgtatcattaggtcttgaagattagatgaaagtaccaaacacggctgggcgtggtggctcacgcctgtaatcccagcactttgggaggccaaggcaggcagatcacctgaggtcggggttcgagaccagcctgaccaacatggagaaaccatgtttccactaaaaaatacaaaaaattaactgggcgtggtggcgcatgcctgtaaacccagctacttgggaggctgaggcaggagaattgcgtgaacccgggagacagaggttgcagtgagccgagatggtgccattgcactccagcctgggcatcaagagtgaaactctgtctcaaaaaaaaaaaaagtacaaaacacattacaacttttaattgatattttaaataagctattatatcttgctactctcccctcaaacacttgcatacataggagagggcagctgacttgcatgtatctgaaaagcctccctgaacaggtgatgttgtgacagatactcactagaaatatatatgtatgtttagcattcactcctctgggcacttgggcactgggaatacaaagataaataaaatactcaatgctt

SEQ ID NO: 1241122 - DNA, 4001 bp, Homo sapiens
acgaacaaggcagagaggtctctcatcttgagaacagacccatggtaagatttattttactttaacaagaagtctaaggctgagagtggtggctcacacttgtaatcctagcactttgggaggcccaggcaggcgcatcacttgaggtcaggagtttgaaaccagcctggccaacaggtgaaaccctgtctctactaaaaatacaaaaaaattagccgggcatggtggtgggcccctgtagtcccagctactcggaaggctgaggcacgagaatcgcttgagcccgggaggcagaggttgcagtgagctgagatcacgccactgtactcccacctgggcgacagagggagactccaactcaaaaaaaaaaaaaaaaaaaaaaaaaagaagtgtatatgacaatagagaaatccttatttgggtgctgttgtttctttccagcacaagttcacaaaataagctagggaaaatcccccccgcccgggaaatgtcttggttgatttcccgtttgctctcttagagcattttcagacacctgctctatctttctgcccaaagatagagatgctgggtgggtttctatgttctagggatagaaggcaaggacttggtcactgtaacacagaactgagctagccacttgggtgtctggttggcaagttgccctggtaactccttgtttaaattgtaaactagatagaccttcaaagctacaattatgaaagtgtactaacagccacagcccaacagaaatgaaaatgtacaagcaagtacatttgcaatttttaattagcttttttttttttgagatgaagtctccctctgtcgccaggctggagtgcagtggcgcgatctcgactcacagcaacctccgtctcccgggttcaagcgattttcctgcctcatcctcccgagtagctgggtctacaggcgcgcgccactatgcccagctaatttctgtatttttagcagagacgtttcaccatgttgggcaggatggtctcacctcttgatttcgtgatccgcttgcctcggcctcccaaagtgctgggattacaagcgtgagccacggagcccgtccaatttttaattaacacttttttaatacttctttaattattgtttaaaccaagttttccagcctccttcattagcctgtttggtatttgcatgctttgcttgaatattttatctccagcccattccacaccgttagtcaacattttcatctgacagacggaatcaaggcctaggcctcccttaaacaaaacatccctcccaaaagtaccacttataaaaattgcttgccacagacattcttgctacagacattctttgcggatctttggccagtaacatgcatatacccacacatagtttgcaaataacaactattcaacgtgaagtgctacaaaagtacgatgataaagtgctcgccgcttgaagaaaagcactaataattgtaacaaagccaaaacacacacacacacaacgaaaaaaaacgcacggtaagccaagagctctttaaaaataaaaaataatcattctcgggaacaaataaggtaggtacaaacttgccaggtgactctgttacgcttaaaggttctggctgtcaacagtccccggcgtggtggcggcggcaccctcagtcccatccgactgagggcgttgatgcgggagcctcggggctgcgggactgttcgggataggacgcgagagcacctggacaaaggcctgaggcggctgtgcagaacagggagtggccccgaggcccgggtttgtcttcccttccggtcacccctcccggcccaatgtccccaggcccctgcttaccccgctgggcgccgtatccctgcgctcggcgccgcgctccggagcgagttgacagccgcggcaggcgaaggcgcggcagagaggggggagaaaggtcttcttccccgcccgcaagaccaccatggccccacgccccctggctcccgcggcgcacggcagcattgcgacggcgcgaggggccgctttacggcagggtcgcgaagcccgaggaagcgcggcggcgcggccgaccgtgcgctttcccagcggtgcgacggggtgagggggcggcgggcggcgcgggctgacccgggcggccgctccttggtcgcggtcactccaggctgcctcgctgcgccgctggcggtgggcgtggcgctgccggcggctaggcgcggacgccggaggaggtgtccccgggtttaggggtgttcggccaggggcggggctgccgggcccgggcgactgccggagctgcggaagtcgtggaagcgtcggcgacgcatcgcgcgatggcgcgggcgggacaggtgagcgaagcgcggcttgtagccttttccctctctcggggggacgagtggggcaccacctccgcgcggggctccccgctgggccaccccttcgccagcgcccagccccgtgcggcctgtcggatcaggcagggcagagtcggtctcggcgctgtccccgcccctggggtcggaagcgaccggggctggccgggcctggtctctggtgtctccggccgggcctcggttcccctcctcccccggcttcccccggccgggccgagctcccctcgcgcgcccattgtgaggtcacgtcctgcaggcgcgccctggcacccgggccaagacgcccggagcggctgctgcagccagtagcggccccttcaccggctgccccgctcagacctagtcgggaggggtgcgaggcatgcagctgggggcccagctccggtgccgcaccccgtaaagggctgatcttccacctcgccacctcagccacgggacgccaagaccgcatccaattcagacttcttttgggtaaagggccaagagggaagggcgaggcggggaggaagcagctcgggccgccttccctccgtggcctccaggacatccgccggggatagattatgcgtttccattggttacccaccttgagcgagccgtttgatagaaaccaagagcttgaaacgtgcattaggccattgtggactcccagtgggaggcgagtgaatgaattattcatagttaccacgttttcgcgggttgtttttttttgagagagtggagcatgttgggggctgaggaggtgttgggcctcgaaagcccaaggtggtgcccttcagcgctgtcccggtcgctcttctttacctgtggggttttaatctcttcagggagacttctgtgagggaagatgtgtgaggagctaaaagggtggggaggggaagtgcacaaagggatggagagaaacgaagaagcggggaccttggggatgtctgagagccactggtttttgttctggttctttcttttgcttagagtttctggaaactaggcatagctgtgtggcggggcggggtactgttagtgttcggaaggttacaagagctactgtttcacctttcataaaggtgccctgctggttccaaatagtttgtgtcgcgtacggtgactcacaccttaatcccagcactttgggaggcggaggcgggcggatcgtctgagaccagcctgggcaatatagtgagacctgtctctactaaaaataacattagctgggcgtagtggtgtacgactgtagacccagctactggggaggctgaggtgggatgactgctcagaagtatacctttttaaaatgagaattttagaatgacttaatataccattagtgttctgcagaagccttgtgctgtagtaagttatcattcttgtcgtcttttagtgcttgtgaaactgaacacaacaaaagtatggatatgggaaaccaacatccttctattagtaggcttcaggaaatccaaaaggaagtaaaaagtgtagaacagcaagttatcggcttcagtggtctgtcagatgacaagaattacaagaaactggagaggattctaacaaaacagctttttgaaatagactctgtagatactgaaggaaaaggagatattcagcaagctaggaagc

SEQ ID NO: 1241123 - DNA, 4001 bp, Homo sapiens
cctgtaatcccagctactcaggaggctgaggcaggagaatcgcttaaacctgggaggtggaggttgcagtgagccgagattgcgccattgcactccagcctgggtaacaagagcgaaactaactccgtctcaaaaaaaaaaaaaaaaaattggggcttggcacagtggctcacgtctgtaatcccagaactttgggaggccgaggtgggcagatcacctgaggtcaggagtttgagaccagccttgccaacatggtgaaacccatctctattaaaaatacaaaaattagcaaggtatggtggcacacacatgcctgcagtcccagctactcgggaggctgaggcaggagaattgcttgaacctgggagggggaggttgctgtgagccgagattgcgccactgcactccaacctgggcagcagagggaggctctgtctcaaaaataaaataaaataaaataaaataaaattggcataaaattccaaccctgccacacatcctcaagttggaagacacacaatggtaacaacagaaaacactctgagtagtctggtttacactcttctagggacctcgcatgttaactatgaataaacataagtcctgataacatcccaataaaagagtgctactatgattatctccattttacagataaagaaactgagatgcagatagattaactcacccaatgtcatggcgagttataaggcagagcaaggattttaaccccatcagtcagactccaaagttcgtgttaaacaataaacgtgttttcatcataagggttatacaatggtcaccttcttttttaaacctgataacatattttacttccaactctaggatagcatcatgcaataagaaaagtatgacagaggtacccattccgttcccagcttgatcagtagctggagaatggaagacaaagtgcaaaaaaaaaaaaaaaaaaaaaaaaaaaaagaaaaaaaaagaaagaaagaaagaaagaaaaagaaaaaaagaaatacaagtacagactttggaatcacgagactcaaacagacccctgaacaaagtctggggctcaatttccccatatgtaaaataaaagaatttatgttattgagaaggtcaaagaaggtaatatgaataaagtgacaagtacagtatacaggatgggggttttcatttaaagtttacagacacccagagggtccacggatgggcttcagagtccaccaatctcattaagtgtattacaaactgtatgtgtgcccattttttaaagaattgttcctggctttccacaaactttcaagaaataagttatctccaaaaagttaagaaccactggaatacatagcaggtactcaaagaaaaaagctacctttcgctccttgttctcacaaattctccctttttacttaaagatgacacaccaaggcttcacaataaatgtgcattgtatctcaccattttcttggcttgggtaagtagtaacatatgcaagcttatgccccaattctctagcgatagtctaggccctcaaacactgcttcatttctctcttcaccgagaggagtacacggtatatactcgagaacaatcatccacctagctgcacaaagcaccatatcggctaggaaaaccaaataggaaccacagcctcagggctggaccatagacaccggataccccaacgctacagggtgaggagaatgtgttcccccaaactactgggcaaaccaggagtctgaacccccctacccttttcctccctctctctctggaactctggtaaaggcaggtcttctgggctctgcctaaggctggagagaaacgttacccgagccgggggttgcagcgcgacgaagttccacctccgctgtcctgggaaggggcggcagcactcagcagaagacgggctccccactctcccaccaacagaccccagagttggtctccacccggcctgggaaccggctcgggggattgccctttccccaaggagtttccgcttccgggctatcctttgccggaagcagtatgtgaatgacgtagaagtattgcgccgttggtgattacggaagaaccaggagtttggcgtgaccatggtgagagaagacggtccaagaagggacgttatcaggccactttttgggtggagaaggaggtagtcagaccgtggccaaatttccttcacattatcctagcatattttcattctggtcttagctcttaaacttctccaagcggtgactgttatgctttacagagtggggaagagggtctgggttatttgaggcaagaagggaaggcaatagacaagagaaaagaagagactttaaaagatgccgtgtgtttccaacttttttaattctaaaatttctgtttcaaggggaagcaaaagaaaacaaggaagtatgcgaccatgaagcgaatgcttagtctcagagatcagaggctgtgagtgtctggaatcaactgcccagggatattctaataagagtctagagaggataagtagtaaaaatgtttgttgttattattttgttttttgcttattatcgtgtcttagatttatatagcatgagatagccagtgtttaacagtaatttagctgctgagcgatcacactgggaaaggcgatgggaattaaacatttcttaagtgttcactttttctaccgttatatgctttgtctgccatatcgcatttaaacctcatgtcagttcggtgaagtccgtatagttctctttatgtttttaccattacactactacattcccctggggtggggcgaggggagtgtttcttgttgaaagatggcaaggttagagaccttgtttgtctggcgtttccagtgcctggtactcaaatatttttgtcagagaaaatgggaaaactccaagatatctccattttataagtcttactaatataagaatccaaatcactgtggaagaagaaagtgaagtgaaattccctagtatgaagaggatcaaagcggtgtccctgcttaagtgtagaataagcatagctattaaataaagactgatcttcactgagtttaagagtctcagaaagccgggcgcagtggctcacgcctgtaatcccagcactttgggaggctgaggcgggtggatcacctgaggtgaggagttcaaaaccagcctggccaacacggtgaaaccctgtctccactaaaaatacaaaaaagagtctcagaataagagaatagtcgttaaaaccttcagaattattattctcagcctttagtgtggatgtattgtgtaatttttaggaatgacactccattaataataatttctttctagttaagggttaagttctgtatatgcgtttttacattttagccctttataagaagcatatggggtaatacttttcccccaaaagttaaagcatctgaatcttcagaagataactgtcacccttttacccattgcttggaagtggattgtgatccttgatgtgagagattctgactaaaaaataaatatagtataatcagcttttatttactcattaacaattcttatgcattattggcattactggttaattctgatacttccaggtactgtgctttgcactagagttatttgctcagaaagagtatgctgatattaacatgaggatatcacaaagtaggatttcttcagtagaccaaaaaaaaaaaaaaatggaactttagatttttgagattttaattgctgtggtttttcttctcccttggatttaatttacctttttcttcctagtaaagaaaaggatagattaaaacctaaaaagaaagaaaagaaggatcccagcgcattaaaggaaagagaagtgtgagtaatcaaacgtttgaagttttcctttaaaaccatagacctcttagaaatccaggctttccctgagctggtttgctaacttatttgttagtaagtctagcacaactatgtagatgaaagtcatatcgatgagcatatatcaattctagtggtttgaag

SEQ ID NO: 1241124 - DNA, 4001 bp, Homo sapiens
gttttattcctactcatgcatgatgtgtttcagaacttacttgctgacatttcagagaacttcttacattacctgtttaacatactgaggtgcaactggaacatattacaatattactcattatttgccactgtgggctaagtttactatactggtcttagatataaaaggtcacatttgaaattactaagttagaactcataaggaaggggggggaaggccttaaatataaaagacaaacggcagtttgattaagcaataattttcagtttactagatgaaacagacttgcaacatagtctgcatgaatgcaaaataagccatctacagcaagtgataaggaaactgggcaaaaaaggaaaaaagcatacataggaaaatgaaagattctctcgaaataaaaaaatcaaactattattacaaaggactttaccaagaactgctgtgtttcccccatcccatctgctggaagtcaacaagagcatctagcaactttgtgttcatgtcaaatgtcagatcagagcatcctaacgcaaagccaacaaaaaaaaaaaaaaaaaaaaaaggaaaaagaaagggaaacaaacaaaagagaaaacccccaagccccgtccccgccaaactgtagaacagtaactccagagttcaaattcaaaagaagagaaagtggcaattgaaagaggtgatggtggcgataatcctatgaatgggtttttgatttctctccttccaggggatgggtggagaatgctcattaagatttgtagttagaggttaaccatgtgagcccctcatagagtccgtcccctgaggtggcacaggagggctgcacataccagttcctgtcccgaatccgggtcaggcccagtttctcctggatctcgtggggtttcatggcatcgggcaggtcctgcttgttggcgaagatgaggattatggcgtccctcatctcccggtcattgataatgcggtgcagctcctggcgagcctcatcgatgcggtcgcggtcggcgcagtccactacgaagatgagaccttgggtcccagtgtagtaatgccgccagagcggccggatcttgtcctggccgcccacatcccatacgttgaacttgacatttttgtaagtcaccgtctccacgttgaaacccacagtgggaatggtggtcaccgactggcccagcttcaacttgtacaggattgttgtcttgccggccgcgtccaggcccaacatgaggatccgcatttccttgttcccgaagattttggatagcaccttccccatcgcgtcggaggagccggggccgggggcattcaggtgtcccgggtcccctcagccaacaacgccgccgccgccgcgaaaccgaaacgaagcctctcggccgcgagagcgcctttgcggcctgcgtgggagttgcctcctaagggcagaggcccaggccccccgctcactcgggcatcaccgaccgcacaacttgatttctccagtcgccgccgccacccgggccctgagactgcgctgggagccgccgccctgctgaggcgcggcccggcccggaactgcccttccccccgcaggcgccgcgcgagcgccgccgcggttcccgctcctccgccttcctctcaccgcgagggagactgcagccctccggcccgcccgccggcctgcgagcactgggctccccaccgacccaggacacccgagaggcagcgcggctccggggccccgtcaggtcatggatcctcgcgggaactcggtgcgctgcctgcagagaaacagagagggaggggagttactgccagagctccacaaaggagcgaagaccgaggtggcccgcctttccagctcggcccaaggggttacctccagccgccgccccgagcgcgggctccctccggcctccaactcctcctcccagttctgccgccgccgctgccggaaaaggcgccgaggaaaccgcctcacttcccctcccgaccacgcaggcgcagcagaggccgaccgttcggacaagagcgacctctgtaaggagagcggcccgcgcgcctagcgtcatgggcgccacgcgccggaggggcggggctacggcgcctcggagggctcgcagatgcggccggcccagagccctcgaacctcggactctgactcgcgcctacccgtggctcttctagcgtctccttccctgcttttctcttttgcgctctgccctcccctgcccacccgaaccaagggagcagatctactggggggccctacagggtggggcccacgggcagcccgctctctccacgaaccgagctgcctccaggcctgttcccagacctcggtgcccgccagatgctctgcgaattccctccgcccgccccagccttcccgcaccctccgcgctccctgaacgtcccagggaagctctgttcgcttttgttttttttttttttccctttttcgcaaccccttcttggcttcctttatcccttgaattttgtatgtttcctgaaagacacgtgggaggccagtgtctcgtgtggaatctgccagtcagtgcagcgctttcccggagttgagtttactctgcagctcttttgaatgtttgagccctgtctgcctataggtctcgtcaagaccagcccatgtttcttaaaaactgcagtattatgaagagttcctgtgccttgccgcgttttcacctttttagaatgcgacatctgttcatctttaaaatatcattttatctcatactgttagtagtagcttcttaactactacccattcttaactttaagaagcatagaatttagaatatagaacgaccgcttgtatggcctggatctgggcacttaaccttactaagtttatctcgtgtaaactgaccttgctaactcacgtgaggcttaaataatacaatgtggaagacttcagggcacatttttggttttttggtttttgtttgtttcttgagacggggtctcactctgtcgcccaggctggagtccagttgcacaatctcggctcactgcagcctcctcatcctgggttcaagcagttctgccttagcctccggagcagctggaattaggtcgcccaccaccacgcccggctaatttttgtatttttagtagagacggggtttcaccatgttggccaggctggtctcgaagtcctgacctcaggtgatccacccgcctcggccccccaaaatgctgggattacaggcgtgagccactgcgccctgccaaggacacatttttgtatcaaatggttaatgataaaattagacttaaaataacgtgaaaccttcaaatatcaaggggagaaaaacaggaaatgggtatctttgtttaaaaagcaagatgctataaacagcatatggtaacatactgtttttattaaacaaatttaaaatattagataatggtagataggttatatgataaccttataaacgtcatttcagtcggaaataaacttattaaacattaatattctaacaattatttcatttactttccatttaccttaagatgaagcactgtcataaaactgaaaagcttaggagtctgaagattggggttcaagtgtcatccccaaccccacctctctatttttgggacaaggtctcgctctgtcaccaaggctgcagtgcagtggtgcgatgtcagctcactgcagcttcagcctcctaggctcaagagatcctcccacctcagcctcaccagtatctgggactaaaggcgtgcgccaccacgcctgactaatttctctattttttgtagagacaggttttgccatgttggccagactggtctggaactcctggccccaagtgatctgcccgcctcggcctcccaaagtgctggcattacaggcaagagccaccgcgcctagcccttttttaatttttatctagacacctgggttatgtttttgtgttttgtgtttttgttttttgtttttgagacagagccttgctgtgttgcccaggttgaagtgcagtggctcggtc

SEQ ID NO: 1241125 - DNA, 4001 bp, Homo sapiens
ggcctcccaaagtgctgggattacaggcatgagccaccgcaccctgcttataaaggtattcaaatttggtgctgttactaagagaagggttctcccttactatggaaatggcatttatagctgggcacagtggctcacacctataatctcagcactttgggaagctgaggtgggcggatcacctgaggtcaggagttcaagaccagcctgaccaacatggtgaaaccccgtgtctactaaaaatacaaaattagccaggtgtggtggcacgcacctgtaattccagctacttgggaggagaattgcttgaacccagaaggtggaggttgcaatgagccaatattgcatcactgcactccagcctgggtgatggaataagactccatctcaaaaaaagaaaaaaaaaaagaacacggaaaatatagatctaagcctattagttctatataagatcagtgagcctataagacctatattactgcttccagtaataaagatattaaccctagagaggaaataatttgaagacagaaaactggcgagactgataaatcataagcatctcaagatggagttaggaaaatggaattttaaggggaaaggttgactgtgcagttgaagctggagctagtgttcttagcatcacttgcattccctgacagctgttcagaccttgcctcactctacctccttgccttccaacacactctttattgcaagaagactttccctgatgactccttgatcttaagccgcagacggaatccaaaggaggatgcgggatgtggcagactgttcccaaacacaaagctgtgtagtccctggatgtcagagaaaagactctgaagtggtctattactagtcctgcactaatatctaaaaatctaaccacttacccaaactggagagccttttcatcaagccagcttctcttatggcagcgggaccatgctccactccttttcttttctgtcagtcacacaaattacacaattagaggtagagaaggtgtcggaaaaaaacccatttggtacatttagttcccagcaggttcctctgaaaacctgtgacagcatcagcccttccatcaatgactgtccttccaactccattgttggaatcacatcagctgcccaagccaagacgggagaggctgagccaggttaggatccaggagctaggcgtgtgtggggctggctcgggccagagactgggcttctgggcttcgagatgactgagcgctcccgactgcaggtttccttcattgaagagaacaaaacagctcctccccacctcccgcgctggagaggccagctccaatttccctcccagttaatgctcattctgagtgaatggatccagaagacttaaatcctcggtcgctccttttaacctcctccatcgattctccactggggattctgaccagtttcgcctcctccagcccctccaaggaatcctcttcctcattctctcccctccattaccccaagctgcatccaccgttttctcggtctttctggggaggccgcagaaacacaccctcatcccaaacagggtgccctccacccctccctccctccctctccattctctgtcggaggatatcccacatgctcccacggtgcccagtagcgggaaccggccagctcttcccctcgccatttctccccatcctctcctcgcctcccggtcccccgcaccctaccgccgctgtctccaggttctagggggcggaggatcctgcccggcggttccaggtgccagttctcacctgcccttgtgagaacggggctcctatcacagccacggagtggacggatttcttcaggatggaatgcactcgcgtctggaggagacgcgagaggctgccccttagggacatgatccgcagcactgagaatctccaaggcagaggctccgcgcggttggaagccgggagtgagcgccaccgcccgccgctgctcttacctacccgcgccagcgtccgcccgccccgtgacgtcaccgccacattggccccgccgcccgcgcctccaaccagcccccggcacaccttcttcgcaggccccgcccaccgctctgcaaggctgggacgtgccttcgatgacgtcaccccactctggcctgtgctctccggccagggacatgcccctgccgctgacgccagaaggccaatatccgggtctggccagtaagagcgcggtgaccaacaggtgtgtcccttcgcgggaggcggccggcccatgccaggttcctgaacttggcggaacgcaggagccgacaccaatcttcacgcccggctgatgctgactctacggatgggctggctgggtcgggcctggtctggccctgcctagtcaaagccaggatccacctgcttcgttctatctcaaagctcaaagcccaggaaacactcttagactgggcatcagtgaaatttggattcggagatataatatagatgagagctctctgagccgggcacgtttataaagagccatctaccttaggtattttgaatgaaagaggttaggatttacaaagcaattaccttttagatgtttttaattctttacctgaataacgggagcgctggttattaaaaaagcaaatatagcaacgtatttagactatttctaagctaaagagctgtaagtgctaagtaactagagttttaataacgaataataatttaataatctcagcattccaagaactttacccctccaattctataccacaggttactttttaaagcgaagaaaagatcaaagacataagtaattttcccagagccacatagcttgtaagtggcagagctgactccacattccaagttcttaaccaagacaccatggcatgcaagaatctagacattatttctaccaaattaattttttacataaactcctgaaatttatttcacctcatgtcaatttacacactgctctccaaaacagttcagaggtctccatggcaacaccataactccaaaggagttttagtaccctaagacattttatttttagaggctctgttgtatattgtctccccctgctggtttaacaatgatgtctttgaggccttagcaaaataaccactgtaaggcagtggttctgaaagtgtggtcccagaccagcagcatcagcatcacctggatacagcatcaagaagaaactggctgcacatggtgactcacacctgtaattccaacactttgggaggccaaggcaggaggatctcctgagcccaggagtttgagaccagcctgggcagcatagtgagacgctgactctaccagaaatttaaaaaaaaaaaaatagctggatgtggtggcatgtgcctatggccccagctacttgggaggctaaagtgggagaatctcttgagcccaggaagtcgaggcttcagtgagccatgatcacaccactgcatctcagcctgagtgacagagtgagaccctatctcaaaaaaataaaaataaaaagcagcaagaaacttcttgcttcttgagcacctgctatgggtcaccagatacttgttagaagtgcaaattcttgggccccactcgcgaatttacagaatcagtaactctaggggtagggcaccggtaacctatgttttaacaagccctccaggaatgggtgggggcgtggtcagggattcacagtcacagatactgtcatacttgttcagttcattgaaattatgttgatacttttgtatttcttgcccatcactacattcaatttttttccccctttactaaatgttttctgaagttgatactggcacaggttgcctcagggcttcctgtgctactgcaaaaacctcttgcttccgctgggcgcggtggctcacacctgtaaaaccagcattttgggaggccgaggcaggtggatcacctgaggtcaggagtttgagaccagcctgaccaacatggagaaactcctgtctctcctaaaaatacaaaaagctgggcatggtggcgggcacct

SEQ ID NO: 1241126 - DNA, 4001 bp, Homo sapiens
ttaatgtacaaagaatggcaaaataagacatgttgatctaggtttaaaaacacagcctacacaagacaaccaaatcaatagttatttaatcatctgtaccgtctgattctgctttaagtcaattagatcaatagtgctatttcttgaaagttacaagcataggtatgcgcagcctttcactccagtgcgtttagtcataaattgctccagtgtctttgcaagtttttggtgacacatacttaccgctctttgtactacagataaaggtaatggaggtcaattagtatacaaaggatagatgaaagcaaaaaatgagaaaggaatttaaaatgaaagcaaaatcttactcaagaaactatctagtaggttacctagacggttagtaatacttatctacaaacactgaataagaataccgttttatcgtattacagtacaaataaactagaattgacagcaaaaggtttcattaacgtatttttaaaccaaacattattccaaatgtctaatcgctgcatctagatgaaatttttgttaggagaaccattttaagtggaaatgtagagcaagctcccatgaagtgaacgagatccttcatgcggataaacaccacctaacattctaactgaatactggttctggatttaagtggaattgacaaactcgccccccgcccctacctgtagaaagcaacataagcaagtactagtaaatacagcgaagcattttgctgttttacacctgaacatttaaaaaaaaattcagtttcctgcctatcacaaaggaaaaaataaatgatcgataagaatttaaacttaaaacgtaagcacaaacccatctatatgcctatcttgctctatctcaaaatatttgaattcccatttattaagcgatggccaaatccgaatttctatcacatggtagaagtataagcgtctcccctacaactttttcgggattttactaaacggcctaataacagtttgcccttacttccgtgcacctttcaacctcagctacaccccgagcctccagctctcttgcatttctaataacgctgaagagggagggtgagagggagtatttctgtgtggataagtgcgcgcgcgctcccgcgcggctccccacccccaccccgatacttttctttagtggaaagagaggaagaatctggaggttattctagcgaaaactcagtatcaaagcctcaacccagtcgcagtcagcccataggactctgggctctggatgcgcagtgcaacttctcatatcttactccaagcttcaaagcagatggaaaattggtgaagagaacccagggaggagtcgaggagatgagggaaagtgaaagggccgatcccccctacaaggcgtttaagtttgcaaccgagactgtgtttccgcgaatctgcacccgccccgtgtaccctttccaggtggaactcgttaacagcagcaacccggccaacggacaccgccacctcccctctcgacggaccacccgagactcgagcaagtgaggcggcgggcgagagcggacgcctggcggggccggcgatccccggccagcatcaggcctccgccgaccctggccccgtcacctgtggagaaagcaccccctcccccggcctctctgcccttcacgccgaacgtatccctaacgctgcagctgctgcccgcccggcctgcgaaaaccgagcgcagcgccaggctcccctcggcggccgcggggccccagccccttcaactggttacaaccggcagcggcgaccgagcggggcagctagccgcaggagggtccccgtccgggagggggcaggcaggcttggaggagcggggtccgcaaggtcctacctaacaacgtcggtctcctccgtctcctcctcaacggcagcggccccggcggtggcggcggcagcgacattcctggggaccgctcccgccgccgccgcctcctcctccactctccgctcgcctctcttcctcggcgcgctcaccgagcggcgcgtcccttcagccacctccccccgccctccccgacacacacgccccgaaaccctgagccccacggctcccgcagccagctcacccaccctccctccctccctccccgccaccagcggcggcccgtccctccccccttccccagcgcccgccgccgcgccgggctcagtaatggcggccactcgggctccctcgcgctgacggatttctctccctctctcccgaactttacctcagcatctctcccggcgcgcgcagccacacacccgaccgggggcggagcggcggcgcggcggcgcagcctggacgggacgcgcgcgcgcgcgcgaacccgcgctgccctccccacaatcccccgtccccgccccttcacctcgcgacgcctcccgcgccgcgcacccggcacggccccgcccctgccctcgtctcccgggagcctgggaaggcgcgagctatccagtcggagggagggggacgagcgcgcggggccgcgtcctcgctcgcgtccccgctccctcctcccctctgcttctccctcccctccactcccccattggcttctacccctcccccttcttcctccgcctctcccaccattggttccctcccctactccattccttctcaccttttcccttttacccattggcgtgagtatttttcctcagcttccctctttctccgtattctgctcctcctcagtcccatcctccacgctttggaagctactgccttactgcccggagcgccgtcgtccccgaacctcccctgcttctccctttccttctgttccggtttctggtcgtaactcaagagcaaaccaccgtactgcaaaggaaccagatattgtgctcgcggttccaaaccgggcatgggcaccgaatgcttctcgataaatccccttatggtctctgagcattaaagaaagcaagggaggaaaacatgcgcccaagctcgttcgcaggaacatgttcgcgtgtctgcgcctgtgtgcgcagccagttttctggctgaggatcgctcgccaactacagacatcacccgcccaggacccggtgccacactcacccagaagacgaaactccacaggagcgagaagaggagtccatttctccgtcggctcggcacggcacggggatgcaggcccctgattcagtacgttctgtgaaagtggagcgagaagccaagacgtggatcgagaagccccgtggggcgggtctcagggtggcccaaaagacccctgttcacgccactaccagcctaactttaggaactgtcgtccacctggcttttattatactgccttaaacatattcacttttttgagactctagaaatttcacaagttttggggtagagcacactgggctttgggtgtgtttctcatgagggcactgacgctgaatggtgcagtgagaaaggacggtagaaaccactgcctttgcttttaccattgaagaaactgaggtcctgtgactttcccgaggtcatcggaatctgccttgcacaggagacttaaaatagttgccagcagataaaagaatgagcaaaaccacatctactccaatttgttaagtctgaaagaaagtaattgaggggggattcctctttggggaaatatttatttcctgcattgaaaatagtttaatgttagtaaacatataaaaagtattttaaattcaagttattctttatttcttatgttacataaggtactgaagttagccaaggttgcttttgtgttataatgatgcagctgctgccaaccagaagtacatttacggtctgtcagtaaagaaaacaaaaactgcctgttggtaaaaatctattagaaaatatttgtcagtaaatttgtcacaatattccagcagaagttctgttcgtttttccgtcttcctgcccttcatatttctcaaaggtagacttaataaaggtagaagagacatttctaatttttctatatatctcttgctccctaatttctaaaaggcataact

SEQ ID NO: 1241127 - DNA, 4001 bp, Homo sapiens
ggacctctctctgccaacctccactaggagtctcaaaaagactcagccctgcttcatccagactcccctccctaagtgagtcaatgagacgtctttctccaactcctaacctaaacaaccaccccttgggctattcctttgcaaacttctttttcaagacagtctttgaagtcccttttactggaatttttttttcttttttgctgtaaatggggaaggggatactcaatgcagcctttaccttggtctctaccttccctacccccataccttgcctttgccataaaacaaaatagcttatttttctctgagctccatccagagttgcccgtttgtcttgaccgtctgggaagttagggcaaccactccagagacgggacattcagtgcgtcagcgcgcagacccggccccaaggtgtgtgggcgagcagacagacccccagtgttcccgggaccaggcggacgcagtgcgcgtgggtggggggaaggtggagatgggcgggggtgaggcagagtggggccgtctgctccaaggcagggagtgcggagctagggcttgagcagcgaggcagctgcaacccattaggggcggtgagctcatggctgagcgagagtctcagccacaggaaacggccgcggcaggaggggaggaggggtctggggagggaggcggcgggcgggagcacggagacccagcctcctgccggcggggaccagagaggagaccagagagactgagtcagctctccctggcccagttcctctttctttttcctccagcctccctgccagagggtgcccttccctccgtagaggggcggccccagtagtgcccctgcccctcctccactccctgcggtgagctccccctggcaaggcctctccccctcctccactctgcagcgagcggccccttggccatgcccccgccctctttgcagtgggcgctctctctggcagtgcccactctcgcagcggtgcttcagagtactctgcagtgaaagttcccagggcagtgttcactcctgttggtgtgggcttctccttagcgtaccctccagcgtccagcgccccaagttgctgctgccagggtcccctagtccctgcagggagctccggctcgtgttccctcccctctgtagcaggagtgccctgaggcagcccttcagttccctgcagcaagagctctggggcactttcctcctccgcaaactctggtcggctctggcagtgtcacgccccctggtactgtgagctcccccccaagcacccccaactatcctgaggcagctctttttctctgcgggaatttccctctttggccatgccccgggacccggcccagccacagctgtggccagtcccctagggccggatgggtgggcctgcctcaccgggttggggacagggatggaaaatggtggttccatgcaggtcagttctcatgacccgaggggccgggcctcttccagggtcgctgcaggaccaacccgcaggggtctcccgcgggtaaggagctcggaccaggagggggagggaagctccaggaaaggaaggcacaggtcaggacagaggagggcggggagcggggaggtgtgtggattaggggagagacccaagggaggatgggggaggaggcggaggagaggaggaagaaagggtgagggcaatacccggtggggacagagctaaacagtcgggcagacagacaaatcgaagaaggggggatgggagggaggagagtcccagaggggccgaacagtccgaggcaggctcgggaggcaccaggctgaggacttgggggcccggagcgggctgcgcgaaggccgaggggacccagggggctgcgacgctggactcaccatggctcggcgccgggccgcgtccgacgcttggtcgggcgggcggggccgggcgcgccaccgcctccctcccgccgctcgtgtctcgccgggtctggctaagggacagctccggccgcggtggcggctcggcccgctccggcttccaggccgcggggccccgccagggagggccgagacggccgcccctccccgccccgcccttcagcgcccgcccccgcctccgcgcgggaccccttgccgggactctgtctcccgcgccgagatctctgccgttccccgggcgtccccagcctatccgtcccgttcaccggcaaccttctttcttctccgccccgccctccagcgggtaacctcgaccctgaccctcggaggcccgcccagccgaggatgcccctcttttcccgccacggcctcgctccccgcgggatcagtttagcctcggcaagggatgctccaaaggctggggcgtgcgtgaattcccttgggccgccccttcccagaactggggtcttcctgcggctggaaagcctccccgctctaactcgcccgggatcctcttctctcaacggtttctagactttggcaggacccagggctcaaatgagaccttcaggcccctgcctgcctagcagagagcggagggccgggaaatcaggggattccccaaccccccgggggcttgcccgccctcctttccctccatctcctcgggcctggaatctctgggctgacaatgggctcctctgtgttgcctggggaaggcgggagtgtgcgggagttagggagcagcgaaggcttgggatagggggcggacatcctggccaagggggcagggttcccggatcgggatgcttatgtaggggcgtgcatttcgccggacattttctgagttctctcctccgtggcccttcccttccgcatccctacctctctattcggctagaagagggaaggcaccaggcctccagttcgaggattcggtactggatgccagccccttccttctgttggggtggctatagagtcccgcagggccgctagggctcgtggccatgggaatgggtgggtatctggcgcaggagacaaagcagggtgggctagttacgaaagttctagcctcactccctcatcaaaccccgagcgtcccccgacagtgtctgaatgagaaaggaaggccagatggggggtctcccaggagcccggggggaggcacgggcacggcggggagatgccctgcctggcctctgagcaggcaccgggaagccccgcagctccgtgagctcttctaaagggtggacggaagggagaggagaggagatcggaaagccgaatagtccccggaggggcgtgaacgcgtgtgcccctgcagctggagggcgatgatgagaaaacgtctggcctcgcctgcagttcctcggaggccggagcctctgggcagttgttggaacagcgggaggggaggcgggggtgccgccaaggtgacttgctcttctctcacctcctctggacgctaacctccacctttttctccgctccgctgagcctggaaaaggacagagcaagtgttcatccttcttagaggcaagaagaggcctctgctccatgcgtcaaaaaagaacctatggcaacaagccccggtaaccatcttccccgcacagttagagccgtggagttggagctctttctaacacccggctaggggaccctcgagtcaccgacactctccaggttctctattacgagggcccgcgagctaggagagtgagattttgctaccccctggtgtccattccgtaaatactgcccaggggcgggttacaggggccagtgtttaaaaaaccttattcacctgtctcaaacctagctcatctattctcggtgttgagagtgtctgaacctttcctcaccaggccttccattccttaaactgcagcaaattgtttagggaacacttggtagggtccaaggttgtccattggactccaaggctcactactcttaggtagtggaatataaattaatctggctatgggggtccacaaactcctggaaaaagggagtggatcatttttttttttcatggagaaaaaggggagccggccgggcgcggtggctcacgcctgtaatcccagcactt

SEQ ID NO: 1241128 - DNA, 4001 bp, Homo sapiens
tttggcaaacaaaaatctgacctgaaacattcaatggccacagcattcaagaacgctatatgagatcctttccctttaaccatccacatactgatatttgcagtcatcctcagtagaatatgtatctttttagtatatgttttaaaatacttattggaaagatttaactaaaactattattatacttcaacttcaaatattttagccacataagttcattttacacacagaagaaatgataccttcattacttaatccacgtattctttcttttagaaaatcgcattggcacacgggaagaaaaaaaatttacaaaaaatcccccaaagaaccaaagcaggacaaaagctttacttctgcaaaggttgctgccaacacaggaagtgtttaaaaatactatccgaatggacaacaattgaaaggctgcaccagcctttccaaagtactgctacagagagggcctaaactccgcatttagacacacagatcatttttcacccattcaacacatcctcctatgccgaaactgctgatcagtaggaacatcaattttgagtagcaaaacaaatgacattccacggcactagccttaggattggcagtgttcagggcgcgaggatcggggcagagttgactccacttaccttcatttttgttggtgatctgtggggttccagctcagcgagctatcttcgcagtcgctagaactatggggagggggaaagacaggcacagacataatcagtcaactgcggggagcgaccaagggaaagaaagtaaacaaacgccagcggggaggggcagaatcctcaccagccaagggacaagaccccttacgagggcagccaggacgcaggagctgagggggcagcgagaaccccacgagcgccaaagggcagcccgttccgccccggagctcgccagcggcccaccgcgcccccgcctcgctggccactttgacccggaatgctcaactcggagctccaggacagatagctccggaaaaggccagagctcccttcgggcttccccaggtcccccgcggagacgaccgccgagcctccgctccgcggtcccccggataccccgacttcggcccgcgccccgcctccgccgctcggccccctcggcccgccccgggcccgcggtggcggcagcggagtgtcacggcgccattgctctccttccttcgctctgcaccatgtcagaaaggagaagcgctccttcacccaaaggggcaggggccgcggccttcagccgggagccgccagagccccgggggacccgcgtgggggagggggcggggggcggaggggaggaggaggggaggtggcccggacagggtgtgggaggggaggggagccgcaccgcagcagccgctgcctcctcccagcgcccgcctcaactttttgtacagcccagagaggtatcagctcgtagcccctcgagtcctgccacggactccgcagaggtggacgcgccgcggagttgggggacggctcccccaagcagcccgctcttcaccgcgcggaagcaaacttagcggcgcggccagccccacagccattttcccgggaacccgaggaagcggacgaggaggcggctgcaactgcggcggcggttcctgcagttgctgccgctggtcaatggctggccccttcccttgcgctcgccgtgccacttgcctagcatccctctccccacctccaaagcttccaactgcaccgggacctcgggcagcagcagctgctgctactgccacttcgtccattcagtatccccggattcccctctccccacctaccaactgcgggtgaagtgcgcgctgtcagctccagagtcctcctcccctctgacctccgtgggcccccgtccgggcagcaccactcccagccgcggctgcagttcctgcgccgggttccccactcgccccgatttactgccacaatccaccaaataacaagctgttgagcagactcgcttctacacgaactcctattggctgctcatgacgccgaagagcttcggataggacctcgctacctgccgtcctcattggatgtagctgtgaaacttcatggattggtgagaaaaacagcaggtaggacatcttccacttatgattggctttttccgaaaaccaactttattggagagttggttattgagtaagcaagtcctgagaaatgattggtagagacgactccggatgtgcttgactgggcactgattggtgaattgaggggtcaggaagagcagttcgacacgaggattggcggcggagtgtcccatggaaacggaacccagaattgcagccaggggcttgcacgggggcggggcagggtctgtccaaggcgcttgcgctaaaccagcttgtcggcgccattttgtctcggcagcggtggccgtagctccatcgcattttatgtttctggcgagaagggaacggagttttcatcaggtagattggtttttgtgcggccgtcctccaccgtttcctccaggacagcacctagtcgtggccggaggagtctcagagctgtcagaaaggtcagttggaggctatggttgtccgattgactggggggatggcgcagccctagcggcaccggcaccggaagtgaaggggccgcaggcagccatggtaaacttctccctgcggcggggtggggagaaggggcgggatgaatgggggcgaggcttcctctcccgccgagataaagaggtggaggagaggcaaacgtctttcttggaggttctctttcgggttttcgagaatgtgagagattttctgggttctgtcccactgcaatctttcctgtctttggaagtgcatttcggggacttgccatgttctccacctgattggcaccagctgtgggagccttcttagttaagacagggaagaagtggttcttagaaacatcctgcatgggtagaggtttccgcgtgctcctcacgggataaagctatgaggaaactggagaaagcgctggctttctggatgctgaggaatttacttgccagcgcagacgcttcttctgtgaccttagacaagggtctgtcactctgcacgaggcttatgctactttttgaaagcaaacagtggttttgcagggactgaaaacatcttagacaaaaggacgtccccgataagatagacgttgatctttttctgttaacatcttatattctgttaaacgaaacacacatttttaaatagcggaattggagtataaaattgactagttttatagaatggagtaatttttaaaatgtgacatatcgtcagtaatccacgtggactaaattttctcagtaagaaaacagccgagcagaatcagttttttattcgtaacagtaattttgctcaaaagtattcataaaaacgtgaaatgcatgttggcatttctagtgagtgacctagtcacactggatagatcctaatagttaccctcaatacctctgttttaaaccctactgctatattggtggcgcccataactagaaaatgattgtgtgacttaacaattactgggttttttggcagttgtgctgaagaaaacagaacatctcagtgattactgaggtgagtcataaagtctaaaaatccttagaattgcgggggactacctggaaaaactttctatggattagtaaagaaataccagaatgggaggaagggtagttaaaagatgttttgtttggtcagattcaaatgagtctgtataattagctttctagtgtaatattttagaatgaaatcccaaaattaggacatccttatggacttgtttacccatttacgtggttctcatttctggactttgatatacctcatgtttttgttataaaacattatgcgtatttttgtgatttcctcccccccacccgcctatttaaaaagttcttatatagaaaagatcttgtaaatgggagtgtttaggagtgaggctttttttttttttttttttttttttttggagacagagtctctctct

SEQ ID NO: 1241129 - DNA, 4001 bp, Homo sapiens
acctgtttccagacctgaaaatgggagtaacgatcacctgtaactcatggtagccttgaccgaagtcagtgagagaaatctgcacacaagcttgggccagtgctcaacaaaggcttgctggtatggcctgtgttgttgttcactgtgaggtcaccgtgcgtgggttagacagtgtcccccacccccgccaccacaaggcactcatgacccggcctgtttgtgcaagaacagatgatgcaaaccagcatggcacccagcggagctgctgccagcttcttggggacgctgtgcagcacatgggcctgccaccagctgtcaggacccgtccaactgttttggaagtgcctcgagcatctgccactgtctgcctcatggtgcttctgcccaggcagaggtcagggctgtggcgggggtgctggccccagctggctctgcctgcgtccctctgagccccctcaagccctcgcctcacgaaacaagcttatcttcagaagagcattcctgtcctgtgcaggggctcagcttctgccctgcttcaggccttcctcatttacctgccctccctaggagtcaccagcctccttgcctcctcattccagtgcatacccctggcttcccgaagagccaccgaagccaaatctcacatcctccaaggggaatgggccactgaaatgaaaatgattctccacctagaggcaccagaaaccaagtcatgtttctgggcctccacctctggggcctgagatgtgaacacacgggtgggagtgtaggtgcctggctgtgtcccttcatatcccagatgctcaatgcatgtggctatgtgcatgccgtcctctgctcaaaaactctcagaaagtgttccaacttcttgcttggcctggaaggatgtgcctctccctctggcctccccttctagcctcacccccatttttcacatgcagaaccctttgccagagccacatttcactttccatcatcaccccaggtcccttgacttccctgcctttgcccaagctgctcctccacctggaggtctctgtttccaccctgaggcatcccacccatcctttcaaaggccatggcctccttaaatgtgtcatgcatatgcgtgtgcacacacatgcatggtattcttgcatccctgcattccacagctttgttggatctcacataaataacattcctccatttcctctcctaatccccaaacagttgaaagcagagcacatggcaccttggctgctatggtctcccacaataccgtgcatgcctaggcactctgcaacagctacattaaattaactcccactcatgaaaacctctatctgtgcgcctggcctgaaagcatttctgaaagtcacttgtctgacacagataccgcccaagacctacagacccaacaatagcatcattgataagtccttttgcatttccatttttagaagtgcacagcagagtgatattctgagccagagtcctccagaagaatgggtaagtacatgcaaattgctgagtctctgttcattgcatccaaaacgaaagtcaccagcgtgctgtataactcaagaaaatacgagagagagggaaaagcaacatcacagtttgactacaagcggtttccagtaagtactgcagccgaaaatccccaccagccaaagaatcttttgcaagatctgtataagaaagttgaaagcatgcattacctgttaggctctgaaacaagggtacaattcaggggtaatacaaaggattttcttgaaagtgtcttaattcagaacatgctccccgagttttccttctgccctggccccaagcttctggctgctctgccaggcagttctgaaacgctgtcctttgaagcagggagtttattttggggccaccgcatgaccaacgttgacaagccaaactataagatgttatacatctcagatttcctgtttggaggttgcactgaggaagctgcaatcctgccttccgttcctccgggtgcatcgaatacagactctcacttcagagaggatcccggagctttggccctcacgtgatgtcatcatttgtgatccttgacatggaggccatatatgggtatgtttctggaactacccaggggagagccagacaggagagagatgcagtgggtcagagacagaggcagggaacgaggacgaggagacgcatagttgggagacaaagagtgaggagcaagggaggaggaagaaaggggaagaggagaagtaaaggcaacaaaggagggaaggcaagacagcaggaaggaagaggatggagtgaaagagaagggaagaaggggagagaggagatgaaggagttgacgtaaaagggctttggagaaatcaaggtttggtgctgagcttgtggcagcatttggggatagcaggtgtctggctgctggatactgtggggtggggctggggatacaaagggccagggtacaaatgagccaacaaacaaacacagaggcatgcgggcaagccctgggcagagatatacaacagaagagagcccttcctcctggtctagggaagaacgtcccatttctggaataggtcaaatgtcaaagacaacacatacacagccacatgcactgagcatccgggatgtgacaggacatggccaggcacctactctcccacccgtgtgttcacatctcatgcctcagagttaggggtccagaaacatgacttggtctgttcctctaaggggagaatcatttttgtttcagtggcccattccccttggaggatgtggatttatgatggccacagcatgatttctcactgattcaaactcaggaaacctcaggatgcctttacacgcacttcgaatattccacaaggaaatacatctcagtatacaaggtgccacggggttgagtcaaggttctggaggtctgactggtgctaaagatgggaaggacaccagtggtccccaggcagtcccccagcttccctggtacctgccaaattgctcatcaccccagctgggtcagtcttcccaggccactgtggctgggtggccctcaaagttagctcaagttcagccccttccagacccatgtgctatggagggagtgtaggagaagggcagagaaggggctgtcagattctttttactttttggagactctgctacccagtaggatgttccccgagagacgtctctgtgggacggctccccgaggccgggctgctttcctgggctccttgctggaggcaaaacacaggttcctctacttcctgcccaccacctgccccttcccaatctgacctggaaggtgggctgtggccaggccaggcccctcctaggttgccctctgcctcatgggcatgcacacatgcacacacacacacacacatacacaccccaaactccatccaagatgtgtctattccttccctccccttgaatatggggtggcctagtgatggacttaacaatagaatgcagtggaaatgatgtcctgagacttccaaggctaggtcatgagatgctttgtagctgccatgttgtgaggaagtccaagcaagcaacacccagggcccccagagcatctagcaccaggcagaggggtgaagacaccctctcggaggtggatccttcacctgcagctgccacagctaatgccacgtggagcagagacaaaccacccacaacttcctgacccataaaccacaagctatgataaaaggattgtttcgtgccactggggattgaggtagtttgatatgtagtaataatcaacccagacactcaccaaatattcactgcggtctcagctgcatgctcctcagctctcgtgtgctacccgtgaacttttttctgactttccacttgtctttgtttccatttaaaagaagaaaaacagattcaaactaaatttttttttacctcactctttacaaaagaatgtagtcccaagtcatttcccagttcttgggtttatcagaccagaagctccttttggctgagattctgtctta

SEQ ID NO: 1241130 - DNA, 4001 bp, Homo sapiens
ctgatcagataagtcctgaggtccccatcagcaccgtcactgccaccttgacgagttccacttaggaacagccagagcagcccctgtcagcatcaggaaaagcccagtgggggtatgtgccccccttttcctggagtgtctccaaagggaccccagctgaagtggaagggaggagggctggcttttctcgtggccttggcgagcagggcgtggtgcagtgtcgtgagaacactttcaggacctgccgcccagcttgggtctctccagctgtgatgcaaggaccctggagccctcagcccacatattcacagcttctccatgacctcaggcaaagtccccgccctatgagtgggggagggttctgggggtgtcaggccatcagagtagtaagctggacgggaccctagaggtcacgttgccctctccagccgtgtcctgcagagaagggagactcagaggggacagcgactctcaggcagtcatgcaggaggtggcagtagctgagaccagctctgggtctcccttttccagattgtcaaccactccacacacccaccacaccaaggaagtggagggcgacaggatttgaaaaaggctgggaaggagaaagaaaatattggccaattgcctcctcccttctctacaacgtaactgagtgaggaaatgcagttccagtgatagggtccctcttttgcttttggctgcttccggggtcactattccaggggtacagagaggggagggaggcagaattattttctaaggagcgcattagccctgccccctggtgccaggcaaacagagcccctgcagcttagattatttctggattttagcacctggcacttcacaaataagggcaaataaacaaaacaaaggctgtgggtgtgggcattttggatgtacccacagcgatggcatgggggaaagtgagactgggacaaacagaagggtgcagccaactcatcaagttcaactccaagctctcctgggcctctggggttctaaggccatctccccaatttccctcgtgctgggtccccagtttcagagccccatggggctcctccagcactcaggtcccatgctgggggcatctgagggggggatcaccagcatgcctggctggaagttccttgaggactgaagtctgtggccaccaagcccatctcagcaggagcagtggggccccaggggggcacccctagaaggagcgtgcctggcaggtgcctccatagtgccctctgccctcctgggggctgtgggcctgcttcccaccctccctgccatcccagttagcggagtgaacttggatggtcctggggccagacaggagtcacttacgccagctgggaggtcttgaacaagctgctgctgtatttctgcatgaccccttggaacaagcccattggggcccgggccggcgaactctcaggaggtgcagtggacctggagggtgcagagcaggagtgaaagagggaaaagtactctgcataggagaagcgggtcatggcttcaggcaggaatgaggatggagggagagccagggagagactgactgacagacacagggctctgaaccaaagcagatggccgggtcctctgtgtgctggacacagctgctgtgtctccggattatttttggcccttggaggaagccctgggagatttaaatgaccatataagacaacaatgaggttaacctcaccccaccccccggtccccctccccagccaaccacgaaagaggcagataggaagcaaggtgacattcttcacccaggaggatgtgagccgtggtcggcaggtcccaggatgaaaggggctcaggctcactgctggccaggcagatccctgcggggctggatgagagattcatggcaaagcagaggataggggagcaaagctgagaagccaagctgtacctgtgccccccacgcccacctgccagctcattaggggatcttgtcccaggggtaggagcagacactatagtaacctctatagtgttattataggatgcatgaggaagggcgtcggaaccagggctgcagtcagacagacacaggttcacatctgggctctggcactccttggctgtgtgacgtgagacaggttgaccttttctgtgccttagtccccgctcctgcaaggtggcatgaaaacagcctgtgctcgagggccggtgaggcctgagtaagtgaatggtgtgaggagcttagtggagtgtgaggcacagagggtgttccacatgtactcactcttcattttatcatcattttgcctctctaggcctcagttttcccgacccaccaggctcctgtgagggtggaagagccggaaggaggtgggatggccgctccacaaatctgagttggcctggggttgtcgtgagaacagggtatatggcccctactgacaccacccccagtaggtcaggcctggcactctcgacaccccagtggcccgggcctttcaccacactcttctgggggggattggggaggactctgctaccagtgactcacaccctgtggggcatggggtaattatgaccctgagaagcacccacactctttctggctaggccagagcctacagattctgtgggtacaccccagcaaggccagagcctggtagagaggagcaagggtggcaggaggaggggaacctgctcacccctctgcttcatgctctcagggctgcctgcaggcctggctgccttcctcatcctcgccgctgtcacgccctcccacctgccttctcccatcccctgcttctggccttctactgacccgcactggggtgggcaggacaccgcctgcatgtgtcctcatttatccacatccatcaaccgtagatgggggtgccttttacagatgaggacagggaggctgtgagaggggacttaactgtgcagggtcaccttcagcatgacagcgagtggagcagaggttcagactaccactgtccgcccagctcctgatgccaccctgtcctctgaaggcctggcctcttcctgccttttcgtcctctctccagctctccgacctccacactgactgtccctgtgactttggacaagccccatccccgctctgtgcctcagtttccttatttgcaaaatggagaagtgggaccaggaccagactggggatgtccacactgtttctgtagctgtggagagattcagtgtccaacagatcccagagccaaggcccctcctcagccctgacagctgctgggttcagtgtcctttgcattagtgcctggtcctgagaaggagagacagccggcaggtggaggcagcctggggccaggctcacctcagctgtctccagccctgtcgtcttgatgaggccctgggcttccacctcccaggatccttgggtcacggccaccctcatacttagtgcatgtgtggcctccagttacctgccattgttagaatgtttttagcaggataataaagcactgggaaaaagcccactgcaccatctaaacgaggacctgtctctgcatagtaatggcagcagcaatggtggccgggatgttgaggttgatggaggtggagggagctggtgatgatgacagtttctaacaactgtgcagggcaaatgttcacaaagtcatgccgagcctctcctcatttccattctcctgccaccattgatggaagcagcgggtgtgctgttcccattttgcagatgaggaaacagacagactgagttccattcaacaaagagttcccagctctggctcagtcccaggcccactctgggtggtgatgcagctcattaaaatttatctttttgtggatcctgaggatatttggaagtcagcagagagggagacaaggccacacacagccacagagtcacagaggacgggctgagatcggggcagaagggctcattctgggagcactgagatccgagtgcatccactggctttggggctggcaactgggcaaggcgaccgctcagagttactgagtcgtga

SEQ ID NO: 1241131 - DNA, 4001 bp, Homo sapiens
tccaagcctgaaggggtagcgtcaggggcgtcggacgaggccccacacagagtccccaggtcctgtccccactcgggggcagctctggcaggctccggccctgctgggctccccactcctctttcctgcaccttgcagggctgctcctggcctggccctctcccatctttgtcctgcaggccttgtgtcctcagagaagccctccctgggctgcctccaaactccacaccatccacacacccagctcagaccctgttatcagcccacagcccctacagggccctggcagatcctgcccctgggactagctccttaatgcatgccatcccttcaatggcagcctctctctctagcttgtgagggccaagcacaggaattgtgtcactctgtgtcagtggagtgtcacacaggggcgtttgccaagctgtgaatgactttgttccattcacaggcagaaggagaagtgcagaggaggctcccggcagcctggacagccacgttcttggggacctgagtccctcgtggacgagccccactaggctttgtctcctgggctgggcgcagagtgggcctccagaggggtctgcaccggccacagtgtggtgggtggaatctgagagcaccgacagagtgctggtggcttctgagcagccacttcagcagaaaggggtggccaggaggggcagctgccagggaacaggccgtgagagggggtggggataggaggggcggggaagtggttggcagatgggcaagggacaagagaatgttctggtcatgccaggggaggccctgggctctggcagagccggagagggtcccagccgtcccaggagagagagctgcgctggacacaagcaggagtgtggggaggggccagggcagcagggagtgggaggaggaggagtggaaagggctcctgagggaaaggcaggcagtggcccatggagggtcgcaaacaggttcaagacggggcgagggggctgtcctggccccaagggaggccccacatcacagcagagcccatctgggggccccaggcagtgtcctgccctcctggggaacacccaggcattctggaggctccagtgcaaccgtcctctccccatcccggtggcctcaggctccccaagctaccatccttcctgtgcccagcccaggctggcagcactgtgctggagtaccacagagctcggtgcctgtcccaggccctgaccccacccaggcagaactcagtccagacgcaatcgctggtctctggtcaaccaggtccacacaggggcagaggaagcagggctctgaggccacctcgggtgtgaacacgtgcgtccccgcagatgccaggtagccccagtatcgtgccaaccactgctgcctgaccaggaccccaggggacggggacaccctcctgggtgtcgcagttgaggggtcctcgcagcctcctaagccttctccagggcagcctcctaagccttctgtgtccagagcaggagcggcaggccaatgccctggggccctcccgccccatattccaggacttcaggacgctggccctcaggggcgcagcggcagcacagggggcctggccccagggtcgcagggcgctcccgggagcaccgcgacggcgagaacccaccgcaatctcctctgtccaggtcggggctccatgcgtggggacgccggtggccggaaccggaggagagcgacctcagcccgcaccccccatccaggcgcggatttgactccccaacgacccccgtgggtgcaggagggtccgaggctcccggtcgcggccaggtccagaggcctaccccgcccagggtctcggactcaccgccgagctcactccgcatgccaatggtgccgccggtgtagacggccagcagcctccgctcgggccccaccgcgcgcgccatgccggaccggggaccacgggagtggacgggggtgtgcagcggggacgcagggcctgcgggactcagggactgcgcggaggaggcccggggcgccgggggcagcctgggagggcggggccggcgggggcacccacggggagggggcgggagtggagtctgcccgggagggtgggaggccccgcggaggcgggcgggggcaggacctgggggcggggtgggtcccggggactgtccagggtcggagagagaggcggggcctggcggggtgggggcggggcctggcggggtgcggggcggggcctggcggggtgcggggcggggcctggcggggtgcggggcggggcctggcggggtgcggggcggggcgcggccttggaaacgtgtaggaagaggtgaggtctgtgagggcggcagggggagctcctgcctgggcaggagattggctggggcctgcttggggctggggagcgcctgtccagggactagggggcagccagaaaggcagcgacaggggtggggcgggtcctgagccatcctgcggccattggccctccgtggcggccctgggtgtttgagtagctgtgacatgtggtgcctggcagaccgtagtgcccgaggccctccacgacctgagcacagagggggctccgtgtcctgtcaagcagcctccacagccccggggctccaaggccggcattgctgcccaggccctgctgtccctcctttggatggccagaggcaggcagagctggaccagcccctccacatgtgcccattcacacaccatccaagagaagagcccgaggggcccccaagggctggagcgggacagagcaggagtatggccttcttggacaaacaccgccattttaggttccctttgattaaaaagctgcctaaatccagcccaaaacacatcagcccaatagctaatgtcagcacgaccgtaaaccacaaataacatctccaatcagaaacatgccaacctcgagataacctcccctccgaccagagacattccaagcccgcaataaactttccctcacatagaaacattccgagcctgcgataagctccccacttcctaaacccttaaagatccttagtctgtaggagagatggctcctgaccaaaatcggccagaagtccctttcaggtttattctccaaaataaacctgcctttgttgagccgcttttcatgtttctttcctctttctttaactcctacagagcccaccctccttcactcccatgagagcccaggagggcagggcactggcgggtgcagggtcccaggagggtcccaagctgcaggcttgctcccaggtggacagaagatccgcggcctcctcgtctcctggcaccttgactgcctggggcactgatgcactttggtgggaaactgtgtgttgcccccagaaggcaccagcatttgacactgattccataataaaaattattattattctgttgcctggagggcagtagcaagatcttggctcactgcaacctgtgcctcccaggttcaagcaattgtcttgtctcagccccctccccgaatagctgggattgcaggtgcacaccacaccaggctaatttttttttctttttttttttttgtatttttagtagagacggggtttcaccatgttggccaggctggtcttgaactcctgacctcaggtactccacccacctcagcctccctaagtgttgggattacaggtgtgagccgccatgcccagccccatataattattttgataacaacagtgcaatagtgcaaaagtaatcttgtctgcagagaagcaaaggcattctgcccagcaaaggtctgtgttagttttctgggactgcagtaacagaacgagtgatttacagtgcaaggaggtctacctctcacagttcttgggggtggaagtctaaggtcagggtgtcacaggttggtgtctcctgggcaagcagatggtgccttcttgctgtgcctcacagggtctttcctctgagcagtcacgcatccctgatgtatctccagatgtccagactttctctttttatagacataccagtcagattgaatttgg

SEQ ID NO: 1241132 - DNA, 4001 bp, Homo sapiens
gaaattgtacaaaaggggagcaaggacggaagcagagacataagaggaaataagtttatgtctctggtagattggaccaggtgatggtgaaagggtaagatttaagataagttttgaagagtagatgggatttgttgtaagataagttttgaagagtagatgggatttgttgatgggactaaacagagttgggttaagagaggagtcaaggagaactgaaaggttttttagcctgaaccaaaggaacaatgagattgacatttactgggttgggatgagcatgggaaaacagatttatgatggaaaacaaggagttcagtttgccatattaaaatgaagatatctattacaaatctaaaaatattgatgttgaataagcagctgttttctggactttagagaagactaggttggagatacaagtctggcagtcttaagcatatagatggtatttaaattatgtgaatagacatagtaaaacgtgtagacagacaagaaggtccagaaccaaatcctcgattcactccatcagttagacatttccatctcataccccgtattcttataactggtttaatttttaaagctatcacttactacataagcagtttctaaagtcatcaagagcaccaataagacacagcaacaaaactaaaaaagagtttgtcattcaaacctcctcaaaagagaaaggaaagaactccatccacgatcacagaaatactaagaactcaaaacattcccaaatatagaggatataaagtctagtggttaagtgcgggtacataggtccaagctgtctgaattttaattcttgtaccaacacttaactatttgtgtgacctggggcaaagcacttactgtgcagcttcctaataagttggggataagtcattcggttgttgcgaatgaattaatacctgaatttttgtgctcagaatgctagctatcttactatcattgactatcattgacactaaattgttgaaacataagttgagagtgggagatcctgcagctaatcacactaatttttcaattttcttaaccaagaacttgtagctgtttagatttcgaaatgaaaccaaaacattttcctaaaggcaattctcttaactaaaagcatgcagctcccaatctgaattttaaaacaaggccaaaacacgttcccaaattcctaagaatctaaaataatctttagaggcagggaggggaaaggggcgttaacagcaagcctcaattcacacattagagtaagcatgtctgataacaaagtccatctgtgacagactaccaggcccaaatccctctaaagcagttatttgattctcttctactctctcctctagagaatgagtataaatatgctttcgaaaatagaaagccaagcttttgaatgggagtacatacagcaaagagctgggaatctaacttaatggcagcaacgggaaaacttctccagagagtcaccacttattccttttttccccagtgaccaagagcaccgtggggtcaaactcctcttgggtgggtgatggggaaacggcgaccttccctcatctggcccctacgctgtcctctggtagcaaagctccggtgcagagcagctagctacactccctctctctcgctcctctcgctggtatctggtgcccggacggggagccccaggttccagccttcggctgcctggctggaggacacacagcagaagaaacaatagggccgtggcggccgccgtacctctcccggtcgcggccgtcgaagtagacgaaatcgccgctctgaacgcatttggcgcaggtcagccgccggcgggtagtgttgcacagcgggcagcgctccacagccacgtacagcccctccgcatcgtccacggagtccaccaggtcccgggcgagcggccggggcccgcagccaggagcctccagcgcccgggctcccttcccactgggagacgccatgatggcctgagaggagagccagtcacgtgggattttgttttcaaccgggtgcattctgggccaggaggaggggcctggggaaggggggctgggatgccggcgagcccccggacccctccgccgccgcgtgttcctgtcccgggcactgttgtttttccggtctgctgaggggcaacaggtcccgaagcagggggagagttatattagaggggctagtcggccaaacaaaatgtcatctgctggctcaggccaagactacgagttaaagcctcaaacttgtgcagaaaattgtaataccataccctaaggattctgggaaaacggaatgggagcggaataagggaatttaacttgctgtggatgctttaaaatctggctaaactacagcaaacaaagtagggtgaaggggctgggtcttggaactaggttgaattttggctcactcacctgcttaatagctgtgtgacttggggcaagttccttaatctctctgcgcctgttctctcgtgttaaatggatagaattatagtacccatctaatgccgtgaggattaatatggttaatagtattatactttaccaatagtgaaaacaaccaaagtgaacgtgcaaaatcagaattgtatccttctgaaaagttaatcacgtggctaacgtaccttccctaccctgggccatgctctaagagaatttgaactaggtagatggttaggacttcccttcaagtttcttttggtggataggggatatataaggtgatgtgttgggaggatcatatcagagtaattagtgtttgaatatgcctctaaactacagagaaaagtgagtttataggtgagattaaatagaccagtgattctcaaggatgattttactaggctatctactgataaactgccctgaattctctctctagccaggattcctttctcaagttccatacccaaagatccagaactacttactaggtatcaggtgacattccaggacaccacaaactcaaagtgttggaaactgacttctgcctccctacaaacctgttttcttactttggtaaaggacgtaatcactgatgatttacagccaagagccatgattcatattagcccgtccctccctgttaatctccacatcaccatcgaaaactggtgattctacaagctaattaggtcttgaatctgagccctttgctcctccgtcttcttaatcttacccagtctttttaaatacaaatcacgtaggattacaaaaacaagcaaaagcaaaaattctctatattcagaatacagtttacactaaacttgaatggttcctgaaagtttaagatttatttttaagtgagaagtctttctctctgatcatttcaaacaaaaggattattttttaaggtctcgggcttatgtttcatttgtattcagacaggatccttcacagtgcttaatacctaatgatcaggatcaactgttcaatattttaaaaggcaaaaaatacacattaattcctatcgtgctagatgatatcacagatagtatctagcttatgcagttatttgaaactcctatatgttgctatatattttcagagaacgcatattaatgtattacttaacagcagagcactgaggtttttggatacaaaatgtagtttaaatatttctttaaggggagggggcggcgccacacttctcaatgaagagaaacatttgtacagttcagaattttttttgacacctattatgccatgaactcatagggaataggttccagcagcccaggctccctccattggttctaagtgcttgtctgggtggagcaggctggcgcttcagttgaactcagacacctctccctttgacgtctttttctgattatttaccttcacgcgtttcaggaaacttacttggctcttagagtgccaaggcccaggcagatggatcaactgaggtcaggagttcaagaccagcctggctcagtaagcacattcattctcttggcaaaaatcttgcccttgtttacaatgccaacagcatgctgggta

SEQ ID NO: 1241133 - DNA, 4001 bp, Homo sapiens
tacttgctagatgtgtgatggggcaaactgcttaactccatctgtaaaatggaaatattaatgcccaccttatagggttaaagtcattaaaggataatgcatacaaagcccttccacccacaaaaggcattaataaatcctgaaccctcttttttcaagataacctattcataactgtatcaaaagtatagaatcatgggttgttgaattcaaaaatatccttcagaatccctatcttttggaagaattacaggaatacaataccataagacggacgacacagagatgaagtgtgtgctccattagtgtttactgaactcaggtgaattgctaagtccattatcactcggctaattgtggcggtctggagagtctctccaggggtaggactctcacctcctggtgagcgactgggtcttactgctctcaaaccagggctctttccactatcttgtgtcctctccctagtttatgtcaggtacatactgataaaattatatactgatttatagtctctagcacaaattcgcttaagggtcataataaggtatttccataatttaagattttctgtggctaaggaagtaagggttgggcaaagggtagaagtcactctattcctgtcaaacccaaaagtgaatatactttaagtaaaatgctatgcattgaacacacaaatgcaggtacgactgcatgtggtgagtcgaaattcagatgaagcacctgtatagcaatgagtgaattcacagcctctagatgacaagtagaaggcaggttttaaaatgtctgaaaattgcaacttcagcgcttttgcaacacctgcttttacgatctgtcacgtggagcaaagaggcataactcaacagcactactagggccagacgaccattcacaggctggatacacaaacctatcttgtaaacatataatcaagcaaaagcaggcaaaccggcacaagaggccttcacctaactttcttccagatggcaaacgctgcacgatgacaaacaaggcaaacatggtgcgcaagcagccaacccaaaacaaataactagggattctgacatccaaaggtcctcttcatccttaatccttccagaatgtcatcccacaaggcagggtttgtttgccacaaaaccctgcggcccctcacatcccgagggacagttctggtcacctcctcccacggacctattgagcctgcttcacagacccccgaagcactgactcaattattcccacagtgtagattccattacatctgttaaagtttccggaacacgtgatttaggagagcaaacttgttagaaacagattaaacaacactctaacacatttctctgagccgtgtcacactcgggtccaaacaattcccaaggagggactgactgtcaccaatcttggatggcactggttcaaagcgccctaaagaggggagcgagccccgcccggctcgccgccggcagctcttacccatttgtccaaggggacctgggcgagggacccggtgccttggtacaggtccaggctgagctgctccaggctcagcttctcctgcagaaagtggcccaggtacctctgcaggaggtaccggcaggccctcttcttgatggactccgaaaacggccaaggcatagtgactgctggcagctgggctgactgcggctgcgggttgcgacggctccggcctcggggtagcgactccggctccaggccgcggcggggcctaagcctggggcggcccctccatccctatttggtgccgggagtccctcagggagaccccatcgccggcgccgcaccgctcgcgctgggcctggcggaggcaagacgcagaggggtcctcctggccccaggccaggggacttccgaggagggtcccaaccggctcggagagagtgcaagagagcgcgagaggaggcggcaggggctgaggcagccaccgccactgccgccgcgcgacgaatttgttgtcatccgcgaggcgcgttcccggctgtagggacgctcctggcgcgttcacgagacccagactcccggcgcgccgccgggcgctggcggaagtgacgccacactggggccgcggaaggcgggcagaagggcgggggctggagcagttccggctccgagggggcggggcggaagaaggcggggagggagggggcggcaccgccggtcggctccagtcgcctccggaggaaggaagaagaggacgccgggcgcgcaggtgagcggcagccggggtggctgcgggcgaggggcggcccccgagaagggctaggggctcggggcgccggcgggccgtcaggccttccggatggggacgcgacgccatgcagctggctgggccgagaggggcggcaggctgcaggggccccgcgcccgtgttaagaggggtctgggggccggtctggccggcctggctctcccggctcccctcagacctcggcgccccggaaacgcacacttggggctccgccgtctccgctgggaggactggagcccttctcgagcatccccgcccgcacccgagcattgaccggtgcccattgtcagcaagttcttcggcccccgcctcattcaggtattgtttctgaggcagcttcttcgttgccgtttgcctggcggtttgcagagcgcttctcgcatacgctcgcttaatcctgggtgtgtcatagcaacgatcaggaaacttgggttttcgaagcatctgtgggcaaaactgcattccttgagaaatgctaaaggctcctgaccccgccggaacctgggtgaagaacttgggctgttctggcagtctgcgcaatcgtatttctgccttttgggaggtaactcctgcagaggcggagccggctgttaagttaagtcaacctcgaaaggcctgggtgcgggtgttctatggcccagaagccagatgtccttcgttagaatcccggcactgacacctattagccgcccagccactttgagcggccactgccctccccgagcccacgttgcctcctttgccgagtgtgagcggattaaaatcttatgtgcatggatttgttgggaagattaaatgatatgagtagggcacgaacctgaacagagtcctgaaacatacagctgtttaatcacagtgaattaagacgaccagtttaaggagtgaaatgtttactgtctcggcaactttcatgaatgccttggaaatacagcccaaaatattggtagatggagaaacatctggttcccctttccacaaccaccttttcgttttagaaccagggtactttgtatgcagttgcttggattgttgatttccctcattctttgtagactcatctcaagtattctcagtaacttagattcccttgctcttcattcagaaatatttgttaaggtccattaaatgaaagtcaccacagttgatcatgtgaacagtgtcaagaatcaggccgaaccttcaaggagtttatgttctaaaacggaagcatggtggtacctgcttgtggaggctgaggcggaaggatcgcttgagcccaggactttgaggctgcataattgcattgacgctatccatagagtgcctgcaatttcaaatatcagaaaggatcgtacgagctatgatcatgccactgcactccagcctgaaccacagagcaagaccctttctctcaataaagtggaagtttgttcatttattcagtaaatatttattgattgccttctgtgtgccaagcactgttctaggtactgggattacagcagtgaacagataaatctcttccttcctggaacttacattttattgaagggaggagacatacaataaatgagtgaataatatgctttgtggtgataagggctgttggaaaaacgaaagcaatgtaaagggagtggagatggggaagagagaagggacttgccatttttatatgagatggtaagagaaattctcttgtttaataagattacattttagcagaaacttggagaaagctgggaagtgaggcacatgt

SEQ ID NO: 1241134 - DNA, 4001 bp, Homo sapiens
gcatgacaattaggttggaatgaaggacctatcaagccatatttattcttattccataccttgtcatatgaaactgggtggtttgtaagaaactctctggtcagttaccatgacataactaacatattattacataaacttcaaccttgaaattgtttgcttaattgtctaggatgtaaaattaaatttactcagtgtacatttaagtaaattgaatttgcatttctttacaaagcaacccacttcactgatcttgttaaaattaactcaaccagtattttaaaaatccttaagattcttttggagttagtataaaacaaatgttttcctctttgcatgaattgcagtacaagtaaaataatgattatagcagacacatagagtctcgactttttaaccaccacatagagtcttgactttttccatgctatctgcctctaggttgatggtcaaagcatatggatctgccattactggcaacataaaatatccgcactccagggtcttgttgaagcctatgacctcaaacatttcactgcctaattcattttaaatgctgtatttcaagaataacatgcttaaaggattgtcaggatatttgtcctcgtctcaaactgggcattcagtttctactttatgaagaaggctcattaaataaaatttttggaagtctttgcattaggaaaatatatgcctcttcttgatcaattggttactcttgatctcaaaaacactataaaatcctctggttggccgatttgtcacactgttctggtttcgtattttccttctctttaacgtcatactagtttgcccacttatttttatcttgttttatagtaagtgttttctgtgtgctgcctgaaattccctggagtaacgcaagtgtaaacatgtaagaataaatatatttcagactagataaaggatcagtgcttatatggccagaggaaaaaaatctcaaatgaatctatgacagtaaacaagtgctaagataccaatagaacatttgaagagattttgagtcatcgaagccaaaagtatgtgcccaccaaaacaagtgccaagaatctttgaaagaaggaactgttcttcaacaattttttcaatgcagcaaacacataggctttgtccatggagcatgtaagtctgggcttacttatgttccccaaataagtgccctttgtgtgtggagcacaagaaaatacatatatgccctgtcctgttaaggtgcgaatttaatttctacattatacaattatcaacaataaggagtattgtcaattactccttattatacattatacaattatcaacaataaggagtattttaattctcaagagcagaattaaaaattggatgttcaaagccacaagccaacatctccaacttgctcttttatgatgtttcagtcactaaatgcagtggctgagtgttatctggcttttctgttcaaattctctatgaggctctagaaataacttagccagtataatgtaacactggcaacttaatttctaccttcagagcaagactggaactgaaactgcaaaacagcttgtgaaatatcagccaaattacttccccgaactcctgttccatatatgctgtgcattgttaagtattttaagacctcttatattcgataaccccccttactatcctgtaaaacgctttataaacactttcctgggtgtcagatgcaaaatcttaccctcttcaagctgcagataaggacaccgagatgttgccaaatatgctgttttgtcccagagcacatactgaggaagtggtagaaccagaaccagtctgtgacccctttgttttacttttgcggaactcctggtctcattaaaggtgcaataccagcgatgagacactgcgtgtgcccaacagggacaaaggtcattgagcagtcctaggaattcagactttcagaaatgtctcagaagaactaagtagaaggcaggttgtgcaggtgtgcagtgcagcctcaaactggtaccaccgggatcggtttgcaaaacaggaaggtgcagtagggtgtgccgggacttagttaacctggcactcccccacctccttccccggcgccccgctgccaggttacttctggcccggtgcccttaacgtaccttttccgtgtttaacttggagggctacgttcccatcgcccttcttcctctacccgtcaccctacaggcctacctgacaaatgtggggacggtttagccaaggcccgttggcccacgaatgcccaggcgtgtgccttatttctgagagtgggagggagacagcccaggccctgcaaggacgcgcccggctaggggggcgcggtggcgcggtcgggagggtgttgtgttctcagcaggcctcagggcggcactctggttctgcggccggagtgctcgggcgggccgctgggcgccgacccatgctggctgggaacgtgtctcccggtgacgcagccccgggtggggaacgtggtgcggcggcggcggcggcggcgactgtacgcgcctccgccgcccccgagaggacgcgccgtgcagcggctgagtggcggcggcggcgacggcaaacccggagctgccggccggcgcgcgggaggaggacgcgggtgcggtctaggaagtaggtcccgggctccgcgctcaacaaagacggggccgcccccattaggtacggagccggccctgggccccggctggcggggaggcctcgtcgggcagttcgcgggcggccggggagggggaagggccgcagaccgaacggggatacggggcgccgggggcccttccaggcccctttctcttccacggcccctggcgggacggaagggaaggggccgggccgcgagggcgcgggccgctgggggtcgtagcctgcgacgccaaccagcctttgctcgtccctcgtgcagacggagctgcgggcggaggctccatgttgggaagcggcgccgttcgtgcttgttagcgggaatccgggagccgcggggtgagctggcgggggccgggccctaagtgaagatggaggccccgctgcggcctgccgcggacatcctgaggcggaacccgcagcaggactacgaactcgtccagagggtcggcagcggcacctacggggacgtctataaggtaagtgaggctggccgtgcttttttcctgcggtcgactgggtcccgggaatggggccactttcctgcgaagtattggggcgagaggaggatgcttttattgttgcctcttggggagaaagcggccggggtcccttttactcggttctgagcaccctcgactcatggcttgttctaatcgctaccaacaggcagaactaaccacacagttgcaaaccgctgttgcactttttttgtggtttaaaggctttttaatagggcttatttatggtattgaagggaatttgaatctgcttgtggaattacaccgaaggatgctctagtgttagcatggaaaaatgcttcatggaagatagacaggaaagaatattgacattcagacatttgcatttttttaaaaaaatttgtttcaatggatgagtttgactaaaaaagccatatgaaaccctgtctctgagctttaactgtaagcaaactaatattggtgacatttatgcaagcattatcccatataaaaagatgcttttcctggtggaagtttgatcgtttgtttttggttggcgataaaaatgtgatattaacttgctgggttttgttttactttagcggttcctttcagggatttataacatcctataaccaagagtggatatgagccgctgtctttgtattgtgctgttttgtattacttaagacaaacgatgagagtaagttacacctaatttaggattttaaaaaacattgtagagaagcaaacccaattccccaaatccgctgagttcttgaatggttcagaggaaagagattgagattgccttatgctttttgttgtgtgttccaaaaagggagcattagtgcagc

SEQ ID NO: 1241135 - DNA, 4001 bp, Homo sapiens
caataatgatccaaagcttcataaaggagaaaaattttaatcctcagaatacattttcacatgcttctgttaacagggtggagacaacaattcatggagactgagaccaaaagtgacttgaatatacgcaccctaattgtgtgtgttcaataaattcctattctagaggccaagagaacgggtggaaaggggatacactgcaaatgcttacttaaatttcagaagaaggaaataaaacttattgcaatagtcaggtaggtctgttaaaactgaagtttcatgatctcagaaaatggaaccactttctcttaaactcagctaagtcatgacagacctccccgctccaactctccatgcctaccacaaaccttggataatctcccaaatgtaaaccttgtctaccgtatcctgtgaccattagaacaatcagaggcaaggagatacacggtcttttgattaaagtaaactgaaataaccaattaaaatttacatttgtgcctctcgctcaaataaacagttatagaagagctctcactgagatgtggaacagaatcaagcagctctgaacttttcaaataataacaactgttatttccaaataacaatttctaaataacaagctgatgaacaaaatatttatttacccaccaagccacagtagcctgagacattctctggttcagataataaaataaatgccttagagggctttcgttcctaagatgctggtgagtttagcactgtgactgcaagaaatcgggaacctacgacaaaaagacgcccagcctgcccacactaaccgtccagaactaggtctggagcagcaaggcgggcggggccgcgatttcttccgcatcgctgcgcccgttcttctccgcctgcgtgagcaccgcccacccactcgcggtgtgaacatactgggtctcgcctctcctttcccctcccctcggcctggtgctgaatcatgagcccaatgtctccaaaaggtaaaatcaaagaacaaagccacccttggggctggtctgaatggggtaccacgtcggggtggggcagaaggctggaaaccacaactttgctctccttcttccccaattcccccacccaacccccaaattaagaggagtactgcagtgctcaggaattcccaagagggtggcccttctcccagttgctcggtctgctaccgtccgtccgggacccggcgcgctccgcctcattgttccagcgcgccgcccgccgcccgccgccgggagcccgcgccctgcagagccagcgagttggcggctcccggggaggggggttggggcttggcctgctctagatccccgacccctcgcccctctggggccgagtaacaacagccccctgcccacccccatagccttcctcccaaccgatcgctaaggcggaacccacaagtccccggaggcgcctggtgggtgctgtccaaatgctgggaggaggcgggaggggggtggggaagaaggagctggaggcccggcctgcgcgaagctgcagccctcaccccgacagcgcgattcggtgacgcgggtaccgctcggccatggttcctccgcccaaacagggagcggctcggctacggcccgtctcccagccgtggacgcaggcacctagcagcccttggccctccctgtctccacagaagcagaaagtggagggccagaagaccccgtgcaggctgcagaagttctcatttgctactcaccccaactgtttctgtccctgcggttcttggccatggtggtccaggagctggtggcggtgaggcgctgtcactgcgctcgctgccttctccggggccgcaggttgctggcggtgggaggctccgtgcccgcgctgggcgcagttcgctcagactctgaggatgttgctgtggcgctggtgggaaggagtggggaggaaaagggaggagaaagcagatgaaccaagctcagcatcacaagcccgagttcacacagataccagcgtcacaccctccctacctcagtccacccccagaccgtgaagacagtgatagaccacgtaccgcaacattttcaacggaaaacacaaacaaataaacagcacccccctcgaacacactctcaaagaatttaacagcgttatcagaaatacacaaaccgatatactgcatgattctggatgttcaaatacctgtttcaagcacggttatacattagtacaaacaagctggcaacatttatatagccaaagtagctaaaataatgtgcatttatctacgaggcacccatttttttttccattttaaaagcaaggtcatgttagtaaagagggtatcatgcatttttgtatatgtatactgagtagtttgtcttaaaattagaatagcaaaatttatatcaagaagatcaagataaatgaaagctgtagattcattacgatctgtaactcaatatccactgggtaaaatttcccactagatttgcaaagataaggtccagacctatagtccaatagcaattatttgagctgaaatcatactacatagtctgggtatgggtgggccctggcagccataaaggttgcagacaattttgaaaggaaaagaaaaaaaataaaaatactttcaatctttcccttttcactgctttctctctgctacaaacttagttgttttcagtaacctggaaacactgtccctttatactacctcaacctcaagataccatcatgccgtcccttacagtttccttctgccatttggttgttactcacactctgtactgatcggttcttaggagatcactgccagcctcttaattaccagatccatgatctctgctaattcctcatggtaagcaactcctcacgctacactctctcaatgtaatttactatgatggcttcagacaggacctccatgctgatgattcccaaatctatacttgtagtcttctgccctctagaagagaggacattataccagaggtgtgtttataactgcctaaggttatcctcacgttgttttcctactgacatttgaacatcaacatatctgaaaacaaactcccccaccactgccaaatcttatgcattatatttcagttactggttctagtgactgcagagtcgtgaacactgtaaccaagtttacaacatggttttaaagaagtctgtgctcaacagagttgaaatgacattaatgaaacaacataggaagacagacattatctcatccttatacctataaaccaagttcatagaacaaaagagaagtgtggtctgcttttcttcttatattcctttactatcattctcagcttacattccagcctgaaaatccctttcatatgaatcccatttttaagagtacaatagattacacacaaaaaagaaaaaatttatataattcaacacctatgcccaattgaaaaagaaattaattttttaaaaacctgttgtgtttataattagtaagtaatctgcaggtgaatactttgagactgtgtgaatcacaaaaaaatgcttaaataaatagctctctgtatgtgactttttgtactattggccaataacttttcatccactgattttagcatccattgatccttgcctgaatcaatttcatattagtgattttttaaatggaggctttaaaatcattatctgttgtttgtttgttttccagacacagtctccctctgttgcccaggccggagtgcagtggcgtgatctcagctcactacaacctccacctcccaggttcaagcgattctcatgcctcagcctctcaagtagctgggattactggcggtcgccagcacgcctggctgtttttgtatgtagagacggggtttctccatgttgcccaggctggtctcaaactcatgagctcaagcgatctgcccacctcagcctcttgatgtcatgtcttttaaattaagtagctggcattccctctcccacttttctatgttgagtccctctataaattaatggaagcttttaaaaaaattgtg

SEQ ID NO: 1241136 - DNA, 4001 bp, Homo sapiens
tcttacatggatggcagcatgcaaagaaagaacttgtgcagggaaacctcccgtttttaaaaccatcacatcttgtgaggctcattcactatctggagaacagcacaggaaggacctgcctccataattcaatcacctcccacctggttcctcccacaacacatgggaatggtgagttacaattcaagatgagatttgggtggggacacagccaaaccatatcaatactgtagtacatctacattatggaataccactcagtaataaaaaggaaggaactactgatacatgtaacagtttggatatatctcaagggattatgctgaatgaaaaagagtcaataaaagttacatactgtataattacaataattacatttatgtaacattcttgatataacaaaattttagaaacagagaatagattgggtggggctgcaaaggtaagttgtggttataaaagggcaactggagggacccttgtggtgatggacctgggctgtaccttgactgtggtggtggatacaagaatctacacacctgataaccatatagaactaaatatacacagagaacactaatacaaaatgaggaatctgaatgagatcaatggattgtgtgaatgtcaattacctggttgtgatatggtactagttttgcaagatgctaccactgggaagactgggtaaagggtacacagaatctctattcttacaattgcatggaaatccacaattacctcacaaagttgaataaccatctctttttttcatctgtgatggaacaagcaggcaatattctacattgttttaacaaataaagcaaactatgtaccactgttctggtggtaaaaccctttaaccataataaatgtcatcacgtagcaaatgcttcactgtgctaaacacctgctgaccttatctcgtgtaatccgctcaacggccctaagactagggagacactgctatcattcctagttcactgaggagggtctgaggcaaagaggtgaagtgatttcctggagctacctgaccaaagactggaaccaagattcttagaggcacacgaagtccttctggtaataaatctgtataattctatttgttatgttcagctgtcctaaccctaaaaattaaaaactgccatcaagcatacagaatgagtgttagcaacaccggcacagtgacaattttaaagagttagaaggtcctttagagattacacagcccatcgccctcatttttacataaagggaatcaggtgaagtgacctgcacaggtgagtcgctgctcagagaccgcacagcacatttaaaactgtatctcggttcagtactcaagaaaaggacacagacttataaatggtggcaaaaaccgagctgtctggttcttccggtacccagtgccgggtcgagtacagagcaggcgctccatatttacaagacgaatcaatgactgaatgaatagcaccgccaggagccccataaaagaagtccagaagactgcgggctgtcagtcttcgctgtgacaaagagcctccgtgaggagcgaggattagggccggacagggagcgcccttctagtggacgctcgactgggctggggccgggatggagacggtgggtgcccaggccctccgtctaccgcgggccgcgtgcggggccgagcgaggacccggctggagctggagcgggggcggggcgggggcggggccgagggcgagccggaagaaagaagccgcagggcccgcccaaacaagaattttcaccgtaatcccgcccagagtttctcccacggccccatgtccgcatggcggtgaaggtcgaagacgcgcgacccaaagggccaggttttcagtcagcccagcgttggcgacgggcgagggcagaacacaaccaccaccctagtcccgcccggctcggggcctagcttctctactcacagcgtcggagggagggagggagggagcgagccagcgtccccgcgtctgcggcaccctggccggcccttcgccctccgacgcgcgcgcctattggccaccgcagcctctcccacatggggcgaaggcgcgccacttcattggcccccgcgtgaggggcggggctaaagagcgcgggtcctcggccgtggagggtcaagtggcttcttctgagcgctgagggaggggagcgtgcgtaggggatggtgccagcgctgcgttatttggttggtgcctgcggacgggcccgcgggcttttcgccggtggctcccctggggcgtgcgggttcgcgtctgggaggccaagaccgctgtgtggaggtagccgcagcgccagcaccaggtgagtggccgctggtcctccccgccgcctgcgctgctgcccctcgcggaggcacctggtggtggacctgtgcccctgttcgtatttccctgtcccggggtgagagcaggttggggtcctgtggcactccaacctcggatcccaggagctaccaacctgcaggttcattcgttgtatttacgggccggaggaaaggcagtgtatagagtagaggtcgggagtagctctggctttgaacaacccgtccactttctgttgaactctgggctagttacttaacctccttaaaggctcagttgtgaattggaccttagtctctcctgtaggtggtcatttgaaggataaaaggacctagcacacagtataagcaatcaaatatgctctttataagctggagtctttggcgttgcttggaagatctgaatacagtcttaaatcagttcctggcacaccccgcatagtgttgcccccgtcggaggcagctcttatgctaatgaaagcccgcagaattcagtgtcctgtgatttatagtttggacgtcacattcgaaaccattgtctttctctgtcctctgtagaagaaacagtttgtgtgaaggctgtaaggcttggagaggttttggctattttgacgactagaaggtgggccatatgagtgtgactgaagtttagtggaagacatatggtgtggaatgacccagaaggactacatcacagcaaggtttttagtttattttaaccacacgttgacttttattctaagagccacgggaagctatttaaaagggttttaagaagaggctacgctttaggaggccgaggcgggcggatcgcctgaggtcagaagttggagaccagcctaaccaacatggtgaaaccccgtctctactaaaaatacaaaaaaattagcctggcgtggtggtgggcgcctgtaatcccaactactccggagccttaggagaatcgcttgaacctgggaggcggagattgcagtaagctgagatcgcaccattgcactccagcctgggcgacagagcaagactctgtctcgcaaaaaaaaaaaaaaaaaaaaaaagaaaagaaaagaaaaaaagaagaggctaataattaaatgttgatgttctaaaagttgactctggctgctgcgtgttggtggatagggggagtagagtgggataccagtaatagcgattgtgatttgttatggggcatgtggacagttcttttgggaagcttttcttaaggaaagaaaagtagggctagtgaaagttttgtttatacttaaaatgtttttttaaaaaatttttggagtcagggtctcactgtgttgccaaggctggagtgcagtggcacaatcatagctcactgcagcctccaccctcctgggctcaagcgatcctccctcctcagcccccctccccaatgcttcctgtcctccaggagctgggaccacaggcagctaattattttcctatttttttgtagagacgttgcccagggtggtctcgaacccctggcctcaagtgaacctccctcttcagccacccaaagtgctgagattacaggtgtgagccaccgtgcctggcctatacttttattttgaagtaattatagatccattggaaattgcaaaaatagtacaggccaagcgtggtgactcaggcctgtaatcccagtgctttg

SEQ ID NO: 1241137 - DNA, 4001 bp, Homo sapiens
ggaacgagaggggtctatcaattaggtgttgactagaacaaacagtaaattctccccctagctttgagctttttcaggcaggcattttaatggcgggggcggcggggggcggcctggggtcaccctaggggcaggccttacattgctagaagataaactagtgtcgatgtctttcagtgcagaagttttgactgagtcatcacgtcctaggagttctgcagttgtcactacctcgggatagtcctcatctttatttccccacaactagcttgctgcctacttagtgcaaacagctattagaaagtcaacaggtgaaggtaaaaaatttaaaaacttcatttcattaagagctatttagtcaccgggcagaaagaaatctgggcttcaggtttgaatataacttttattttaagcatcctcagattctctcaaaggacagaatgaggaaaaacaacaaaacacccccacagagataggaccacaataaaagggtctaaatgtcagggtcaaaactgattttctgcttcctcactgaaaagaaaaagggaaagccaggcgcggtggctcccatctataatctcagccgccagggaggctgaggccggaggatcacttgagcccaggggtttgaggctgctgtgagctctgatcataccactgcaccccagcctgggagaccctgtctcttattaaaacaaacaaacaacaaactaaataaaaataaacaggatgaggaggagaaagggagcaagttgttaggcacatttgagaaaacgtcaaaattttccttacaaactagccaaacacctacagtgatatgccattttcctgacaaagaattcaggccccaaaagaaaggcagcccacaactgagcgtattcccaagcatgagttctttcaagaaatatttttttgtggaccttctatggattaagacactctttcatcctggagagagcccacagtctagtgggagagaaagacacataaacaaatatctactttacagcgtgatgaccggtattaacacaggtctgaacaaggtgcagcggtgagagagcaaaagcagtgcctcagaaacacagggatatcctctcacagcaggtgacatttggcgggatcttggaaaatgagtaaggggatccaagatcgaatccgagggctatgctagggcgattcgattccatccccactttggcttagggacctcttctatatcctcagtaaacttcccttctcagagcatttattaaaacctccttggcctttccagacgaatgtctggctacgtaaactgtgagctctgtagggcagaggtggcgacggttcagttatataaatccagtgcccggctcaataagggtatgtggaatggatgaatccattaatgaataaagacagcagacctccacaaaagcccgccggccgggcgccttttcctaccggctgggatcgcttcgtccagcctgattcactcaggaggaatgcgcgaagaggccgtcaggaagcctcgccctagactcaagaaaagaacctgggaaaagctcaggatcctcccaggaaacaaggaccctcactgtggcccagggtctgaagggaccgcgctccgggttcctaaacctgtgaaagcggcttatcccattcctttacttacattcgcgagggaaagatttcaattcggtctttgcccgacattctgacgataacttttcggctcgggtccccggccgggcaaccgaggctgcaatagctccagaactggcctccacagtgtcttcctctacgggagtcagctggttgtgtcacttgacccctcttgttgctaagaggcagcagggacacccattttcacttccgcttccggttgtcacaggcgacgaagggggaggacagaacagaggcgttgcccggatgtcgaggcgcgcgcaccgcggaaccacccctcaattccggttcgcctcccaacccctccccatccagcttccctgcggctgcgcaatacgcggcacgcgccaggccaaagactaggagcgaagcgtgcacgccttgtctttctccacctttcgtctttggtcacagcgccatctcatggttagctgaaactttgaaagaggattcattcttcagaggcaaggaatcggagtcctatgtctttctcgcgccttgaaggttacttagctaaagctaagatagcgagaaacagtacttttcaggtccttccatgatctacattcgtccttgttctcggaggacccagactctatggttaatgatgaagaggggcctctattcgttcagcgcttgcgcatgcgaggaggttccgcatgcgcggtggagtgagcgaagcgcacgctgaggaggatcggcggccggtgagggggaagcaagtctggtctctgtgattgaagaagtcggctctgggctccagtgcgggaatcacacacatacctcaggtgactaatcccaagctcggtttctccaggaactcactttggtttgtgtccagtgacatgggtgttcgagagcgggtaggccccgggctaatacctccctttcccgtccctgcgcgggaagtggctggacagcaccgccaccacccgcgctgtcgtgggcctcctcgccggctccgtgtaggtcatcctgtgttccagaggcatcgttgttcgagcagaggaatctcgtgaaggaaagtgggccgagtggattgtacagcctctacaatatgccgaaagtgagaatgccatgacgatggggcggtctcaggagaacgctgtgacaccgtaactcttaaccccggctcaggacgctgagcactttgctttttccaggcttgagaattccatcttttcttccgccccaacagctctaccaaaaatttcccctgcgtctcagtggaaaccaaactggcctcttacctgagaaacctgtgggacgggcaccgtgttggaaagagcggggtccgagtagtttttcatctgataattgaatgagtcaccccttgaaccaaaactaaatgagacttgagtttattactgttactatcagtttgtcgtattttggcgacaatgagaatagaactgtgttaagcatatgttaggttaactatgttagttaagcataactaaaacctaagataaggatatattttcgggttaaatacacagtcatgctgaggtctctttatcctcaaaacttaggctttttaaatttttattaagcaaaaaacatggtttcttcgagaaaaagtatagcagagaagtctttatttcccctcaattgagttgttattcaaggaacaatctctgtcaatagtttgggggtgacttgtacagaactttgctacctattcttagttcatctggtgccaaaagatgtagttgtctcatgcacagtaatgtttgtagagattcggtgataactttctttttcaactataatgatgaaataaaagctttacttatgtagcactcctataccaagaactagcattcagagagcattcctaatacgtgttagatccaaattagaattatcacgagagttgtccccatcacataatatattttggaaaggaatgtgaacttctatatccattatagcagtttgaccatgcactgttttgagaaagaagtcctacctaccatttgtcatgcaaaataactgactatgcagggtatttgaaattagcctggagtttggttgatatattttgaaaggtggctgatactttttacatcagaacacataagagtattatagcatgttgtgatattgaggttctgtgggttaaagacattctggatttgatgtcggattacttgagtttagctcctacgctagtacttattaagcatttgttcttaaggaagtattataatttagtatttctgttccacctttcctgttcattgcttcactgtgccctttcatagtactttgtattgtaattatttgcttgctagtttgtttcccactctatacttaattacttaggtaagagt

SEQ ID NO: 1241138 - DNA, 4001 bp, Homo sapiens
tgaaaattaataacaaaaatatggccgggtgcggtggctcacgcctgtaatcccagcactttgggaggccgaggcgggcggaccacctgtcaggagttggagaccagcctggccaacatggtgaaaccctgtctctactaaaaatacaaaaattagctgggcgtggtggcgggcgcctgtaatctcagctactggggagactgaggcaggagaatcgcttgaacggggaggcggaggttgcagtgagccatgatggcgccattgcactccagcctgggtgacaagagccaaactccatctcaaaaaaaaaaaaaaaaaagtacgtgtgtatttttcacgcactctactcagccaagcaaccaaatctctattgtctatgatttacgagtcatgtcaatcaagtcaaaaaattagtgacaactatacgactgagtccttcctcccccactgaacatcagcctatttcaaaagtttccgagatgttttctacaatgaaaagcattgtacttaacaatttgttccaggcacagtggctcacgcctgtaatcacagcacttcgagaggccgaggtgggagaatcacctgagtccaggagttcgagaccagcctgggcaacacagcgagaccccgtctctcccaaaaacattacctggccctggcgatatgcacctgtagtcccagctactctggaggcagaggcgggaggatcgcttgtgcctaggagatcaaggctgcagtgagccatgatctctccattgcacacctgcctgggtgacagaatgagaccccatctttaaaataaaaattaaaaaaaatttatgctacagatttacatttggtaaatgtattcttttgtctttgctttatttgttgtgtgtgtgtgaattttaaatgtctgggataaatgatcatttataagtatttaataaaacaaaaaccctttgctcctcctattaaataacagccttaccagcaactctttccaaacacgaaactattatgaaacatgataccatgtgccaaagctgtcctggggaaggcttcactcacacacaaatggctggataatagtatgagagaaacgaggagtttctttacatatcacaaacagtatcttcaagtgcatggtcacggaagagttaaagggacagcaggctaggcagactacaacaaaatcatcccagtccactcctaatacctaaaaacaaagctggccgcctgctccggaaagatgggagtaccaaaagaaaccaaacccaaacatcccgtaataaaaactcttgtgacgacttccctgtttaggggcacgccgggtttcctacttcacttcctaaatgtcaggccctacagtgggcgagccaaggtctcctccctcgggaggctcgcggacctagtgcaggggaaagacacgaacaagaccccaaagatctacgtgtagggaagactccaatatagaattgagcagtccggaggaggaaaagttaattctgccaggattagggtaggaggggttgagggaggtgtcccagagatgactctagctagaccctagggagagggaaggattggggaggggtgaaggaatcctccgaaaagcgatggaaagtgacggagaaaggcagaagcaaacccactgggcgccaccccactcccgtgtcccgagacgcccccggccccgcccatactccctcccggctcccagggcgggggccgcgggggaagtaggggcgtaggtgatgctcccctcctcgagccgaggaggcgggaggctgcggcgtcgcccctcgccgggcgagatcggcatgggggcgactcgggccccacccagccctccgagaggcggtgatgccgcgctccacgcccgccaccgcgcggcagacagctccccaccgaacgcggacactcactttctcgtggaagatggactccatgtttatttgtctggagccaacggcccccacgccgaaccaccccctccagctccgccccctgcccctctcctccgcccaccccgcccctccccggcccgccccggtaccccgcccacgtgccgcacgcagaccaatcacccgtgaggatgcgagtgtcgtgaagcgaagagcgagtgaacgccggggacacgtgaccttggtagcgcgtcctcctagcttctgttagcgggccttctgggggatgctacatcgccacctgctgtctggaggatcttctccgcttcccacccatttctatggattcttaggtttctggggggaggtctggaccgctcacctgggttctatgttctttttgttttccactttgactttctactgtgttcatataactatttactttctttctcctcctcctgcactgaaagtttagtaagaaaaaagccatcattacattctcccaaaacccagcacttgtataaaaatgatagctaggccgggcgaggtgcttcacgcttgtaatcccagcactttgggaggccgaggcgggcggatcacctgaggtcgggagtttgagatcagcctgaccaacatggagaaaccccgtctccactaaaaatacaaaattacccgggcgtggtggtgcatgcctgtaatcccaggtactcgggaggctgaggcaggagaatcgcttgaacccgggaggccgaggttgtggtgagccgagatcgtgccattgcacgccagcctgggcaacaaaagcgaaacccctcccccaccaccccaaaaaagaaaaaaaatgatagttaatatttacataaggctttctatgagctaggcacttttctaaatgctttgcatatattatcaaatttaatacagcaaactttgatgtaggtgttgatgttattcatacacatgaggaaaccgaggcacggagaggttaagaacagcacaatgtccaaggtcagatagtaagttgtcttgccaggattcaaatccaggtggcttgttaccagtgtaggtgttcggaccctttagagggaacttagaagtcccataaattgtgtgggagacggggaggtagcagcggtttgatgaaacttaaatggaaggataggtgcagatcttgcaccttgaaaccagattaaggtgtactttttttttttttttttttgagacggccctctctctgtcccccaggctggagtgcagtggcacaatctccccgctcactgcaacttctgcttcctgggttcaagtgattctcttgcctcagcctcccaaacagctgggattacaggcgtgcaccacgaagtccaactatttttgtattcttagtagagaagaggttgtaccatgttggccaggctggtctcgaacccccagcctcaggtgatccacctgccttggcctcccaaagtcctggaattacaggcgtgagccaccgcacctggccaaagtgtaccttttaaaggatgtggggagctatataaatattttaaaagaagacatgtggtcatgtttgccttttagaaagatcactggctgcagaaaaaagcagttgctgttgaaggaatcttgggagagacgatggtggtttaagagagtgtcttaaagatggaaatagcccattttgagagattctttggacgtaaagagactcaacagaatgtggtgatgataccgagtggaggaatactagcctttttcgtcttgagtcgaattacataaaacgacatggacaaacgtggagtggttttaaggagcggagagtttaataagcaagaaggaagggagaagaaagaaagaagcagctcccctgtacagagacagagggatgggtgctccaaagctgagagaggagacccagagtgcgtgggagataccagccagttataggaggaggatgcaggaggcggtgtctgatttgcatagggctcaggggactggtttgaccacgcatgtcattcatgtagccccctaataaaactggccattccaccctagccttttaatatgcaaatgcagggcgctatgatgttctactcatgtggggatatgtggggg

SEQ ID NO: 1241139 - DNA, 4001 bp, Homo sapiens
ttgcctccattataaaatggcacaattttctctctcacgagggactgggcttcctcaaaaatgttctgtatttcaatccggtgtgggtggtttgcattctgctccaactctttgagaagacgttctgtctcctgtgctgcccgcttcctagcttgctgaatatctccttttccttcagtatctacagagtctatttcaaaaagctgttttgttagaatcctctccagtttcttgtaattcttgtcatctgacagaccactgaagccgataacttgctgttctacactttttacttccttttggatttcctgaagcctactaatagaaggatgttggtttcccatatccatacttttgttgtgttcagtttcacaagcactaaaagacgacaagaatgataacttactacagcacaaggcttctgcagaacactaatggtatattaagtcattctaaaattctcattttaaaaaggtatacttctgagcagtcatcccacctcagcctccccagtagctgggtctacagtcgtacaccactacgcccagctaatgttatttttagtagagacaggtctcactatattgcccaggctggtctcagacgatccgcccgcctccgcctcccaaagtgctgggattaaggtgtgagtcaccgtacgcgacacaaactatttggaaccagcagggcacctttatgaaaggtgaaacagtagctcttgtaaccttccgaacactaacagtaccccgccccgccacacagctatgcctagtttccagaaactctaagcaaaagaaagaaccagaacaaaaaccagtggctctcagacatccccaaggtccccgcttcttcgtttctctccatccctttgtgcacttcccctccccacccttttagctcctcacacatcttccctcacagaagtctccctgaagagattaaaaccccacaggtaaagaagagcgaccgggacagcgctgaagggcaccaccttgggctttcgaggcccaacacctcctcagcccccaacatgctccactctctcaaaaaaaaacaacccgcgaaaacgtggtaactatgaataattcattcactcgcctcccactgggagtccacaatggcctaatgcacgtttcaagctcttggtttctatcaaacggctcgctcaaggtgggtaaccaatggaaacgcataatctatccccggcggatgtcctggaggccacggagggaaggcggcccgagctgcttcctccccgcctcgcccttccctcttggccctttacccaaaagaagtctgaattggatgcggtcttggcgtcccgtggctgaggtggcgaggtggaagatcagccctttacggggtgcggcaccggagctgggcccccagctgcatgcctcgcacccctcccgactaggtctgagcggggcagccggtgaaggggccgctactggctgcagcagccgctccgggcgtcttggcccgggtgccagggcgcgcctgcaggacgtgacctcacaatgggcgcgcgaggggagctcggcccggccgggggaagccgggggaggaggggaaccgaggcccggccggagacaccagagaccaggcccggccagccccggtcgcttccgaccccaggggcggggacagcgccgagaccgactctgccctgcctgatccgacaggccgcacggggctgggcgctggcgaaggggtggcccagcggggagccccgcgcggaggtggtgccccactcgtccccccgagagagggaaaaggctacaagccgcgcttcgctcacctgtcccgcccgcgccatcgcgcgatgcgtcgccgacgcttccacgacttccgcagctccggcagtcgcccgggcccggcagccccgcccctggccgaacacccctaaacccggggacacctcctccggcgtccgcgcctagccgccggcagcgccacgcccaccgccagcggcgcagcgaggcagcctggagtgaccgcgaccaaggagcggccgcccgggtcagcccgcgccgcccgccgccccctcaccccgtcgcaccgctgggaaagcgcacggtcggccgcgccgccgcgcttcctcgggcttcgcgaccctgccgtaaagcggcccctcgcgccgtcgcaatgctgccgtgcgccgcgggagccagggggcgtggggccatggtggtcttgcgggcggggaagaagacctttctcccccctctctgccgcgccttcgcctgccgcggctgtcaactcgctccggagcgcggcgccgagcgcagggatacggcgcccagcggggtaagcaggggcctggggacattgggccgggaggggtgaccggaagggaagacaaacccgggcctcggggccactccctgttctgcacagccgcctcaggcctttgtccaggtgctctcgcgtcctatcccgaacagtcccgcagccccgaggctcccgcatcaacgccctcagtcggatgggactgagggtgccgccgccaccacgccggggactgttgacagccagaacctttaagcgtaacagagtcacctggcaagtttgtacctaccttatttgttcccgagaatgattattttttatttttaaagagctcttggcttaccgtgcgttttttttcgttgtgtgtgtgtgtgttttggctttgttacaattattagtgcttttcttcaagcggcgagcactttatcatcgtacttttgtagcacttcacgttgaatagttgttatttgcaaactatgtgtgggtatatgcatgttactggccaaagatccgcaaagaatgtctgtagcaagaatgtctgtggcaagcaatttttataagtggtacttttgggagggatgttttgtttaagggaggcctaggccttgattccgtctgtcagatgaaaatgttgactaacggtgtggaatgggctggagataaaatattcaagcaaagcatgcaaataccaaacaggctaatgaaggaggctggaaaacttggtttaaacaataattaaagaagtattaaaaaagtgttaattaaaaattggacgggctccgtggctcacgcttgtaatcccagcactttgggaggccgaggcaagcggatcacgaaatcaagaggtgagaccatcctgcccaacatggtgaaacgtctctgctaaaaatacagaaattagctgggcatagtggcgcgcgcctgtagacccagctactcgggaggatgaggcaggaaaatcgcttgaacccgggagacggaggttgctgtgagtcgagatcgcgccactgcactccagcctggcgacagagggagacttcatctcaaaaaaaaaaaagctaattaaaaattgcaaatgtacttgcttgtacattttcatttctgttgggctgtggctgttagtacactttcataattgtagctttgaaggtctatctagtttacaatttaaacaaggagttaccagggcaacttgccaaccagacacccaagtggctagctcagttctgtgttacagtgaccaagtccttgccttctatccctagaacatagaaacccacccagcatctctatctttgggcagaaagatagagcaggtgtctgaaaatgctctaagagagcaaacgggaaatcaaccaagacatttcccgggcgggggggattttccctagcttattttgtgaacttgtgctggaaagaaacaacagcacccaaataaggatttctctattgtcatatacacttcttttttttttttttttttttttttttgagttggagtctccctctgtcgcccaggtgggagtacagtggcgtgatctcagctcactgcaacctctgcctcccgggctcaagcgattctcgtgcctcagccttccgagtagctgggactacaggggcccaccaccatgcccggctaatttttttgtatttttagtagagacagggtttcacctgttggccaggctggtttcaaactcctgacctca

SEQ ID NO: 1241140 - DNA, 4001 bp, Homo sapiens
gaccttttctatttttaaaatggaatgattctgtctcaggtcaaatgctttagttgtgtctgcttcctcttccaaatccagatatttcaataatttgttgatatcttctactacctccctccgataatttctgatttctgtccggccgcacacatctagagcatccaggtcagcgatcagccccgagagcacacaggataagtgcctgcaggtctcattgttgttcacacccatcagaagtgcaatcaggacccctcgggccttgttcacctcacacatcacgaagttgattttggcaacggaaggatgtgcatcctcggaaagcggcagggaaggctgctttttcatgcagtcttcgattatctcttgcaccgcacagattttggttaaagtgtgataccttgctttccgcaaggagatttttcctccagttttaacatgtgtcagcctcagaatgatatcttggatgccttcttcaaactcatcagttacgcagttgcctccattataaaatggcacaattttctctctcacgagggactgggcttcctcaaaaatgttctgtatttcaatccggtgtgggtggtttgcattctgctccaactctttgagaagacgttctgtctcctgtgctgcccgcttcctagcttgctgaatatctccttttccttcagtatctacagagtctatttcaaaaagctgttttgttagaatcctctccagtttcttgtaattcttgtcatctgacagaccactgaagccgataacttgctgttctacactttttacttccttttggatttcctgaagcctactaatagaaggatgttggtttcccatatccatacttttgttgtgttcagtttcacaagcactaaaagacgacaagaatgataacttactacagcacaaggcttctgcagaacactaatggtatattaagtcattctaaaattctcattttaaaaaggtatacttctgagcagtcatcccacctcagcctccccagtagctgggtctacagtcgtacaccactacgcccagctaatgttatttttagtagagacaggtctcactatattgcccaggctggtctcagacgatccgcccgcctccgcctcccaaagtgctgggattaaggtgtgagtcaccgtacgcgacacaaactatttggaaccagcagggcacctttatgaaaggtgaaacagtagctcttgtaaccttccgaacactaacagtaccccgccccgccacacagctatgcctagtttccagaaactctaagcaaaagaaagaaccagaacaaaaaccagtggctctcagacatccccaaggtccccgcttcttcgtttctctccatccctttgtgcacttcccctccccacccttttagctcctcacacatcttccctcacagaagtctccctgaagagattaaaaccccacaggtaaagaagagcgaccgggacagcgctgaagggcaccaccttgggctttcgaggcccaacacctcctcagcccccaacatgctccactctctcaaaaaaaaacaacccgcgaaaacgtggtaactatgaataattcattcactcgcctcccactgggagtccacaatggcctaatgcacgtttcaagctcttggtttctatcaaacggctcgctcaaggtgggtaaccaatggaaacgcataatctatccccggcggatgtcctggaggccacggagggaaggcggcccgagctgcttcctccccgcctcgcccttccctcttggccctttacccaaaagaagtctgaattggatgcggtcttggcgtcccgtggctgaggtggcgaggtggaagatcagccctttacggggtgcggcaccggagctgggcccccagctgcatgcctcgcacccctcccgactaggtctgagcggggcagccggtgaaggggccgctactggctgcagcagccgctccgggcgtcttggcccgggtgccagggcgcgcctgcaggacgtgacctcacaatgggcgcgcgaggggagctcggcccggccgggggaagccgggggaggaggggaaccgaggcccggccggagacaccagagaccaggcccggccagccccggtcgcttccgaccccaggggcggggacagcgccgagaccgactctgccctgcctgatccgacaggccgcacggggctgggcgctggcgaaggggtggcccagcggggagccccgcgcggaggtggtgccccactcgtccccccgagagagggaaaaggctacaagccgcgcttcgctcacctgtcccgcccgcgccatcgcgcgatgcgtcgccgacgcttccacgacttccgcagctccggcagtcgcccgggcccggcagccccgcccctggccgaacacccctaaacccggggacacctcctccggcgtccgcgcctagccgccggcagcgccacgcccaccgccagcggcgcagcgaggcagcctggagtgaccgcgaccaaggagcggccgcccgggtcagcccgcgccgcccgccgccccctcaccccgtcgcaccgctgggaaagcgcacggtcggccgcgccgccgcgcttcctcgggcttcgcgaccctgccgtaaagcggcccctcgcgccgtcgcaatgctgccgtgcgccgcgggagccagggggcgtggggccatggtggtcttgcgggcggggaagaagacctttctcccccctctctgccgcgccttcgcctgccgcggctgtcaactcgctccggagcgcggcgccgagcgcagggatacggcgcccagcggggtaagcaggggcctggggacattgggccgggaggggtgaccggaagggaagacaaacccgggcctcggggccactccctgttctgcacagccgcctcaggcctttgtccaggtgctctcgcgtcctatcccgaacagtcccgcagccccgaggctcccgcatcaacgccctcagtcggatgggactgagggtgccgccgccaccacgccggggactgttgacagccagaacctttaagcgtaacagagtcacctggcaagtttgtacctaccttatttgttcccgagaatgattattttttatttttaaagagctcttggcttaccgtgcgttttttttcgttgtgtgtgtgtgtgttttggctttgttacaattattagtgcttttcttcaagcggcgagcactttatcatcgtacttttgtagcacttcacgttgaatagttgttatttgcaaactatgtgtgggtatatgcatgttactggccaaagatccgcaaagaatgtctgtagcaagaatgtctgtggcaagcaatttttataagtggtacttttgggagggatgttttgtttaagggaggcctaggccttgattccgtctgtcagatgaaaatgttgactaacggtgtggaatgggctggagataaaatattcaagcaaagcatgcaaataccaaacaggctaatgaaggaggctggaaaacttggtttaaacaataattaaagaagtattaaaaaagtgttaattaaaaattggacgggctccgtggctcacgcttgtaatcccagcactttgggaggccgaggcaagcggatcacgaaatcaagaggtgagaccatcctgcccaacatggtgaaacgtctctgctaaaaatacagaaattagctgggcatagtggcgcgcgcctgtagacccagctactcgggaggatgaggcaggaaaatcgcttgaacccgggagacggaggttgctgtgagtcgagatcgcgccactgcactccagcctggcgacagagggagacttcatctcaaaaaaaaaaaagctaattaaaaattgcaaatgtacttgcttgtacattttcatttctgttgggctgtggctgttagtacactttcataattgtagctttgaaggtctatctagtttacaatttaaacaaggagttaccagggcaacttgccaaccagacacccaagt

SEQ ID NO: 1241141 - DNA, 4001 bp, Homo sapiens
tggtcttctgctgcattcctgagctgagggtgcatcccagatctgcctcctctttccttccgttgtgctcagccactgtgacattccccatggccccagcacaatgcctggcacatcaatgccaaaaagaacgttaatggtggaggtgacctggctgtggtgggcagtagatgggtgcttggtaggataaggggatctttgggtgttctctaattacacccagagagaggcatgtcctgtgcctgggcagagaggttagctccagttctctcccagatgctgcagtgtaggtgtaggagtcctggcaactcatgccctgttcccttccacgtctcccacaggctagaggggcacagatccaagggcaaagctctgggatcactaagtactgggctcaccaacatgtccaatactttcaggcctttgtggtaggaggtcattggcatagataggaaggaagtgctcttcctctaagggggatggggcaccaggttaccatggaagccatgagtaatttccttcctaagaaaagtacaaacttccaggcagtcagagccactctgacaccatcttgagcagcagactggattctgtgccttctagaggtctccacccagactcatcccagcctgctgctccgttattagaggcttaggatatacgccctgttcaatatttatatacttttattttggctgcagcattttgaaaacccttgtggatatctgtgctaaggaaagaatgaagtttttaaactatgaaggttgagaaaattttaacccacggatacatgtcggatgagaaagaggagggcttcctacagcaagggatgtcaagagtgtggtgcagaacaaaaccctagaagctgtgagatgggcagggcactccttttttggtaatcctcaagctaaaacctttggacttggaagtcacaatctagactccaaatgctcccacaatccctatctcagtctctctggtttccccagagctaagatgaactaccagcaaatgtcttccaacaaatttccagagccacctcctcattcatttccttgctcctatccagaagccacaagcaaagagatattggctggacctctagcatctccccttgctggctgtgctagcaacagaggcagtgccccagtagagagatccttctatgctagcctgggtttctcctcctcctcctccttcttcctcttcttcttcttctttttttttttttttaacttttccctaaccccttttctccccttccctattggctgtctcctgggaaactgcatatctaggatttgagctgtgcatgccagcggcccacttgaaaactcctctcacttttctacagccttggagaacagtagactcttttctctgcattctttgatgttcatcctcctctttgcttcctagaaagctttttagggtggcaaccccagtgaggcagaggtgataggcagccttggaaaatggagagaaaaaggggctttggcagaatgggtggaaggatgaggatctctgccaatatgcacagcttagtagcaaattccatgtcctaagtctaacagagtgcccgtgcaacgagccacttcctccatcctcagctccctgggcaggacaaggaagcctggctctctttccatcccccaggagaatcagaaggtaggagagagaaaaaggaggactctacctgtttgccagggggaggagagcggctgaagctggagtcactgctgtcggagctgtgaggcatggctgaaatcttccgggctctcacactcagccccaggcacctctgggctctcttgtcaccagctgggctcccttcctgacttctcctgggccaccagcccaccaccccctacaggtgcctcctctgcctgccctgtagccacctctgacccctgcgtcctcctcactctggggtgcagagggactgctccccaaagggacatgtcgctcgctttggggcttgcacgctctctctctctcttgtggtttctggtaactcacgctggaagtcacatgggcggaaacttcagcgagttagaagttagagagaaaaatacatatctgggaaaagacctacagaattatgtgaaagaaaaaaaaatacagataccttccgacagtttgaaagacacagcagccctcttcaattgatgaagataaaagagaaaaacagcccaggcagggaaaaaccccagccagaattagcaagtccgtcttctgtcaacatgggcagagaggagaggacaaccaggaaaatgtttccattgtcatacgacttgatttttaaaccaaaataaagcaaaaacactgggatttctttctggttttcagccgaaagcagctgctcacccatcttgtctttcctcaccccttaagtccagccagcctcggggtggtctggagataagacgatccaagggtattctcctttcctgaccatcaaacacaagggctgtgggagatcagaaagccacaagggaggttctagaattgctgctctgaaagcctattaagcgcctgtgctgcttggcagggagctcacactctttagagaaaagatgccttccatattgagcagctcaagacaggccctgaatctttatgattcaaggtcacctggtcagaacccagaatgcagaaacagttaaaaaaaaaaaagaaagaaagaaagaaagaaaaagtgaaacaaatactacacttggagtcagaccaaccaagatttaaattctggttctaccactttgtatgtctgtggccctgggtagctcacttgagctatgtgaccttcattatcttcatctgtaaacagaggatgataaaacctgccctgcctacctcttaggaatgtggcacaaagcaaatgacaacgcggattagaatgccccgcagactctgaagtaaatgaccgagagggtaagtgtagggtattcccagccttgccatgagcgcatttgtagggttctcagtgatcaattcaaccctcacctgggcatcgtggctttttcaaaaggccttaccttattcccagtatggctcgaagccaaacatttgccttattaaattttaggattgacaggaagttacggctcctagaggatttttgtatccatgagctgaatttctagactaagacaatattgccctaaggttaaattaagtaagacaaaattcctttcctatggaggaaaataaagcagggttggaggttagggaattctgggtggtcagaagggccttgcccaaagaggggatacctgagcagagattcgaagaaagagagggagtgaatggtgagtgtctcagggaaggacattccaggacctgaggtggaagtgtgcttgagtattggaaaaagagcaggggggccaggtagttggatatcagaggcagcaaaagtggcaggcgatgaggtcagtgaggtaatggcccggtcagggagggccttagaggccaacatcaggattttagctttcattctgaaagacacagtgagcccatggagggtttccccttccaccttcattcttatcctctacctcagctactattcatttctcccatagcagttacccaattttatacttattttattcgtttactgatttatctttttcctgtttccctcaatagaatgttaaaaccatttacacctttattaatatattcaacaaacgttcatggtgcatctaccatgtgccaggcactaagtactgaggatacagttagtaaaaagaagcttgactttttgtctaaatgagatagtctatcagtgttcgctgcccaaaaaactaccagaaacttcgatgactcaagccatttatttggctcatgagtctgtgggtcatctgaaaggttctttggggataggctgggctaggctgatctcggctaggctcggtcatgtgtcctcagacagctggtaggttggctgataattgactggtctggcctggctttgccttgggcatttctcctccacatgg

SEQ ID NO: 1241142 - DNA, 4001 bp, Homo sapiens
ccggctatgcgaaagtgaaaacgaggggcgcccaaggccctgcttcttcccccttcctcttccccttgcccagccgcgacttcttcctcactgatctcccgggggcggagacgctgagttccccggagacgagttagtcaccaagaagaggcggtgacagagagcgcggctcgcgtcgcactccgaggcctagcagcgccggacgggaggccgcggacggaggctctcgcgtcccgcgccctccacccctggcccgtagggacgccccctccttcccttctagagcgagtctcaactccgctcctctctcccctaccccaggcagctccaacgtcagaccccactcccgactgagaaaacgaagcccagcccagtcgtttcctgcccaccggggcaggaattcccttccccggcccagggactgcggccccacgtcgctgaccctagcggggatcccctcggccgccgggaggggatcccggaactggccccggagtgcgcgtgtggccgcggcggggaggggcgaggcggggagtttccgccgccccgcggccaagagggcgggagggcgacagcagcggctaggagcggtccccgaggccggccagggacccagcctcctccgccactaccaacccgcgttccccacgcgcgccgccgccagttggccccgcgcgttctccaggtggaggccaggaggcagagaaccgcgggcccgggggccacccgtcactttcaagtcgccccgccagaagcccagggcgaggaaaaggagagagacaaaagagcgctgcggggggagtccccacaccccccgcggccccgcacacggcccggctcttactcgtagtggcggaagatctcgttggtgactttacagtagaaaacttcctcgtcgggccgcaggtccgcgggcggcttctgtctcacaaacggctttcggtgtagcagcggcatctcccgtccgcccgcgggctcgcctggaccctcggccgcccgcgccggccccgcttccctatcaaaattggagggaaaggaaagccggtaaggtggggagccctcggcggcagcgtgggccggtccgcgcgctgggagaagctcggctgccttttgtgtgactgacgcgccgcggccgctaccggagccgagttcgttcctgccgctgcccgggtgtcgagcgagcggagccgccgccgcccctgccccccgagcgcgccctacctcctctcgtcctgccgccgcctcacaatggggcaggacgccccgccgcggggggcagtgcgggagcggcggcggccccctcccccagcgccggctcctcgcccgccgccgccgccaggctcacaacgtgctcggcgcgcagctggccggccggccagcccaacgccgccagagcgctcgccgcgggcggaccccggagctgctccgctttgttcccggctcgcctccacttccccgccggcgccggccggctcccgagcgaccctcacctgcgatcacgccgactgccacttgtccaccttctccactacaaaggcaacgaggggagaccccgtcctcccaggggaccgcctctctccggccccgccgcgcccctggctgccgcttctcccgctgccactgcccgactccgcgcggggaattgcgtcccaccgccacttccccgcctctcggagctcctgggaagtttctgatctactttcggctctgaaggaggaagagctgttgggaggagcttttcactcctcgcttctacctttttattggctactcgatgacttttacagcctgtcactgatacaggaagagacagcggagagcctgggagaactacattattaattaatggagcaacccctcgtgaagattcagaagcatcctccatgtttgagattatcagccaaaagatctagggaaagcgctgggggttcataaacacatggctaacaaagtaaagccttcaagtctggcacagactcttgactacacgatgggaaaagggattccaattacgatttaacttgtattttaaagatgagaaaagaaatgaataagaaaatttgttgctatttttcttcttccaaattagaatctatatctctaaaaatactttgcatgtttagtaaacatccatcttgaacagaagataccttgacatcagttctatttaatacttatggcaattaagagatttagaaagcagaggaaaagaccaaaaaaaaagtatgtgttacaaagtgtcatcatgcttgtaggaccccagcattcttgaaactaacgcacctttaaaaagtaatatttacactgctgtaaatatttgcaaagtatcaatgtttaattcacttagaattttaaggattatggatttactagcgaaaattcccctaaagcaactttcccatatcagtaacttttatttagggaaacaagtttaatgtacataatacatgtgaccttggaattcaatagaattttcgaaactagaagtaactcagaacgttcactagatgtgttttaaagtcttttttgatactgtccttaacatttgcttatttgcaaattaatatgtaagaatgagtctaaaagtaagttttaggaatggttattcgacaaagatgttattcctattaccaatactgcgaaatgataattacagaaacaatgtgggatccgttttataacttcaaatttaagttcctttgtactttggagcagaaaatgtaagaaatcgaaatcaagagttagtattttttatctttcaggctggctttaactgttcatacacctagcaaaataaacatttgtgaaaggcgttattctttgggtgttttaaatttcattaatactatgaatgcaccttactgtacagaagtcacagaagtttggaaatgctcctgtaagtagtaagtatatactttagtatcggttaactcttcaaataagagtttacagatttaattttttttttttttttgagacagagtctcactctgtcccccaggctggagtgcggtggcacgatctcggctcactgcaacctctacctcctgagttcaagcgattctcctgcctcagcctcccaagtagctgggattacaggcgcacaccaccacgtccagctaatttttgtattttcagtagagacggggtttcaccatgttggccagggtggtctcaaactcccgatctcaggtgatccgccagccttggcctcccaaagtgctgggattacaggcgtgagctaccgcgcccggccaagatttggtgttttaaacctgtctccaactagtatactgagtgacaagttagaattccctgcctagaaagtatttattgggccgggcgcggtggctcatgcctgtaatcccaacactttgggaggccaaggcggccggatcatgaggttaggaggttgagaccatgctggccaacatggtgaaaccctgtctccactaaaagtaaaaaattagctgggcatggcgctgggtgcctgtaatcccagctgctcgggaggctgaggcaggaggcggaggttgtcctgagccgagatggcgccactgcgctccagcctgggcgacagagactccgtctcaaaaaaaaaaaaaaaaaaaaaaaaaaaaaaaaagtatttattgatctaccaggtgaaaaatttagagcccacaaaggtaaactcaaaagggggattgggaaaatggataattttcaagctatattgaagcatcaccctcacaactcaaaatcccaatttaacaattaagctaaataaagatgaaattctttctgaatacgtcagtatttatatttattagatcttactgttcaataagtcattcaaatcatgatcaaaagtcgttattttattattaaatacaaatatttaagttgggttttttcttatactagcttaaaattttattctattccatcaaaagctatcatgctcagttttctcacgatcatactcaaatttcaatactatcataacttatttctctgaa

SEQ ID NO: 1241143 - DNA, 4001 bp, Homo sapiens
ccgcccggcagccagtcctctgcggtgactgggcgcgcagccctctcgagctccgcgcgggcagcccggccccagcccggcgaggtgcgcggcggattgcaagcatataacctgcccgcggtctcgatggcacccagaggatgttttatttctattgcagttaaaaaaaaaaaaaaaaaaaaaaaaaaaaaaaaaaaggaacggcgacccaggcaccgcgagagaaagaacggcggggaaatgttcgcgcgcagcgaagaagccgccccgcgggctgcggcgggcggggagcgccgcaaagccaccttcccggtgcaagtgtgcggggactcggggcgggttcccctgcaaacaccgtacctggcccgctcgcgctcgcttttcccctctgctaaataaacccaacagggacggtggaagctgctgcttgtcttgccccgctgcctgactttgcccgcccagccacatgcttgaaatcgacacgatttcagccggtggatttccactgcgacctgccttgtttatttagataggaaagatgaaagatactgagatagaaagatggatacgagattgatgggtctcctttttttcttttttttcttttactattttacaagcgcatcactctcttcccactcctaactgacaacctttttttttttcctcgtggcggggatttttcaccaaccccaatccccccaccttttttgaagtgggggaaagaagacaagatcatcccaggagacagacggaggtggggaagtggggggtggggaggggggcttgagcccggcaaacagccgcgcagctggattattttgcaaatagcaggaggaggggagagaaaggcggctgcggaatcctaggactggcgcggccggcaccctgctgggccgggcgcagggaccggggacccggagccggcggccgcccctggccctacggctcccccagccggaacgcaccccgctctcctccgcccgcgccgtcagcgcggacccacgcgctcgccaacttttccccacttcccggctccccctccccctccgctcccccagccccctccccctcctctccaaaccccgccaccagcgccgccgccgccacacacgccgctcggaggggcgagcgtccagccgggctcggcgcgcacacacacacactcctccagcctgcatgccccctccccggcccggagccggctccgcaggcccccgagcccgaggcgcgtccggctgctcggcgccccaactccccgggctgcaaagaaactttcctatggcccccgccccccgccatgctccaggccgacgccgtagactctgccagccagcgggcggccccggcgcctggccaggctcggctgttccgggctcggtgtccccagccccagacgcccggagccccatctccggcccctcgcgcgcactccgcagacacttacgggtgatgagctccctctgggacaagtgctgcgggttgccctgtttgcggcgggacattgccccggcatctattctggcatcgcccggagagctgcactgatggggggagccgggggagggggtccgagccgccgccgcgccgctgccgccgctgccgccgccgccgccgccgccgcacctcctcctctgcccgggttggtgttttttttcccttcctctctttccctctcttcctcctcttcttcttctttattttgctctttcttctatgctgttttttgttttgtttgcaaaaagaaaaaaaagggaagaaaagcaagaaaaacctctcgatctaaaataagaaaaagaggcaaaaaaaaaaaaaactgctgttgctttccgcggactggctggtttctttaaaaatatattctttcgaaggaaaaaaaatctcttacacttcttcaaactgcttggcctcttgcacttgcaaatgtcttcttgaacttaaactgggttttgcaccggctcctgacactttctttcagggtctggtaggtggaaagcgcacttctaccaggaggggaaaaaaaatgcaaacaaataaaaaaataaaagaagaaaaagcaaaggaaaaaaaaaagcaaagaaaacttggggacttgtctcgtaccccctcaccccgccccctcaaaaaacccaaagcaatgtaaaactgccccggttcggttgtttctgggttttctgcgggctgcctgtttttgtttttgtttttgttttttctcggagactgacccttccgaggctctggggggacaccaggagaggctccttcccagttcacctggcaggctggcgccggccggaggggctgccgagtccccgcgagcgctccccagcgctcccctggcgccgcgggcccggggggagcggggcggaggggcggctcgcccagtgcgcctgggtcggtgcgggcgcagactgggagctatagattgcaacgtgaagatggcggagtccgggttctctgggagctctcggtctctctatggctggggctgcctctgtacaatgggataaaattcaagttcaagtgcggacgtgacgtttaatctgcactagagacaaaaagacccagagagtcggagcactgggggcgactagcggtggctttttaacattgtaccctgtaagagaacaagaaagcacacacagagacacactcgcgcgcgcgcgcacactcacacacacacacacacagtcgccagttgcgcacacccgcagcccaagccggacacacgtgcaaaccgcgtttttgtgcgctcatctcccccgagccccggctgcgcaacagcgggagggggttggggggggccactgggcagcttattttaaaataaaagaaaaatcgtccttatatctcctccatcctgggagcaggaccccctgagaaggggggcggggtgctgtgtgagtgaactaaattgaatcaatgcaagtctccacccacccaaaagctctttcggacttggactttgggggtgggggcgtggactgtggaaaagggttggggtcgacatgggagttggggggacagtaagaatcgcttcgtttccctggaaaagtcgcttggtagtttttacttttgttttatggtcgcgggcggcgaggggaggggagtagatgttggagttcaacttccaaaaagtgtctccatataaatcctggtattacagactctgggagggtgaggatgacaaaataaacgacactaagacaacagaatcaagagcacgtgagggggtgagaagtgtttgagaccttgtttgagtcccacttggaaaaggattttcactcaaatctttgtcccctcccctcaccttaccccgattaactcctggggtcaaacacgaccccacctcctaaactgggtctatggcaagcgagagggtaaagggaccggggcgctccacgtgggagagggacttggacttgccagcccaggagtaggtgtggccaaatctccgcagatactcgggtgggtgactccaggaggcgcccctgacaatcacagcaacctggaagtcacaccccgccccccgcgctcctcggcccagggtaggacttggaaatgcctgtcagactgggaaggacgcagctgccttgtcagccgtttgatctccaaccggcgaggacaagaggagttgtggggcctctccgtggcccggggacaaggccagaccacggcccccgtggacaccccccattccccaggctgtggccaactttgtcaatttgatgacctggcctccagggctgggcgcgccacgcggctggcctcctctcccttctcagggtttctctggaggcggccagggcgggtcggggcctggctccggctaggcttcgcgggcgagtccagctgcacccaccccactccgcccccaggcctggctccggcggcttcacccgggcgcatggcgaggccgtgacgcctcagcgccgcctccctcggggccttttcctcggggggcacacgggggtttttgttttcgtcccgaaggtcttggg

SEQ ID NO: 1241144 - DNA, 4001 bp, Homo sapiens
cgcctcctccagggccccgtccccgtatagagctgtgaactccgcctgtgggagagaagggaagcaggagagaaagaaggagaaagggatatcaggagaggaaagagtggagagaagaggagaggaagagttccagttccatccactgcgagcactaccccatacccagctcctctctggccaaagctcttctccctgcaagcccctctgatccccccaggtgcacccccaccctgagagactggttcatctgcccactctgcctccagtgaattccatcctttccttggcgaaaaattctgctcagaactagcatcctttgccaaggcttgcctgaccaccacccatccctggtcctccccacctcccacgccatgactcagatgtaaaaagtccctgacaacattcccctgcaggcactccttgggtgtgtattctgtcctctgcttgggaccatgagcccatccagtgttgactgcatggcagccctggagtgcagagtccaggcatctctcaatctaattccatccagacggggagactcagccccgtacctcattcccaacatagctgcctcagcctccaatcagagcccccatcttccccctggagaccagctttgcagaaggatgtgcagagcggcaattgagaagcttcttacccagcccccactgctgtggatccagtcagccagctgcgtctccaggtaggccaccatccactcctgcacttgtcccaccagtggttccatctccttgttgacactctcagcacacagtgcagccccaaagacaaagaaggctacaaggcggccccagttggggcccccttgaaaaagttcatcggagacctgggtgaagcgttgttgggctgagcctggggtcacatgcagctgagccgccagatcagagaaggtgcgccggaagcgggtctcgaactcatctccagctgcccgcatggcttggtgcagcgggtcagctgctgggccctccccggggccagctccacagacataacccttctgcctcagcttataacctacaaagtctgccaccagagcccgtgtgtctggggccgaggctggggtcgccatccgggcggctataagaggcaaggatgaaagactggcatgaatatatgaagagagaatcagaaggagcacttctggtttgaccaacccagtgagatgaggaggagagaggaaatgctcaggactcactggacagggagaggcaagaacaagggaattaagtcatgatatgagactaggctgtgagtggctggccattacattcctaatatgccaaattaaatgtaaaacaagtaaattttctgtttaggatactttagattcttttcacaataagacaacgtcagctcaatgacacccctacaacacccccacccccgggtctccttagtccacaccttcttggctagaggaagggtcttaggacctccccaaatgcaagatgtaaagatgttggcagagacacaagatgagggggagcagatgggctgaagagaaaggtgggagacgcaatgggttactccagacagagaaaggaaggagacactcacccagccgggatggcagctcttaagacacagcactggtggcaaggagcccccagctggggcctttcatcctcctggccagcgtggagccctggaaaggggagggggagatcagaaccaggaggggaaggccagggatcaggttctggcctgggaagggctagggttgcagctctgggcctaggcccctgcccccaacgctctaccagctgtgtggccgaatccatgtttaatgactgtcctcccgggaaacccaaggccaagggcttcctgccgacaccatctctattcccggttccccctagtgcagcccaaaggcccagctcctcccttacccccacctcagccagtctccaaccccgcccgcctgccaggttagggatctcacgggtcaggccgctgccgggatccgggccgtttcctggtgcaggagctgggagggagggagagagggaggaagggagggaaggaaggagggaggagaaaggggggggcagagggagggcccggcgccgggtgatgatggggcccagagatgcgtccagagagaggggcggggctgggacgcaggcctgcaaagggccactactcaggaagagggagggctgctgaaggcaaagaagggctggctgagagggcacggtgggctgggctgggctgggctcctgagcctctaggctgcccagagaaatatgccggacttcgggacatctcggggcaaatttagcattttcaggaggtttccgatgttccatgcacttgttgaacttttccagccctgaactgtgtgcctggaaaacaggagcagttcccattaagctgggaaccgtctaccaggtgccttacccttatggggctagcagacaccacatagacaccaaacctttcccatcttttctccaggacctttaacccagtgttctctttgtgggctgggcttcagccaggcattagggagccaggacttggatcacaagcagtttctctcggtacttttctttaattcatcttcttttgtaattagattgattttagtggggtttttttctttttcttttttttacccaacacacaaactcattctcattatgaaaaaaatcaaacaataaagacgtgcggagtaataaaatacaggttctcaaacacacacacacatacacacccaattccacttccctccctgcaggttgccagtgttaagcttgatgtttatccttccagattacatatatatggggccattatttatacatggcagtatatttatacagggcaggtcacaggcgtgaagcagtctgaccatagctgatccacatgagggcactcacagccagccccctgggctcttggatctggcacttttttaaagagtgccccaaccaaaggccagaaagaggcaacctaattctcctattctgctagctccctttgcttctacctccaatccaagcctctgtattaccatcttcccttatggtcactggagaagcaaggtcttttctgcagcaataacagtaacaactagctgggttcggtggctcatacctgtaatcccaacactttgggaggccaaggcgggtggatcacttgaggccaggagttcgagaccagcctgaccaacatggcaaaaccccatctctactaaaaatacaaaaattagccagacgtaaaatacaaaaattagccagcctgtaatcccagctgctcaggaggctgaggcatgagaatcacttgaacccaggaggctgagatcatgccactgcactccagactgggtgatagaacgagactctatctcaaaaaaaaaaaaaggtaaaaactaacatattttgaggagttattagatgctgtgctttttttacatgtgtattttttcctctcaccagtccttatgctgttttatcctcattctatgaatgaggaaattgaggtttggagaggttaagtgattttcccaaagccataggctgatatgtaagaagctagcacagccatctcatgctgtaactttgacactatcgcttcaagatcacctcttgccttcacatagtcaatatggttctcatagtctgaatccacaccatttacaagtccatactcaattctctcctctattctaaacacacagcctattacactcctttatggctgtatcctttcaaccatcctcatttcatttttgctcttagcctgatcattctggctgccaccagcaaggttgccctcttctttagagaataacctagtccaagtcttcatttgcactcctggtttatttgtttgtttgtgatacaaggttctcactccatggcctaaactggagtgcagtggtacaagcacagttcacttcagcttccaccgtctaggctcaagcaatcttcccacttcagcctccctggtagctgggactagaggtgtactgc

SEQ ID NO: 1241145 - DNA, 4001 bp, Homo sapiens
aggaaagagtggagagaagaggagaggaagagttccagttccatccactgcgagcactaccccatacccagctcctctctggccaaagctcttctccctgcaagcccctctgatccccccaggtgcacccccaccctgagagactggttcatctgcccactctgcctccagtgaattccatcctttccttggcgaaaaattctgctcagaactagcatcctttgccaaggcttgcctgaccaccacccatccctggtcctccccacctcccacgccatgactcagatgtaaaaagtccctgacaacattcccctgcaggcactccttgggtgtgtattctgtcctctgcttgggaccatgagcccatccagtgttgactgcatggcagccctggagtgcagagtccaggcatctctcaatctaattccatccagacggggagactcagccccgtacctcattcccaacatagctgcctcagcctccaatcagagcccccatcttccccctggagaccagctttgcagaaggatgtgcagagcggcaattgagaagcttcttacccagcccccactgctgtggatccagtcagccagctgcgtctccaggtaggccaccatccactcctgcacttgtcccaccagtggttccatctccttgttgacactctcagcacacagtgcagccccaaagacaaagaaggctacaaggcggccccagttggggcccccttgaaaaagttcatcggagacctgggtgaagcgttgttgggctgagcctggggtcacatgcagctgagccgccagatcagagaaggtgcgccggaagcgggtctcgaactcatctccagctgcccgcatggcttggtgcagcgggtcagctgctgggccctccccggggccagctccacagacataacccttctgcctcagcttataacctacaaagtctgccaccagagcccgtgtgtctggggccgaggctggggtcgccatccgggcggctataagaggcaaggatgaaagactggcatgaatatatgaagagagaatcagaaggagcacttctggtttgaccaacccagtgagatgaggaggagagaggaaatgctcaggactcactggacagggagaggcaagaacaagggaattaagtcatgatatgagactaggctgtgagtggctggccattacattcctaatatgccaaattaaatgtaaaacaagtaaattttctgtttaggatactttagattcttttcacaataagacaacgtcagctcaatgacacccctacaacacccccacccccgggtctccttagtccacaccttcttggctagaggaagggtcttaggacctccccaaatgcaagatgtaaagatgttggcagagacacaagatgagggggagcagatgggctgaagagaaaggtgggagacgcaatgggttactccagacagagaaaggaaggagacactcacccagccgggatggcagctcttaagacacagcactggtggcaaggagcccccagctggggcctttcatcctcctggccagcgtggagccctggaaaggggagggggagatcagaaccaggaggggaaggccagggatcaggttctggcctgggaagggctagggttgcagctctgggcctaggcccctgcccccaacgctctaccagctgtgtggccgaatccatgtttaatgactgtcctcccgggaaacccaaggccaagggcttcctgccgacaccatctctattcccggttccccctagtgcagcccaaaggcccagctcctcccttacccccacctcagccagtctccaaccccgcccgcctgccaggttagggatctcacgggtcaggccgctgccgggatccgggccgtttcctggtgcaggagctgggagggagggagagagggaggaagggagggaaggaaggagggaggagaaaggggggggcagagggagggcccggcgccgggtgatgatggggcccagagatgcgtccagagagaggggcggggctgggacgcaggcctgcaaagggccactactcaggaagagggagggctgctgaaggcaaagaagggctggctgagagggcacggtgggctgggctgggctgggctcctgagcctctaggctgcccagagaaatatgccggacttcgggacatctcggggcaaatttagcattttcaggaggtttccgatgttccatgcacttgttgaacttttccagccctgaactgtgtgcctggaaaacaggagcagttcccattaagctgggaaccgtctaccaggtgccttacccttatggggctagcagacaccacatagacaccaaacctttcccatcttttctccaggacctttaacccagtgttctctttgtgggctgggcttcagccaggcattagggagccaggacttggatcacaagcagtttctctcggtacttttctttaattcatcttcttttgtaattagattgattttagtggggtttttttctttttcttttttttacccaacacacaaactcattctcattatgaaaaaaatcaaacaataaagacgtgcggagtaataaaatacaggttctcaaacacacacacacatacacacccaattccacttccctccctgcaggttgccagtgttaagcttgatgtttatccttccagattacatatatatggggccattatttatacatggcagtatatttatacagggcaggtcacaggcgtgaagcagtctgaccatagctgatccacatgagggcactcacagccagccccctgggctcttggatctggcacttttttaaagagtgccccaaccaaaggccagaaagaggcaacctaattctcctattctgctagctccctttgcttctacctccaatccaagcctctgtattaccatcttcccttatggtcactggagaagcaaggtcttttctgcagcaataacagtaacaactagctgggttcggtggctcatacctgtaatcccaacactttgggaggccaaggcgggtggatcacttgaggccaggagttcgagaccagcctgaccaacatggcaaaaccccatctctactaaaaatacaaaaattagccagacgtaaaatacaaaaattagccagcctgtaatcccagctgctcaggaggctgaggcatgagaatcacttgaacccaggaggctgagatcatgccactgcactccagactgggtgatagaacgagactctatctcaaaaaaaaaaaaaggtaaaaactaacatattttgaggagttattagatgctgtgctttttttacatgtgtattttttcctctcaccagtccttatgctgttttatcctcattctatgaatgaggaaattgaggtttggagaggttaagtgattttcccaaagccataggctgatatgtaagaagctagcacagccatctcatgctgtaactttgacactatcgcttcaagatcacctcttgccttcacatagtcaatatggttctcatagtctgaatccacaccatttacaagtccatactcaattctctcctctattctaaacacacagcctattacactcctttatggctgtatcctttcaaccatcctcatttcatttttgctcttagcctgatcattctggctgccaccagcaaggttgccctcttctttagagaataacctagtccaagtcttcatttgcactcctggtttatttgtttgtttgtgatacaaggttctcactccatggcctaaactggagtgcagtggtacaagcacagttcacttcagcttccaccgtctaggctcaagcaatcttcccacttcagcctccctggtagctgggactagaggtgtactgcaccatgcttggttaaattcattttttatagagatagggatctcattatgttgcccagactgatctcaaactcctgggccagcttgattgtaacataaa

SEQ ID NO: 1241146 - DNA, 4001 bp, Homo sapiens; identical to SEQ ID NO: 1241145

SEQ ID NO: 1241147 - DNA, 4001 bp, Homo sapiens
agaacaattattttgcttatcttatttttaaatgttcagttgattaacataaacatgttttcttttgctttaatattcataggtgtatgcatatatatttaaagacttttttgaaaatagtttttatctagaactactttataacaccatcaatataatataaccattttgttggattttttccccttccttccttccttcccttcattccctccttctctccttccctccctaccctccttccctccttccttccttccttcctccatccctcccttcctccctcccttcttccctccctcccatcctgctttccttccttccttccttcccttccttctttccttccttccttctttcctctctctttctacctgtaaatactaatttttgggggaaataatttttgactattggggtgccccggcagtgtgcacacacatggcctgaccatccctctcctagctatctctgatgatggccaggaagctgaggtctatggtgacagaggctggcaggtgggaatctgtagaattccccggcgattggttgggatttctcagggagaaaggaggcgaggtcctgacctgtggtggaggggctggggcattgagagtttgagaagagatgggagggtgttgagcactgatatggtttggctgtgtccccacccaaatctcatcttgagttgtagctcccataattctctcgtgttgtgtgagggacttggtgggagataattgaatcatggggatggagaacaaagccaagccaatatcttgactttagctcagcgagactgagtttgaactcctgatctccagaactgtaagataataacttgcatcgttttaagccactcactttgtgataattaattatagcagccttaggaaaccagcacgggggtgaggctgcaccctgcccaggaagccagagacgaccagctacgcagggactttagctcgaacctgattaggtcagtggacaccgcccccatccccaggacggggaggtggctggggccactgcagccacagcatgtgtctgctcacatggggcttatttttaaagggattgtcctcacctgctgctgtctgtgtttataaagttggctagagaggagaaatcttcctttgccagttttcagctttagctctgatatttgcctggaacatagtaggtgctcaataaacaatatctctggatattgttagtaatatgtgaccctatttgaagaactcagaaggggcactgggcaagtctacaagagatggcaattctgtaattcctgtgtggtattttctgaattctgcacattttaacctaggctatgagacagtgtgactttcttcaacaaattagttaattcttcaaattaactccaatttcaacagcatggtgatgttaaaggcattggaaattcagccacagatgttaaagaccatcagcacggtcacatagtaagatgctactttcaagccacgaataacccaaccagttattggtcttatgaaatcttgtaagccatcccagagagactaatttaatttttatgattcagaatttgcaggctgtaactggtcagtccatgcgaactctggtggctgcattcagccctgacatgtttcacctgactttgatataaggagctactggaaccttcctacgagttctaaaacctttccctcctcctcctgttctggaaaagcaattaagacccaaactaggcatgaaataaaagtctcttaaattgatttagaattatttttaaaaagtaccctcacagaagtggaaaattttgccaataggtaggtgtaaaaggaagttttttgtttttctaagagacacagatttcctctcatattgtactctcataaaagaaaaaaaaaaggtggtcatttacttactcaggcagaaaatgaaggcgttcacaactgtagttgggttttctgatagtgagagctgcttttggaggagttttctcttctgggaagtgctgtggagatgtggttgctttaaattatataacctccgctccagtgatgtcattgtggggattgccgcaaaagtgagtctttcgggactcactccaagtggatttggaaggaaaaatccactctcatttcactttgcactttagggatgataagagattattcagctaccatctccccctttactttggtaccatctgcagaggtctgcaatcctgcccaagacctgtatgttggcaaacacgccctaaaaacatgttttgacatcgccaacttgccccaaggctcgcaaagtgtcagtgaacattgagggatggcttttggccccttcactattggcttctgaatgtctggggctctgcagcagcttttgtgggagccacttcgaatggcctcttttgaattttggtcatgaaagatacatcgccaagaatccatcagagtggacccatcacacaaacagagagctaggaaaacgtttgactcatgcaatgttcagagttgagtaagaccagatacattttttcctaatcctccttggcgtctctcaaattatgtctgcatgggtcaagttgaactactcaagacctcatgtttcagacagtaagatatttttggctttgagaatcaggtgacaagattctccaactgaaggccccttacctgtcaacttacaaattaagatctttccaggccaccccctacacgtaggagaactcattcatgccagaattcaggacttcgagtctgacttctggaaaggtgaccctccaaatgtttggagcagaaggtgtcacctctgtctttagaatcttgccttttgcttgtgttccctttttctgctagtgacatctcagcgggagccaactgcacttcaagttttcctgctgtcttctcctgttgctgaagaccttaaaactgtggaagtaggtggaacaaatagcattctgaggctcagtagcggatgtacatttcagggaagaagctggaatttgccttagaggataggatggtcccctcctatcaggagagacctcctgggtgggatttttaataaaaaaaaattgtcaacaggcaagcatcttccattactcccgggatagatctgaaccggaggaaggctccaaatcttagcctttcctgttacttagtaatgtaggcgggggtctctccagcccgtggctggcttattctcccttcagtatgagtttagactatactgtttctgagaagcgtttgttcttaggagatgtctccctgtttattcacccaggagtgcgtataaggccagctctgccacaaagagcacgtgcaggtctcatctctgctttgcctcttgctggaagacagtctgtgaagagagctggcctgagtgagctggacttcggagatgcatctggctgccttgccaaggtggtggagggcggaaaggaaagttctttaagaagacccacgtttccccttgttgctcatctccacgggaaatgcgagacaggcccgggctcaggggagcagagggtctcctactgtctctggggccaagggagtggggctgagggcagggggaggggaccccaaatctgtgaaagaaaagcaggtccctatagtgtggcagaagatagcaggggactaagaagtgggtaggcactgaggaccctcttctgaggcttcgcttgccttttttcttttttttttgagactgagtttcgctcttgttgctcaggctggagtgcaatggagcgatctcggctcactgcaaccttcgcctcctgggttcaagcgattctcctgcctcagcctcccgagtagctgggattacaggcacacaccaccacacccagctaattttgtatttttagtagagacggggtttctccatgttggttaggctggtctcaaactcccgacctcaggtgatccacccaccttggcctcccaaagtgctgggattacaggcgtgagacaccgtgcccggccaatgcttgccttttctgaatttagttg

SEQ ID NO: 1241148 - DNA, 4001 bp, Homo sapiens
aaacaggctatgacactgggcaaatctgcagggctccccccaccgcgcccaggtgggcccctccctgaccacaagcagcacaggtgaggaggccgccctaatgttacctctggagccaccaaacttgttactgagccagtcactgtgttagcaaaaaccacgtggcacagctattcggttggtgcaaaagtcattgcggtttttggcattacttctaatggcaagaaccgagatgacttttgcaccaacctaatatttccaggttgggtcccaccggcaggcaaataccactttcaaagtcctcagatccatcatgcaggcccaaccatgggaacctccccgtttgcaagggagggaatcccaaagagattgaggcatttccctggacactgagcgaagggctggctgaggtcatgttccccctctgagactcagtttcctcatcagtgcagtgagaggcttggagtgcagggttgcagggagagctgggatgaggcctggggtgctgcctgtggggacagcacgcatgcttcctctttttcatccaaagacgccttctcttggctgtcccctgctctcaccccaagcaggggaaacagcaaatgcttcctccaagcttgtggggctcacaactgtggaatgtctcttgctgctgccagggcccgaaggacgcagcacagttttttctccagagaacctcgggcagggcctctttgcaatgtcctctggggttgcttacctgttcccccaccacctaagcccttctccaactcagaaatggaattaggggcggggttggccagggaggcccccatcaccccacacccaggccagggctcccacttcctgtaggctggggagccacaggcggcctgtgactcagtgaggcacattctgacctgcctggaacagcaacacctgctgttcacctccacccaggctgcggaaacgacctactctcagcaactcgaatcacggctgccatttatttagtgcctatgacatacgtggtgcttcacaggcaagagcctacctctatctttgcataaagaggaacttccaggtcttctttatagctcaggagacaggacaaaataactcgcccaaaaacgtcacccacagggtgagagcagggctggagctgcaacctgggccggatgcaaagccggtgcttggaacccctgcaccatcctatccccctgccctggtcagccaggaccgtgggaagagggtctctaagcccatctgaggtagtcactaccacctgcctcctggaggcgcatcagccaacattcacaaacccccccacccccgcctgcttctgatttaaccctgccacccccagggagccagcgagctggctgctttgcagacagagaaactgaggctcagagaggttgaatagcttgtccagggtcacacagggccaaggagtggcacagctgtgggtgaaaagccaggttctggagcctccacccagcacccgtccctgctgcaccacacacacctcgctgccttactccaaggtgtccactcaaagtatgtgaaaatccaatcacgaaatccctcacacactggacacacacaagcctgtctgtcaccttgattcagagaagagaaacctacaacagacaaacagggcgattcctcctgctgggaacccttctccccatcgcctgtcagacctcccctccggaaggaagggaacttttcccaactccccacgaccacagggaaacttctccccgctgcctgccctccctccctccctctgtgctgggacagtttgtcctcccagcagaggtgaggcggctggagcagcccctgcccggcacccaccttctccggagcaagcggcatgggcacttcagtcgctccctggtactgcggggcagcctgatgtccccaccgtccccaccgtccccacccctcctcggagcccagaagccagagctggagtggcggcgggaacagctcatctttcaagggctgggtagtgatgtcatcagcctcctgggcacttccccctccgcctccagctgagctctgcactcctgcccagctggagccaggctggctgtggggccgggaaggctgcggccaccttcgctctccgctctgccaccctctgagccctgggggccagggaggctcttggaagatttccatgtttgcgtagcccggctgcccgttggagtcgtgggacggcaaaaacgtccctcccggctgaccacaaagtggcctgggaagccccatgtgaataaatttgcctcgcgtaacatttatttcttatcattatttatcttcttgaggtggttattttgtgtctgagttttggatgtaaacagtgggcgtttacgcggaaggtgtaaacagagggtggccaggtgggcaggcggagtcctgggatttctttgtatgccacgtacggctcccaagggcgacagtggcagaagctgtcctgtttcctgggtacgggtgtttgcgctcccctgagacacgcggccgtttcttcggagatgtatggcggaggtttctcccatgtcaaggctcaggctggctttctcagttttgctcaaagacttactaactatctgcagcactttacactcccagggctgagacggtaggagctggaaagggcagggactttcaaaacatttttttttgaagccttaaaacccttccttcagaagagaacagataagagtgggcccagtggatctggggaagagacaggagggccagaggacgtccccccagcccatcagctcctcttccctgtgacttgattcataacaagcctacaaaccagcaatcaagcctgatcccatcatcatggagacagggaaacagagtctcagatcagtttatgggtggcctgggcgctagccctggcttggctgtgaactggctgtaggctcttgagtgaaggccctccctggcctggctgtgtggttgactcatctgtgcacctggctgttcaaccacattggggctccttaatctggagtttcctgacttgccagttggggacagaggtctatggacaggctgcccagagtccacaagccctctgaaaaggtgtgtctgtgctttatcccctatggagcctcatctatagctttcactaaaatattgaagagctctgagatccacaacatattgagacctgcatgagcgtccagagaccctctgaagtctcttccaacttagatattgtagagctctgtatctatgagttgaaaatcctcaaggatctgaatccaatgttgatgcttctgtaaatatcattgacagaaatctctaaaagacatctgtccatctgcacacatctccatccatctctgtcatatagttttttaaaaaggctactttaaaccagttttgaggtcctggctggaggccagccagttcatgagcagctgattaagttcacattctggccctttctcttaccaggttctcacactctgggccactagccacctgccctgatggccttggagccaggtaccaaacaataatggacagctcccatcatctggaactcacaaacttatttaagttagccaatccatagggagccaaggaaacctcgttaacaccaccctacgtgccacacatagctgccgcctatagctccagcttgcttggaccctgtccccagttgcacatcctgtgtggcccagcctgacagcctctcatttggagctgtaagaaacaaaagttctacctttcatttatctgagtgtcactgtgttgtgtcctgccatcaaaagaatattttaatcttataaaacaattacacactcttccattcatctacactggtatctacccacacatccgcccacctgcctatccacctatccaaccattcatttacttattcgcctgtctgtctgtccatccgtctatccatccaaccatccatccatccatccatctgtccgtccatccgtccatccatccatccgtctgtctgtccatccatcagt

SEQ ID NO: 1241149 - DNA, 4001 bp, Homo sapiens
ctaattgggtgagagggagaggagggcaggacccctccccagttctaggagtccttgccccacgccacccctggcaactccagaaaggccacatggcccgatgcagcccaggagcccaggccctggccactgcctccagcctttatggcttagcccagggaagcctcagcccgcctgggacagcaacgctgacgccatcagcagctcaggcagcagatccgcccacctggcacacctgcctacctgtgcacccagccgggcggggtcatgcctctgtcctcagtgcctggcacacaggaataggtgccggagagccttggccgggcacagggaaggagggaaagagaaagagaaccaccgcagggaacccccaggctggcctcagggcaccccatgaatgctaagtttttcctcaagtctcagctgagttaagcagtgtttcctcccccccacaggcggtacaacccaggtggtgaaatgacagccaatgtggggcaccagggaagggccctggcctgggccagagcctgagtttgggcctgaggtcatctgtgtgaccacagccagggctgtcgctctttgggcctcaccgcccccacctggaccttggccacgacaaggtgggcctggctgatgggtatcaggtatttggggtctgagattgaaccacctcagagactggacccctcctcccagcacaagacatgttggtcctgtccctgtgggacccacagtgggggctgcacatcagctccatggcccaggagatggccctgctctgagagtccaccctgggtctctgtgtgagcccacctgcccccaggctcccacctgggtgtttccaagccactcacccacggcactaagggtcagctggcagagcccagggcccctctgccctagacctgggcccaggctgggctctgctccttgggggagggatgctcctctacccggcctcctccccaggatgccaattctggcctcgggagggagtggcgaggacggagaccctgtgggccaggggagacagtgctgaaacccagcagccagagctgggcctgccgcccacacaacgcctcggctcaggctccggaaggaaaacacgggaggggtgttcccaaagtaggggtcagggtgccaggggaagtcgtggaggaagtggcaaatattcaaactggctgatcccaggcctgccgcgcaggtggtcccgtgaagtctaccaaggcttaaagtttggcaccgggagggaggccgcgggggacactccccagaagctgtcgcgggattcccccaaaatggctccaagacgcggctgcctggtccagccgcgaggactccatcccccacccccgccccccagaggcggacacttaaaagctcagagccaggcaactggcagcccgggggctggggcgggtggtggttgggggtggggtggggtcgggggagagagcgccggggcagtgcggaacggcacgaacggaacccggagggtccccggggaccagcgagagtccagggcagggagccagaggggcgctgaggaccgcacaggaccaggcggccccgggtagggggcagcccggccctcagtggcgctagccccagcccccgccgcagcggcccgggccggcggaggagccccgcgcgaggctccccagcgcctcgcggcgcgcacacacgcaccacacacacgcacctggcccgcagccccgccgaggccgcccgcgggccctgggggatgcgctcgggtggagcccccttcccccgccttccccagcgccctcacccccgacccggcccccgcgagccgcggcacgggagacgctccactcacctgagtttctccatgtctgcggcagaggcctgcgagaaaccaaacgagagggtcagcaggcaggaggcgtgcgctccgcggccgcgccgggcagagccgggcacagcgggcacggccgggcaaccccgcggggccccgtccgtgggaagcccggcgccgcgcgtccccagcttccagtcccggccgcggcccccgtgactcagtgggcgcgccgggccgcggccgagtaacaggtgagcccgcccgggccgccgcgctccccgcaccgagttacgccccccggggcgaagaaggggccggcccgggatggcccggccaggggcgatctcggcctcgcccggaggagggggactcggcctgtccccgttaactctccggcggccgcggccccgctgctccccccgccccgcccgttaacccttcctgccccgcgctccctcccggaggaagccgaaccccggaatcgcagaacctccgagtcggagaatgttggggaattcggggccgtgcaggattgcagaacctgacactcacacaatccgagggcgatggcatttggagcctcgactcctcaatcagggacccgctgccctcagattctggggttttgggcctggcttgcccctcccgggccccagggattaacccgtgagcgcccggctcgccggcggggctccctgccttgcttgcgcagacccgcccgcgcgcggcttggagaccctccctgcccagccccgctcagccgggcagcccctccgcgcgccgggcagggggacccacccgccgccgttaaccttgtgggcgcgggcgagcgacggggaccgcgagcggcccgggcgggatcgcacttcctgcgtggagctgggggcgccgggcgggctctctatcacccgggagaggccgctccccggggctttgcccgtctttctgtgccgtgactggcactcaagggggacaggggtccgagctcagggaccacgcgacagacctgggaagactgatgactgcccatcccggcccctcgcgccgggcgccgccgccgcgtccgccgggagcgcgctccgctcgggtccgggccccacgccgcctcccccaccgccccgccgggcgagggcgcagcccggccgcagcgccaagctagaaggcccggccccggggcctcggccaggctcggccaccaacttcccgggtgctcgggccggccttccggcgctctcccggcctcagtttcctcacctgaaagctggggggaagggggaggcagctggacgaggcgctccactgcccttccgcacccgcgggctgcggatcggctggggtgggggaaggaatttcaggggaagggatccctaaggcgcccggatggcggttcccctccccagacgctctaaaagttgtccaagaccacaagcctggacccctccataaaccctcctcctgcaagacaaggagtttgccgggaagactttgccgccggccagcgcgacccccacaccgctctcttccccaggcccacctttccgggtccccatgacagcgcttctcatgctaggtcccagcatacagcaggcgctcaataaacacggacagtgcatgcctggatcctacggcactggagcctgtctttcctggccctttcccctcctggctgtgagctcccgggcaggagccctgtgttctcaccaggacacccccagcacccagcaggcttggcctgcgctgagccagcgcagggtgggaggagccgtccactcagagggtcagacctgaaccaggatcaaaccaaacccaagaaatccaagtgttcctccatccacggacacccactcgttcactagctctgggctaagttctccagcagagaggggacagcagacaaagcagagaggggacagcagaggaagcaagctctgctctccaggggctaatgaggaaaaccccctccgcccccctccggtcctgggaggccaccctcagcagaatggccacggtagtcataacaataacgtccaccgccccttacacatcatagcgcttcccacggctcctcaccacagctctgccatggaagccccggaccccctatgcgggagcaaagctccaacagagaagaggcttgctggagatcccgcagctgaaggggcccagctgcgcctggacc

SEQ ID NO: 1241150 - DNA, 4001 bp, Homo sapiens
ccgcccgcgggccctgggggatgcgctcgggtggagcccccttcccccgccttccccagcgccctcacccccgacccggcccccgcgagccgcggcacgggagacgctccactcacctgagtttctccatgtctgcggcagaggcctgcgagaaaccaaacgagagggtcagcaggcaggaggcgtgcgctccgcggccgcgccgggcagagccgggcacagcgggcacggccgggcaaccccgcggggccccgtccgtgggaagcccggcgccgcgcgtccccagcttccagtcccggccgcggcccccgtgactcagtgggcgcgccgggccgcggccgagtaacaggtgagcccgcccgggccgccgcgctccccgcaccgagttacgccccccggggcgaagaaggggccggcccgggatggcccggccaggggcgatctcggcctcgcccggaggagggggactcggcctgtccccgttaactctccggcggccgcggccccgctgctccccccgccccgcccgttaacccttcctgccccgcgctccctcccggaggaagccgaaccccggaatcgcagaacctccgagtcggagaatgttggggaattcggggccgtgcaggattgcagaacctgacactcacacaatccgagggcgatggcatttggagcctcgactcctcaatcagggacccgctgccctcagattctggggttttgggcctggcttgcccctcccgggccccagggattaacccgtgagcgcccggctcgccggcggggctccctgccttgcttgcgcagacccgcccgcgcgcggcttggagaccctccctgcccagccccgctcagccgggcagcccctccgcgcgccgggcagggggacccacccgccgccgttaaccttgtgggcgcgggcgagcgacggggaccgcgagcggcccgggcgggatcgcacttcctgcgtggagctgggggcgccgggcgggctctctatcacccgggagaggccgctccccggggctttgcccgtctttctgtgccgtgactggcactcaagggggacaggggtccgagctcagggaccacgcgacagacctgggaagactgatgactgcccatcccggcccctcgcgccgggcgccgccgccgcgtccgccgggagcgcgctccgctcgggtccgggccccacgccgcctcccccaccgccccgccgggcgagggcgcagcccggccgcagcgccaagctagaaggcccggccccggggcctcggccaggctcggccaccaacttcccgggtgctcgggccggccttccggcgctctcccggcctcagtttcctcacctgaaagctggggggaagggggaggcagctggacgaggcgctccactgcccttccgcacccgcgggctgcggatcggctggggtgggggaaggaatttcaggggaagggatccctaaggcgcccggatggcggttcccctccccagacgctctaaaagttgtccaagaccacaagcctggacccctccataaaccctcctcctgcaagacaaggagtttgccgggaagactttgccgccggccagcgcgacccccacaccgctctcttccccaggcccacctttccgggtccccatgacagcgcttctcatgctaggtcccagcatacagcaggcgctcaataaacacggacagtgcatgcctggatcctacggcactggagcctgtctttcctggccctttcccctcctggctgtgagctcccgggcaggagccctgtgttctcaccaggacacccccagcacccagcaggcttggcctgcgctgagccagcgcagggtgggaggagccgtccactcagagggtcagacctgaaccaggatcaaaccaaacccaagaaatccaagtgttcctccatccacggacacccactcgttcactagctctgggctaagttctccagcagagaggggacagcagacaaagcagagaggggacagcagaggaagcaagctctgctctccaggggctaatgaggaaaaccccctccgcccccctccggtcctgggaggccaccctcagcagaatggccacggtagtcataacaataacgtccaccgccccttacacatcatagcgcttcccacggctcctcaccacagctctgccatggaagccccggaccccctatgcgggagcaaagctccaacagagaagaggcttgctggagatcccgcagctgaaggggcccagctgcgcctggaccccactgctcaggagcctttcccacccaaaggctgtctctggttgccaacctcaatcactcacggcgaatgacctgccagggagtttgtctaaaattaataagaatgtattaaaatttaattttaaaaatctagcattaattatttacattgaatgtttcagcccttctaaaaggcctggatgggaattccccccacccccagaagggaactggggggaaaggcaggggaggttgctgagctgccctggtggagcagtgggggctgggcagggcaagagacaggcagggaacaggcagcccctgcccttcaagcctattctagagcctgaagcctggctttgatgctgctgtagctcaaatcctcctctgacccattgccttcggggcaaccactgccctcccccttggaggctgtatcctccatgcggccctctgtgggaactctggggagtcactgagtttacccccacaccagatgggacaggactctgtgtcccagctctgtgtccctggaccagcccagcacctggcaggggcggggggactaaaagatgggttgtgcctgatgctctccatgcaggagtgacacaggcatctttatgggtggctagggagaagatagcagggaagctcccctggccgaggtgctacgccctcggggacagtctcccatgaggctcctgcacgggcccagcaccccgggtgcaagttttgattcagccattcattgaccacaagactcggtgattttcgtgagacccttactacgggtgaggaaacggaggccagcgcatgaagtggcttgctcaagtcccctgaggttagccgaggcctgcctgatgggctggagaaccgcggcgctgcctgggtcttgggccagtgggtgggggccatgaggatgaggagtctgtggggtgccccagggttcccactgtgaagtgagggggcgggatctcccttagggaggctgggaccccagggtgcacactgggtgccctcgggggacagtcctcatggcacagtccttccccgcctctgggcgctgtccagccccattcacacccgctgcctcttcctccaacacacctctccccaccgtctgccttaagtccctacctctttctggtggtccagcccagcagccacctttatcttctgacccctcacaggagccctgcctgttggccactagcccctgctctctcctcactcccacctgtggccatctgggtcctgatgacgtgcccatccctgcatgggctgaggcctgtggagctcccagctgcctccctcccacctactacttccttttcttactagcgatgggagggccgcccgggtcagaaacatgcccgtccaccctttcctctgctgctgtgtccccagggtggccttgggcccggtcacagaaatcagttccattgaagtgtcacagcagctttgctgggtgggtctcatcagctgtgcatttgcagtttataggcaagagcttggagatttggggccagggaccttgctatcttccctgtggcacccgggcacagagactggcacacagtagggcctccccagacaaggtggagggggtgactctgtgccacctgtcaggcctccatgaggggttggtaaatactgacctggccctgccaaatcatccgacccccatgcccagcagcctcccctcgctaggcacacactggccacactggctgccttgctggctc

SEQ ID NO: 1241151 - DNA, 4001 bp, Homo sapiens
ccagttgctgctttgggtcgctccggagctcaagaactcgggttgcctgccgccccactctccacgcacatacttggttttcttcttaggggcattggcaggtagactttgaggaagaaaagtaaaggatcgaacagctcagccctccctcccgaccgtggatgcccggagtcgaccaacacctcaggtccgggtgcggaggccgcgggcgcccctgcgcgaccgtccgcgcccggcaagagccgcgcggctttcgcctttgctggtcccgcgccaccgctggggcgggctgcgaaagggttgggaagagcaaagggtttttttgttttgttttgagacgcagaagccctttaaaaagcccggcgaggagaggtccagaagtagagaaagcagacggaggcaagctgtgcccgcggggcaaagggacagtagaaggggcgggcgcccgggttccccggaaaaccctcggccccaaggaatctcctggggcgggagagcgcggttctaaaaccgagaggataggaaggggaagggggagttgtgtttcaatttcggattcaccaggattcatctctagtcacatttttcttctcaaatttttaaatcgaaaagataaaagccaaaagaactttcatccccagagctttttattgggggaaaggaatgtaactcggggtggttgtccttcacttccctactcgaatcttctcctaatgccgaaatgtgtttacaggtagcctcagtttaccaagtatgtatcttttgggggtttaacctctcacaaagccttcaactcacaaaccgcgatccttggaaaccatcctccaaagcagtgcttggaggcctctaaggcccccggaccaactcccgctggaagaagcctgcagggactcgggaatcacgggaacctttcccgtcggttccgggcctggagggccaggaagagccgcgcgtccgcctttcgtcccgccaggaactccccataggacacgacaccgcaggaacaagcgtcctgggagcccctgggatcttggctgtcgtctctagggaccctacaccgtgaaatgatagaggcgaggttccttgggttccgcaagtcgacgaaaatagctcgtggagaaggcgcgtcctgcaactgcagttcgcaagctctcagggcgccccgccagctgggggccagattgggtgacactcccctcgacgcagcctccggagcggcgcgcactctccagaggccagcaggactgcgctctctaccgcagaacctgctccagctaggtgttctctccccatctcgccgtcgctctgccccctcactctctctggacctcagagccggttctctccttcctcctcccgcgctttccgtccggggatcgcaacctccagcccgtgggcaacgcgttcagcccaagaccccacagtttttcccaacgacccccctaccaagggcttctcttgtttctgctctcctgccccgcacttcccaaaggtgagaatctcccagggactgctggacagagaaggcctgggcaggggcagtagccgatatttaaaggtctttcagcgccagcatccccacctccagcaccactattggaaaataattaggccaccttttgcctcggtcacagcctgtgaccagcttcttccccccaaggaggctcctagaccccctctgcctgtctcccctcaccaggtagccttgctcaccataggtccctgcagtagcgggctcgccagcagcagctcctggggacctctgaacggttgcagtgaacctgggcgagggccggggactgtggcgctgcaggctcgagatagcttggacgggaatcccatcggggagacaagctagatactcagccggagcagcagcggcgtctcaggctcgcgtccctcagctcggatgccacactcacctagcttccgggccgggctccgcgctccttccctccctccctcctcctctgccttctcgcatcttccttcctcctctttccctccctcgctttctttctttccttcctcctcctcttccccggcggcccctccctccttccctcctccctcgctcgcctccctttctggggatgggagccccgcccacatcctcccctccagccgcccgacctcgcctagcaggcccgggtcccggaagcccaggcagcgcccgagtccgcagctgccgtcggagctgggacgccgctgcctccagctctgggaagcggctggggctcacctggggaccacgtgcggaggtactagaaagcatgcaccgactagtcgccgtaccttccaaaaatacccatgggagtctgggcttccctgagtttagtgtaactgctgcccaaactgatgattaaaacactgagtaatcaccatttaccctgagtaattagagataatgaaacacctctaaaatcaggttatggagaaaggagctgttggatcggtttaaaaggtggccttccataaactgttaaaagatttccaaacgttgagaaacaggctgtgtgcagaactgtgtgccagagagagatacctcttgggctgttaaaaggtgaatttccttccaaaacattcttaaagtgcgttttgtagaacaccttggtgatgaccctgaggtagaccccagtaaatgagctcacttccctcctccccccaaggcctaaagacagaggtggcctgcagacaggctggggccacgttttttacagttagaaaaatctgtttctagctcagaagccgtcttaagaaccgacacagcagttatttttgttggtgttatggttgttgttgatttttttgttcatttttggtgtacctaagagtcctgacactctgtctttccaaggagataaccacagaagcagtaaccttttaggccacagggagacaagaaaagatgccccttggtctgtttttaaaggaagaggggagatgaggaattggccctttcatataaaaacattttagtaatcatattagcagggaggtggaatgtggtggcttttaaaccttcccaaacaggaactaatttcacacactgcctctgatggagctgtgagggagctatcagcctcatctctctgttttacaaacaaggaaaggcaggactaccaggttaaagggacttgcccagatctctgaagtaaatcacagcctctgctccagagctaatgcttcagggaggggttgaggctcatagcctgagctccaggtagccagaggagtgctggaagactgagcatttcctgtcctggatttctttccctgggacagacatgacactttactgtctctgcaaagcatttaggtctttacttaaacagatattggccctgggtggctcatctataaaaactttacgtttatacaccttcgatatttaaaaaacaagaactacttcctgtgtggaacacagattacaaagggtgggaaatatctgagatcagagaagcaactgtcagagcaaggccaagacatcctgccatcttttccatctattaggcctaggtcttttggcctaatgcaccaaacaacagaaacaagctgtatggctttgggcaagtcttttcattcctatgagtctcagttttctcatctgcagaatgaaaggattgggccagatcatctgcatgctccctttatatttgaaaatgatttgattatttaattgtaattttagccaaagtccgtcttccttcattttaagtcactcctgagttcactttctctaagaaccactgattaaaacagggcagggcaataacaccaccccaaaaggaggacaaaatatacctgtagcttccaaatagtcaaaatcacaattaattattaaaaataataacagaaaattaaaactccattaaatagttacctaatgtttctcctgcagcatcaggcattgtgctcctttagcatggtacctgaagtcaggacagattaaatgctcactgagcccctaaatcaatcactgttgttttaatcattaacga

SEQ ID NO: 1241152 - DNA, 4001 bp, Homo sapiens
cttcttgaaggataaacagttaacattgagggggtgaaaaggggtgggggagggagaattaaaatggcattgctctccactttagaccttcagcttctctcccttttcctccaccctcagagcccaactttcacaacttccagttggttcagagccagagggagggaaagtgagaggcaggggctgggcgaagacagagggcgacagggtccagaagccgagaaggtggtctgggagctaaccgggtggcttgagggcttattttattgtggccgatgagtttgaaatattcagccaaaagtgcctgatcgtgcccgctcatccccagggaaggggtgagagacgattccggagagacctctgtgagttttgacaagagagtgggaacgcgccacggagacactgggggctctcccagacaagttggataggggaagggagtggttagccctcaaggtacaaccccgggctttcatctctttagctccctcgcgctcccctttcttgcaacgctgagagggcgagtgcgcgctagcagcactttaaaaggaacccgtacgcttccagcgccccggctgccgggccaagaagggagcgacagtgctgccagggagcagagtgtggatattgtaaaggaggtccgacggaagggacagccggcgagcaggggtggtgagggcagagtgaattccggggagggggaaggaagaggtgtctactcactgacagaaaacaaggcatataataacagtccatgattcttgacagccaatcttgaacaaacttgctggaaaggctcagggaagctgcagcagtgcgttgctcgggatggcactacggaatggctcctaaaaggaatatttgaatataatgagactccaccgcagacaggctctgtttttcttccagcccctcggagtcacgtgagcgccgaggcccctcccgcggcaggcggcgaaagggcttgcgcgccctcccctcctccacagccccccgcccctcgcgggcccgcccctccaggcgaggccaacctccgcgcccgccgcccgagcctcagcggtccgggaggagctcccggcggcgctcggcagagccctcggccggtgccccgcggccgccgcgctcccagggctactggcgcagcgcacggagaacccggttctcggcgcggtgcgtcgtgctgggcccccgcgccgggccacctgaagccagaggatttggggcgcactgaagggactgcgtctcccagctcgaacccggcttaagtggggccgggagcgaggtcgggaaagtctcacccgcccaaagcctcaccaccgagaggcacttaaaaaggaaagcgcagagggaccctgcccacgcgcgtgtacacacacacccccccacacacacacaagcaaacacgagctccccgccacttcctccccagggtctcctcaaggccaaatattgctcccaatgacagccagtcaccccttggcgaacgcctgctaaggctccgaagagccgggccaccgatctagctcccggctgaaagcagccgaccttgtcacgcgcggggccgggaatgggagggagggtgttagagggtgatcgctgtgggaaagtgagagggagcggctgttagtcattgctccgggtccattaccgagaatccccaaacctagtccgccgctgcgtggcccctctccccatgcaaagcagacccccgaagaagccatgccaggctgagggacagacgccggggctcgaagctccgggcagattcagaaagaggcgtcgctgcagaaaggacgcatcacagttttcagatcttaatgtggccgaggttttacaactcccgacccggcgcagaaaggaaatcccaccatgttccccggagtcgagaaaacggtgaacagctttcggcctgcgctcgacctctgcgtctgcgtctctctcgcctcggcttcccttattttttaaaccaccaccacactccttcccccgccacttccttcccccacccccttcctccgttgcaccagcagcagagtcgcacgcagcaaatactccttcaagaattttacctacctacagttcaagcagttactgggatgtcctgactaatcgaagatgctgccgcgcgcgtgggtcgctctgcgcaagggcctcttcgaaaacccgactaggcgcaactcagcgttcagcagggccgggagcgccaggtcgtccccggggcccgggccccatgactcctgccccaaagcccactccacccgacctccctttcctgaggctgttcccagttgctgctttgggtcgctccggagctcaagaactcgggttgcctgccgccccactctccacgcacatacttggttttcttcttaggggcattggcaggtagactttgaggaagaaaagtaaaggatcgaacagctcagccctccctcccgaccgtggatgcccggagtcgaccaacacctcaggtccgggtgcggaggccgcgggcgcccctgcgcgaccgtccgcgcccggcaagagccgcgcggctttcgcctttgctggtcccgcgccaccgctggggcgggctgcgaaagggttgggaagagcaaagggtttttttgttttgttttgagacgcagaagccctttaaaaagcccggcgaggagaggtccagaagtagagaaagcagacggaggcaagctgtgcccgcggggcaaagggacagtagaaggggcgggcgcccgggttccccggaaaaccctcggccccaaggaatctcctggggcgggagagcgcggttctaaaaccgagaggataggaaggggaagggggagttgtgtttcaatttcggattcaccaggattcatctctagtcacatttttcttctcaaatttttaaatcgaaaagataaaagccaaaagaactttcatccccagagctttttattgggggaaaggaatgtaactcggggtggttgtccttcacttccctactcgaatcttctcctaatgccgaaatgtgtttacaggtagcctcagtttaccaagtatgtatcttttgggggtttaacctctcacaaagccttcaactcacaaaccgcgatccttggaaaccatcctccaaagcagtgcttggaggcctctaaggcccccggaccaactcccgctggaagaagcctgcagggactcgggaatcacgggaacctttcccgtcggttccgggcctggagggccaggaagagccgcgcgtccgcctttcgtcccgccaggaactccccataggacacgacaccgcaggaacaagcgtcctgggagcccctgggatcttggctgtcgtctctagggaccctacaccgtgaaatgatagaggcgaggttccttgggttccgcaagtcgacgaaaatagctcgtggagaaggcgcgtcctgcaactgcagttcgcaagctctcagggcgccccgccagctgggggccagattgggtgacactcccctcgacgcagcctccggagcggcgcgcactctccagaggccagcaggactgcgctctctaccgcagaacctgctccagctaggtgttctctccccatctcgccgtcgctctgccccctcactctctctggacctcagagccggttctctccttcctcctcccgcgctttccgtccggggatcgcaacctccagcccgtgggcaacgcgttcagcccaagaccccacagtttttcccaacgacccccctaccaagggcttctcttgtttctgctctcctgccccgcacttcccaaaggtgagaatctcccagggactgctggacagagaaggcctgggcaggggcagtagccgatatttaaaggtctttcagcgccagcatccccacctccagcaccactattggaaaataattaggccaccttttgcctcggtcacagcctgtgaccagcttcttccccccaaggaggctcctagaccccctctgcctgtctcccctcaccaggtagccttgctcaccata

SEQ ID NO: 1241153 - DNA, 4001 bp, Homo sapiens
gaagcagcggcatgagggcctttgcagaaggagctgacggggcactggggtggcaagccccgtgggccaggaaagaaaccagctccaggtcaatttgctcgggctggatttgtttcagtaaaactacttgtagacaagacacagggcgaagagaaaagcaactgtaaactaactgtgaaacaaggaaacagaagagaggccagaaaaccgtttcctaaatctcggcttggcatctggtgctggaccacagccgctgccaaacagatgggggaagcaccctccctgagccccagagcctacacgtcgggccccagcggctctagccattgcctcctctttgcttgggtccccaagttcactgttaaccccagggccaggagccagccttggccccagacatttgttctccattgtcctgagcacaacgctgaaaagcggcgctgaataaggatgctgggacgcaaagagggcgcccggggtcatctggagccctggaggctaagctcggcagcctggcgccccgagtggcttcgagtccccgcgaccgccgccaggcccggccacctccttgccacctccctgcgtcccggggaacccacgcaggggggcgcgagggaggggctcggggacgggcggggcccgcacagccgggccaacccagcgggggtcggcaggagacaaggggcggcgagggcaggggggcggggagactcggggcatggcggggtggaggcgggaaagtgtcgaggccggggaatccgcgcgtggggaggtgggcatcgccagggcgacgatgagctttccttagggggcggcgcctgaagctggccgggacccggtggacccccacgactctcccggcccttgcccgcggctcccggggggcggggcggggcgccccgggcggggtctgtgcgcaggcgcgtgagtgcgcgctctcgcgcaccggcgggcggggacgccccgtgaggcgccgccggaggaagcgcgcgcgcacctcacttccggcgcgcgctgcgccggcggcgattggacccgaggcggcgagctggcgccccgcccagccaatcggcggcgccggcgcgggtcggagggcgccgggcgcgcgcggggcggccgggggcgcgcggggcgcgggcggggcgccgggcggggcggggcggagcggccgcagctcgtcgccgcccgcgggcctgtccgacgccggggcccggcccgtcccctccgccgcccggcagccatgtgaccgcgccgccgccctccgcgcgcccggcccgcccgccgcgcgtccgcggcccggccgcagccccaggccgccgagggagcggcggggccggcgccatggccgagcgaggccgcctcggcctccccggcgcgcccggcgcgctcaacacgcccgtgcccatgaacctgttcgccacctgggaggtggacggctccagccccagctgcgtgcccaggtacgcgccgcccgccgcgctttgttcccgccgggcacctgctgggggtgtcctggccgcggcctctgcgcgccccatccccggcccgggtcccccagcggagcccaggtcgccccccgcgcccccgcccgccggttcgacgcgtgcagccgccgcccccccgcagctccggcaagcgcggccccagccccccaggtcccgagcaccgggggccgcgctcagcttccgaggacccggtgctgctcagacccggcgggaccttggggctcccgggcggcgctcacctggctcgccgcaaccgcacctgcacacctgcctcaatgcggtgccggccggggtgacgagggtgcttcctctctcgggtaccacacgcttcctttcgcgttcggcgacactgtcagacctcggcctgggagcgacccccggcgcacggggcgcgcaggactcggttgtatcctccgtccagcgcgcggtggagatgccctgtcctgcggggcggggtcgtcctcgcgggtacctggttggcgctgtctctcatttagaggcgtcgccaagccagtactgctatttgcgcctcccagttgatcttgccattgcggaagactggctgttctgcacttggtaggggggcgcccggtcgcccagcggtaacgattggacagggtttaccctccggccatagcccagccttccttggacttgcagcttccctgagtctcctgctcagtttgaaacttttgtaatttcttcgtgacttggtagttcctgctcaggaagctcccaggctaaggaggagagagacacgctctccggaaaagttctggttctagaatagacagcaggcgagaagaggaggcggttgggggtagtgagagttctccctggggagatgggagggtgagcggaccttccaggcactggaagtggccagtatgcctggaggggaccccacgtggcattgagttgttccacccctagtcagctgcaggtgggcctctccgtgctttcctgtggctcccacagcctgcatctctgagcgtggtgttggagttgcagagccgctggacagtggggcttgccctcctggagcgcagggttgggacctcggggctttggttttgctgagtggacaggaaggatgcccacccggcacgactcttgcacctggcggggcctcccgaaggacccagtgtccatatgagacctaagggtcagcatttgcccaaggtctggggccgagcactgcagatgtgcctgcttgcctctcttctgggaagtctctggggcctcaaagccaaagccaggagcatctccccaggcctggctgcttctccattccaggtcttggcgattgccccaatgtcaggtcccacagccccacagcccttctcctgtctgcccctctgagtcactgcctcacccacagccccagaaccttcatgcgggctgttggcgctcccctgctccagcactgcagcacatagcctgcccttgctgaacctctgcagcagcttcctggggccctccgaatgagcagcaaagtctttaacccaagggaggtgggggcgtgtggcaggaggggccgggggccttatcagcccccctgtggagctgtgctctattctccaggggtctagaaagcccactctggtgtctgtggggagggtatgggtagggcgggtttcgagaagcctggttaggacaggcgggggtagatgggggcacctgggctgggtagcactaagtgctggggggggtcccgagctctggcctggacagggttgggaggaagggtaggcaggaggacaggatttgttctgttggtgtggagttaatgggcggaggagttaatgggcggaggggcgagtggcgcagctgaccaggtgggcagatgcagtttgttcgtaggacatgctcagcctcataatgagctcctgcccttacctgtcctggaacagggcccctcataggcgggcttgcccctagctttgctttgtgcttgtgccgcctgtccgtgcatcctcggacagtctgctacttagttttgctttgttcctcctgagttcttctgtactcctcacttttgcccagccatgaagcttctgggctgcgtgtgtgctgatgcctttcggcgtgttcactgctgcgtactattcactggcgtgacagtacctcggctttgcttctgtcaagggaccttggcttgtttccagttttttggttaattacaagccccgtgctgctgtggacatcgtgtgccagtcttctgcgtgtgtctttctggatgggcagggcctgtcttaagcatgtaccgccagctaccaggatttatggtgggggtgtgcacgcactcagcgttactgctgggcagttttccagagtggttgtgcctgctccggcccccactgacagggacgagagtccccactgctccacatttgtgccaacactcatttgacttaatttttgccagtctggtgggtgtgaagtggtatcgtggttttaacttgaatttctctgattactaatttaggccatttg

SEQ ID NO: 1241154 - DNA, 4001 bp, Homo sapiens
accccgtctccactaaaaaatacaaaaaaaattagccgggcatggtagtgggctcctgtagtcccagctactcgggaggctgaggcaggagaatggcgtgagcctgggaggcagagcttgcagtgagccgagatcgagccactgcactccagcctgggcaacagagcaagactccatctcaaaagaaaaaaaacttctgctttgaaaatcacatatacaacaaagggcttgtaactacaatccacaaagaactcccaaaactcaacaataagaaaacaacccaaataaaaaatgagagtcagggtgtggtggctcacgctgtaatcccagcaattcgggaggccaaggctggagtatcacttgagcccaggagtttgagaccagcctgggcaacatagagaccttgtctctactaaaaataaaataaaataaatgatcacagcatggtggcatgcacctgtagtctcagctactcaggaggttgaggcaggagaattgcctgagcctaggagttcaaggctgcagagagccatgactgggccattgcacaccagcctgggccacagagtgagatcctgtctcgagataaataaaaaaataagacttgagcacacatttcaacaaagaggattcgggcatggcaaataagcaccctaataaggttgaacatcactagccagtagagaaatacagaataccactatgatgagatgccacacacctgttagaacaaccgaaataaaaacatcgacaacaccaagtgctggtgaagatgtggggcaactggtgagaatgcataatggcacagccacatcacaaaacagttcatgacagtttcccatagagttacacatacagctaagttccccagagaaatgaaaacgtatgttcacacagagagctgcaaatgaatccttttagcagctctattcacaaccacctgaaactggccacagtccagctccttccacaggctggggtccatccccagcccgcaatactgcccatcactgaaacgtcccctccgaggcctgcagcagcctgagtggccctagggcatccgcccggtaaccaccaaggccaagggcagcagcaatcggattctaagtaccagacattgctgaaaacaaaactgcaggcacagagagtgacagtgaggggcagcttgaggggccttctgggctccccaggctctcttcaaccctccctgtgctggctgccctggcccacgcgtgtgtcgaggaagtccacgcacgccacgggggtccacaggcgcgcgaagaaggtctacattctcgccaaggggatccacactcgcgcccagacggcgcagaaccgcgcgccccgacagagcgtgcggtaccgaggcgctggtcccggccgcgccgtcaccgcctccagcccgcctaagccgcaccgagaaatccgcgcagcgccagcccgcgggactcaccgtccagggacacgaactggcccacggccgaggagccgccgccgctgctctccacgaactgcacctcggacacgatgatgttgtcctccagcactgagccgcaggcggtgcacaccgcgtccccgcgcgccgcgtccagctcgatgtccgtgccgccgcaaccgcggcacacgcggcccgtcatgccggcgaccgcgcgggcagcgcccggagcctcccaagactctcaagccacccgagcctccggagcagcccgcgccgcccgcccaggcccagccgcccaggcctcgccgctctcgcgaggccccgctccagccgattcgcagccgcagattcgccgcgcgcgcccgggccgcgccgcccgcaacggccgcgcccgcgggatgggacaggcaccgggaccacggcggggacgcgaggactggagccgcgacctccccactgcgagcgagctggcctcccttgcggcgcgccggcgtcggaggggcgacctgcgggggctgggcttcggcggaacccgagcggggcctaccggtgagcgcagccgaggactggcgcttgggggcggggccacggcggtgagcgcagcccgggactggagtttggggcggggcctcgtcggtgggcgacaccggggactagagctaagggtggggcctcgcggtgagtgcagccggggacgggacccaaggctggcgacgggacccaaggctggcgacgcgacctaaggcagtgggcgggcccttggcgatgaacgcagtcggggactaaagctggacgcggggcagaggagggtcctcctcggatagtgagcgcggtctccagcggcgagcgaggcctggggtgaggactcagccggatgcggggctgagggtggggggcggggcctcccgtggagagacggcctgcgaagggaactggagctgtgggcgggggaagggggcggagcctgggtctggacccgaactgtgggcggggcttgaggcgagggggccgagcgtggtgggcggggccttggctcctgagggcgacctgggacccaaccccgggctctgggagtggtgggcggggccagggcagctgcgctggggggcctggccgcagaggtggagacacccgccaggggccaccctgccccgccctccgcatttgcggcgtccgccgctccgctcgcccaggttccagagcctccccgtgcgccccgctattctccgttttctgttcccctaaaattcccactttctagcagtcattcgtggccacctgtggttacccgtgagtcacctcgctgtgccccctgcccagagcgggaaccctggctgcgcacgccctcaaatatctgcaggtgctgttcacaatcgccatagggccggtgacatacccaggaatgagcctaaaaagaaatgcgtaaccaggcgtagtggctcacgcttgtaatcccagcactttgggaggccaaggcaggcggatcacgtaaggtgaggagttcgagaccagcctggccaacatggcgaaaccccgtctccactaaaaatacaaaaaaattagccaggcttggtggtgggcgcctgtaatcccagctactcgcgagtctgagacaggagaaccacttgaacctgagaggtggaggttgcagtgagctgagatcccgccattgcactccagcctgggtgacgggtgacaagagtgaaactctgtctcaaaaaaaaaaaagagaaaaaaggaaatgcggaagaccccaccctcttttttttctttcttttttttttttttttgagacggagtctctgctctgttgcccaggctggagtgcagtggtgagatatcggctcactgcaacctctgcctcctgggtttaagcgattctcctctctcagcctcccgagtagctgggattacaggtatgcaccaccacacctggctaattttgtatttttagtagagacggggtttctccatgttggtcaggccagtcttgaactcccgacctcaggtgatccgcccacttcagcctcccaaagtgctgggattacaggcatgagccaccgtgcatggccctatttcattaatttctgctctcatttttgttagatccttctttccacttaatttggttcaatgtgttccctttttctagtttcttcattttttaaaaattgagatagtgtctcattctgtcacccaaggtggagtgcagtagcataatcaagcctcactgcagactctacctcctgggctcaggtgatcctcccacctcagcctcccgagtagctggaactacaggcatgtgccaccacacccagataatattttttgtagagatgggtttttgcctcatttgcccaggctggtctggaactcctgggctcaagtgagccacccgccttgtcttcccaaagtgctgggattacaggcatgagccactgctccccgccctgtcctcccaaagtgctgggattacaggcatgagccactgctccccgccctttctctagttcttttttttttttgagatagagaacacccaggctggagttcagtggtgcca

SEQ ID NO: 1241155 - DNA, 4001 bp, Homo sapiens
tctgggccattgcatggtgtctgttcacgtcctttgcccgttttttaaaaaactgggttgtcagccttttccttcctgacttgtagttgctcctccatcctggagagtcctttgttgaaaataccgcaaatatcttctgaagaggactctcccagggaacattcactacaactgtaacgaccacagagacacagagctcctgttcactgtttagcccaggactgcggtgacaggtgcacccatgacccgagatgctggctgcgtcctgtggggtttcctgcatatggaagttttaaaagtctaaagcctggcggtccaggaggttgcgtgtgtgtcctcggggaggaaccctcctgacagccaggcctctggagcttcgtctgcacgcgagcttggcatgcaccagctgtgcggcccaggccaggtgacacggcctctgaagtctggtctcctcatcagcaaagccagtgccccatgccacgcacctcccaggattagccccaggccgggaggctagaggccccacaaggagcgagcctgcgactgcgatccacaggcagagccacagaggcagggcgcgccctggggcccaagctccagggctgcaggcccagggccagatcctgacttgcccacccgccggctgtgtgaccttcagcgcgcgactaacctctctgtgcctatttcctcgaggaaaatgccgggaaatagcagcgcctgcccctgtaaagccctcagagcagagtggaccgcgctctctgcaagcgctggctgctggcgtccgtagcaagctaaatcgcgaagcatctgaacgaacgaggaagcccaacgaccatcccacaggccgcggccagaggcagactccggaatgcaaatggccaaacaagcaggtccacctgcgttcctaaccaaaagatcgctaactgaagaacgggcgcaagcacctgcgcatggcactgcgggtctgggggcggccgcctgccagcgccgggagccgccttccacggctacctctgcacagcgcgcggctcgcgccggttgctgggcagaagctcgagcagcttcgaggatgtcgggcctgggggcggggccgcgaggcagcgacgtcgcgcggggcgcggccctgacgcagcgtgacgcaccggcgccgcggcgggtacgggctcgggcgggcgggcgggcgggacggcgccccccgcggccgggcctggccgggctgcgctaggctgggctcgggcagggtcgcaggggcgggggtggcaggggagcgggtggcagccccgcgggtcacagcgccgccgccgcccatgctgctgcccctagcctgcctgcacggccgcgtcgctcagtgcctgacctccttgcttttgcttgcagagccgctcccgaggccccggcgcggcgcgagggcgcggggcgcggcgtccacaggcgccgaggctgcccccgccgccccgcccgcgaagatggcggcggaactctacgctcccgccagcgccgcggccgcggacctagccaacagcaacgccggcgccgccgtgggcaggaaggccgggccgcgcagcccgcccagcgcccccgcgccagcgccgccgccgcccgcgcccgcgccgcccacactcggcaacaaccaccaggagagccccggctggcggtgctgccgccccacgctgcgcgagaggtgagcccgtgccccgcggcccccgcgcccgcgcgcgcccacgcccccagcccgtgcctctacctttgcaggaacgcgctcatgttcaacaacgagctcatggccgacgtgcacttcgtcgtggggcccccgggggcgaccaggacggtgcccgcccacaaggtgggtagcggcggcccctctcggaacgcgtgccccgtccgccccgtccgccgtgtggctgacacgcagcctgcgggagagccaggctcacggcggcgctttctcctcccagtacgtcttggctgtcggcagctccgtcttctatgccatgttctacggagacctggcggaagtcaaatctgaaattcacattccagacgtggagcccgcagcctttctgatcctcttaaagtaagtccactctactggggagggacgggtgggtccgttttaggcggcctccggaggcttctgaagggaagcacacaggagctgatggactcctctcccaggcccagccccgcgatgggtgcttgggagccagcccctgacgcgggccctgcctcgcctaggtacatgtacagtgatgagatcgatctggaagccgacacggtgctggccactctgtacgctgctaagaagtacatcgtcccagcattggcaaaagcctgtgtcaactttctggagacaagtttggaagccaagaacgcctgcgtcctgctgtcccagagccggctgtttgaggagcccgagctgacgcagcgctgctgggaggtcattgacgcacaggccgagatggccctacggtccgaaggcttctgtgagatagaccggcagacgctggagatcattgtcactcgggaggccctcaacaccaaagaggcggtggtcttcgaggccgtcctgaactgggccgaggcggagtgcaagaggcaggggctgccaatcaccccacgaaacaagaggcatgttctggggcgagccctctatctggtccgaattccaaccatgaccctagaggagtttgccaacggcgctgcccagtcagacatcctgactctggaggagacccacagcatcttcctgtggtacacggccaccaacaagccccgcctggactttcccctgaccaagaggaagggcctcgccccgcagaggtgccaccgattccagtcttctgcctaccgcagcaaccagtggcggtaccgcgggcgctgcgacagcatccagtttgcagtggacagaagggtatttattgcagggctgggcctgtatggctccagctctgggaaggctgagtacagcgtgaagattgagctcaagcggctcggggtggttctggctcagaacttgaccaagttcatgtcagacggatccagtaacaccttcccggtctggtttgaacacccggtccaggttgaacaagacaccttctacacggccagtgccgtcctggacggcagcgaactcagctactttgggcaggaggggatgacggaagtgcagtgtggaaaggtggccttccagttccagtgctcctcggacagcaccaacgggactggggtccagggtgggcagatccctgagctcattttctatgcctgaggtgcccggggaggctgcagcaggtcagcgagtgagtggaggggaagtcaagatgctaactgcttcttgacaccatgaaaggctgctcttaactttgtctctctttgacatgtagtcagctgaagcttgactgtgtagagacattttccacacagccagaacccagggattggagtcttaggcatctctggtacagtggggtgcacgtctcaggtggaggaagatttacggctcaagacaggccccagatcccctcccagtggcacccatgccacctgctttgaggggttggatcttcctgctaccctcttggattctaagtggttccaagcttaacttgagaccttcccttcaaatctaaaattggcaaaaagtcacttaaaatagtggacttctgtaataaaggttgcctaaaataacacccacgtgtcagtaaatgactacagcagttgtacagtggggtattctctttctcatgcaacagaacagctccctcccatcccgaggagaaaacctgtcatgctgaacatgctatgtggttaggagcaaactgcgccccagtgaagcccatctgtcccctgggttgctggctggcttctgggccaccctaggaaacaccaggtgcctggttgtctctatgtcctaatgcatcactagcacctcagagtcctaccctatgaacagactgtcgggggagcattctgctgggcccagcgttctggaccctggggac

SEQ ID NO: 1241156 - DNA, 4001 bp, Homo sapiens
aacagcaagggcaacgaaagtaaaaatagacaaatgggatgacctcaaactaaaaagtttctgcacagcaaaggaatctattaacagaaatgatatcctatagaatggaagagactatgtgcaaaccatctatctcataaggggttaacagcctgaatatacaaaaaactccaactcaggaacaaaatcgattaaaaatgggcaaactgcacttttgtaatcccagctctttgggaggctgaggcacaagaatcgcttgaacctggaaggcggatgttgcagtgcaccctcaccaccgcactccagcctgggcaacggagtaagactctgtctcaaaaaaaaaaggcaaagcccttgaacagacgtttctccaaacacgccatgcaaatagccaacaagcacatgagtagatggtcaacatcattatttatcagggacatgcaaatcaaaaccacatgacactacctcatgtccattaggatgaccattatcacaaacaaaaaagaataggctgggcgcggtggctcacacctgtaatcccagcactttgggaggcctaggcaggtagatcacttgaggccaggagtttaagaccagcctggtcaacggagtctcgctctgtcatccaggctggagtgcagtagcatgatctcagctcactgcaacctccgcctccctggttcgagccattctccttccttggcctcccgaatagctgggattacaggtgcccgttaatttttgtatttttagtagagatggggtttcaccatgttggccaggctggtctcaaactcctgacctcaagtgatccgcccaccttggcctcccaaagtgctgggattacaggcgtgagccaccgcgcccaacctacactgtaacatatttaaaaatcaaagtgcaaagggtggtttctttctaaggatgaaaattattattcacatgctccacaccaccatgcagatcaagacgctgactacctctggcggctcagcaattctatcctggcacccccggagacagctgtcgcccaggtcttgtgtgctgctgtaagttattccttctcactgcattccccaaatggacccaccacaacctgctgatcctttctgttgctgatggacatgtaggctgtctccactctggccatttgtatttctcctggaaactgcttatgcccgttacctttttctatggaaacagacggctgggacagaaaccacggccacagcagccagcgtgtctttgccagtggggtcccacactatgaaatcgcagctgtggcctcggtgggtgtgtccttggcgggtgcatccacacactttctctcggaactttccggactctcatgcatatgctacagctttccaaacggcttggccgtgcggagttacgcacccacctgcagcaggtgatctccagctgctctgcattccaccaacactacgtgacaagtctcaagttcagccgcctgggggctcgggcaccccattcctgggagaaatgatgatttgtgcactctgggccattgcatggtgtctgttcacgtcctttgcccgttttttaaaaaactgggttgtcagccttttccttcctgacttgtagttgctcctccatcctggagagtcctttgttgaaaataccgcaaatatcttctgaagaggactctcccagggaacattcactacaactgtaacgaccacagagacacagagctcctgttcactgtttagcccaggactgcggtgacaggtgcacccatgacccgagatgctggctgcgtcctgtggggtttcctgcatatggaagttttaaaagtctaaagcctggcggtccaggaggttgcgtgtgtgtcctcggggaggaaccctcctgacagccaggcctctggagcttcgtctgcacgcgagcttggcatgcaccagctgtgcggcccaggccaggtgacacggcctctgaagtctggtctcctcatcagcaaagccagtgccccatgccacgcacctcccaggattagccccaggccgggaggctagaggccccacaaggagcgagcctgcgactgcgatccacaggcagagccacagaggcagggcgcgccctggggcccaagctccagggctgcaggcccagggccagatcctgacttgcccacccgccggctgtgtgaccttcagcgcgcgactaacctctctgtgcctatttcctcgaggaaaatgccgggaaatagcagcgcctgcccctgtaaagccctcagagcagagtggaccgcgctctctgcaagcgctggctgctggcgtccgtagcaagctaaatcgcgaagcatctgaacgaacgaggaagcccaacgaccatcccacaggccgcggccagaggcagactccggaatgcaaatggccaaacaagcaggtccacctgcgttcctaaccaaaagatcgctaactgaagaacgggcgcaagcacctgcgcatggcactgcgggtctgggggcggccgcctgccagcgccgggagccgccttccacggctacctctgcacagcgcgcggctcgcgccggttgctgggcagaagctcgagcagcttcgaggatgtcgggcctgggggcggggccgcgaggcagcgacgtcgcgcggggcgcggccctgacgcagcgtgacgcaccggcgccgcggcgggtacgggctcgggcgggcgggcgggcgggacggcgccccccgcggccgggcctggccgggctgcgctaggctgggctcgggcagggtcgcaggggcgggggtggcaggggagcgggtggcagccccgcgggtcacagcgccgccgccgcccatgctgctgcccctagcctgcctgcacggccgcgtcgctcagtgcctgacctccttgcttttgcttgcagagccgctcccgaggccccggcgcggcgcgagggcgcggggcgcggcgtccacaggcgccgaggctgcccccgccgccccgcccgcgaagatggcggcggaactctacgctcccgccagcgccgcggccgcggacctagccaacagcaacgccggcgccgccgtgggcaggaaggccgggccgcgcagcccgcccagcgcccccgcgccagcgccgccgccgcccgcgcccgcgccgcccacactcggcaacaaccaccaggagagccccggctggcggtgctgccgccccacgctgcgcgagaggtgagcccgtgccccgcggcccccgcgcccgcgcgcgcccacgcccccagcccgtgcctctacctttgcaggaacgcgctcatgttcaacaacgagctcatggccgacgtgcacttcgtcgtggggcccccgggggcgaccaggacggtgcccgcccacaaggtgggtagcggcggcccctctcggaacgcgtgccccgtccgccccgtccgccgtgtggctgacacgcagcctgcgggagagccaggctcacggcggcgctttctcctcccagtacgtcttggctgtcggcagctccgtcttctatgccatgttctacggagacctggcggaagtcaaatctgaaattcacattccagacgtggagcccgcagcctttctgatcctcttaaagtaagtccactctactggggagggacgggtgggtccgttttaggcggcctccggaggcttctgaagggaagcacacaggagctgatggactcctctcccaggcccagccccgcgatgggtgcttgggagccagcccctgacgcgggccctgcctcgcctaggtacatgtacagtgatgagatcgatctggaagccgacacggtgctggccactctgtacgctgctaagaagtacatcgtcccagcattggcaaaagcctgtgtcaactttctggagacaagtttggaagccaagaacgcctgcgtcctgctgtcccagagccggctgtttgaggagcccgagctgacgcagcgctgctgggaggtcattgacgcacaggccgagatggccctacggtccgaaggcttc

SEQ ID NO: 1241157 - DNA, 4001 bp, Homo sapiens
gaccagcctggacaacatggagaaaccctgtctctactaaaaatacaaaaaattagcttggtgtggtggcacccgcctataatcacagctactcgggaggctaaggcaggagaattgcttgaacccaggaggcggaggttgcagtgagccaagatcacgccattacactccagcctgggcaacagagcgagactccatctcaaagagagaaaagaaaaaaaaaagcaacatgtctgaaatactcttttctttcaccttcatctcaaatctttcacttttctatttctgttgatgctaccgccactctccttgtatcttggtttttctcttaccttcaatcctaaacttgcattcatcaatcctgttttgtgctttctttgaaatcactcacatctatactttcctgttcttttccgagctcaactccttctcccaaggttttcacgctcttttgaataagccccaaactctggcccttgtactttttcttacatccctctccctgcagggatacccaccaccccaaaccaaattctactcattcttcaagataattaaggtaatcccaccttcttcagctaggctttgtgaccacccaatattgaaacgatttcctctgcctctgaattcctacagcaacatttagttaagcattcatttggcaatttaatcaagtggtgacttatgatagctttttaagtgagcccagataataactatttatccctcatattgagtactgtccagtgctgcacaaagaagtcactcataaatatttttggatggctgatttactgattgaaattatatccttccatggagatttgctttgcaagggaaacatgaaaagagggcatctgggtgatactaggctgtcatcaacctatcatcaatgcttcctttacatgaccaaaatcaggccaagacaaagaagtcagtctcatctccatcatttgaatcgaaagaaaataatcccggtaatcacaaattccatttcactttagaataaccattcctaaaagtttgcaaaatttatttgtagtgttaatctgccctcctcccccacccaaaataatttaaaacagcccaaagttagaaaaaactgaagggaagaaaagacttggagaattttcaacgctgccaaaactcagccaatttataagcatatgaagatccaaaatgagcccgaatgttggtcccttcctctcagtcttgcaaacttcagggagctactgaacgggaccgctctcaagttagcccccgaaaagacactgatgtaaaagtgctgaccggcaagttgacttgcaaactgaggttaattactaagccgaccctctgtcccggcaactcacttgcgctgagaagtgagggttgcaaaggtgaaaatagggaaagaggtcggtgggctggggagaggaggcatttccagtttgtctgctgcgggaagttgtccgcctgggctggtcgctccagagcaccaccgggggcaggaccacgccgcgtttgggagctggacaagcccaggcccgccccgccccgccgccgggacccatcaggagccagacagcgcccagcgaccggtcagggtgcagcccagggcccagagccagtctccgccccttccctctgtccccgccccgctttcccagcaggacgcagccgcctggcgtgcggagagcggcctgtcgcgcgctgggcgcggggactcagggtcccagcagtgggtcgcgcacctgagctatctccatcctcggagaccgacgagctctcagtgtcctcgtcctcggagctgctcccctcattttcggcgtagtccacctccatctcatcgtgatggttggtctccttcttatcccctcgggaatggactggcattttccagccgcgccgtcgctttccactaccggcgcccagcccggccaccgccgcttcaatgaagggcgcgcggaacgccccaacccacccagccaccgagcttgctcgcccccttggctcctccccgcccccggcccgggcctcacaacctaacccgcaggctctgcgatgggagctctgccattggcggaggccttccaccgagccagagggcgggggcttgccctgctctggtacgattggttgcccgcaattacgacgcggccttccgatgcttgccgggagttgtagttcgtaggtctcagacctgcaggggctgcacgcttccatccctcggcagccctgatcacttcttccttctggacttcaagtcccacaaggcacgaaagctgacactctggatcgcagtttataaactaaacagaaacagattgtgcgaatttagtctgtatttatctatttcccgccaagtgattgtttgacctgcctgaccatcagagatgttactgttagatgtgaaaatgtcttttgcctaaaaggatctttgcctgctcattgagcctggggaactggagaaccatctgttttactaagcacctttattacctaccattaataaactgttttatttaattattaactatagacgataacttgcactttctgtgttgtgcaaaaatctttaaattattcttgaaacttttacaatacagaaggtaaggaagttttatcttggcattttcaatctaatatttttggcatttattttttaccaaatgcagtcggaaaatgccatcagtcctgatttaactttagttttcaatgaaaaatacatacttaaccagatgtactttctcaaaaaaagggtacatagctccctctccctctccctcgccctcgccctcgccctcgccctctccacggtctccctctccctctctttccacggtctcccactgatgccgagccgaagctggactgtactgctgccatctcggctcactgcaacctccctgcctgattctcctgcctcagcctgccgagtgcctgcgattgcaggcgcgtgccgccacgcctgactggttttcgtatttttttggtggagacggtttcgctgtgttggccgggctggtctccagctcctaaccgcgaatgatccgccagccccgacctcccgaggtgccgggattgcagacggagtctcgttcactcagtgctcaatggtgcccaggctggagtgcagtggcgtgatctcggctcgctacaaccacctcccagccgcctgccttggcctcccaaagagccgagattgcagcctctgcccggccgccaccccgtctgggaagtgaggagcgtctctgcctggccgcccatcgtctgggatgtgaggagcccctctacctggctgcccagtctggaaagtgaggagcgtctctgcccggccgccatcccatctaggaagtgaggagcgtctctgcctggcagcccatcgtctgggatgtggggagcacctctgccccgccgccccgtctgggatgtgaggagcgcctctgcccagccgcgaccccgtctgggaggtgaggagcgtctctgcccggccaccccgtctgagaagtgaggagaccctctgcccggcaaccgccccgtctgagaagtgaggagcccctccgcccggcagccgccccgtctgagaagtgaggagcccctccgtccggcagccaccccgtctgggaagtgaagagcgtctccgcccggcagccaccccgtccgggagggaggtgggggtcagcccccgccaggccagcctcccggacgggagggaggtgggggggtcagcgccccgcccggccagccgccccttccgggagggaggtgggggggtcagcgccccgcccggccagccgccccttctgggagggaggttgggggtcagccccctgcccggccagccgccccgcccgggaggtgaggggcgcctctgcccggccgcccctactgggaagtgaggagcccctctgcccggccaccaccccgtctgggaggtgtgcccaacagctcattgagaacgggccaggatgacaatggcggctttgtggaatagaaaggcgggaaaggtggggaaaaga

SEQ ID NO: 1241158 - DNA, 4001 bp, Homo sapiens
tagctgagttcgctgccgtccaggacggcactggccgtgtagaaggtgtcttgttcaacctggaccgggtgttcaaaccagaccgggaaggtgttactggatccgtctgacatgaacttggtcaagttctgagccagaaccaccccgagccgcttgagctcaatcttcacgctgtactcagccttcccagagctggagccatacaggcccagccctgcaataaatacccttctgtccactgcaaactggatgctgtcgcagcgcccgcggtaccgccactggttgctgcggtaggcagaagactggaatcggtggcacctctgcggggcgaggcccttcctcttggtcaggggaaagtccaggcggggcttgttggtggccgtgtaccacaggaagatgctgtgggtctcctccagagtcaggatgtctgactgggcagcgccgttggcaaactcctctagggtcatggttggaattcggaccagatagagggctcgccccagaacatgcctcttgtttcgtggggtgattggcagcccctgcctcttgcactccgcctcggcccagttcaggacggcctcgaagaccaccgcctctttggtgttgagggcctcccgagtgacaatgatctccagcgtctgccggtctatctcacagaagccttcggaccgtagggccatctcggcctgtgcgtcaatgacctcccagcagcgctgcgtcagctcgggctcctcaaacagccggctctgggacagcaggacgcaggcgttcttggcttccaaacttgtctccagaaagttgacacaggcttttgccaatgctgggacgatgtacttcttagcagcgtacagagtggccagcaccgtgtcggcttccagatcgatctcatcactgtacatgtacctaggcgaggcagggcccgcgtcaggggctggctcccaagcacccatcgcggggctgggcctgggagaggagtccatcagctcctgtgtgcttcccttcagaagcctccggaggccgcctaaaacggacccacccgtccctccccagtagagtggacttactttaagaggatcagaaaggctgcgggctccacgtctggaatgtgaatttcagatttgacttccgccaggtctccgtagaacatggcatagaagacggagctgccgacagccaagacgtactgggaggagaaagcgccgccgtgagcctggctctcccgcaggctgcgtgtcagccacacggcggacggggcggacggggcacgcgttccgagaggggccgccgctacccaccttgtgggcgggcaccgtcctggtcgcccccgggggccccacgacgaagtgcacgtcggccatgagctcgttgttgaacatgagcgcgttcctgcaaaggtagaggcacgggctgggggcgtgggcgcgcgcgggcgcgggggccgcggggcacgggctcacctctcgcgcagcgtggggcggcagcaccgccagccggggctctcctggtggttgttgccgagtgtgggcggcgcgggcgcgggcggcggcggcgctggcgcgggggcgctgggcgggctgcgcggcccggccttcctgcccacggcggcgccggcgttgctgttggctaggtccgcggccgcggcgctggcgggagcgtagagttccgccgccatcttcgcgggcggggcggcgggggcagcctcggcgcctgtggacgccgcgccccgcgccctcgcgccgcgccggggcctcgggagcggctctgcaagcaaaagcaaggaggtcaggcactgagcgacgcggccgtgcaggcaggctaggggcagcagcatgggcggcggcggcgctgtgacccgcggggctgccacccgctcccctgccacccccgcccctgcgaccctgcccgagcccagcctagcgcagcccggccaggcccggccgcggggggcgccgtcccgcccgcccgcccgcccgagcccgtacccgccgcggcgccggtgcgtcacgctgcgtcagggccgcgccccgcgcgacgtcgctgcctcgcggccccgcccccaggcccgacatcctcgaagctgctcgagcttctgcccagcaaccggcgcgagccgcgcgctgtgcagaggtagccgtggaaggcggctcccggcgctggcaggcggccgcccccagacccgcagtgccatgcgcaggtgcttgcgcccgttcttcagttagcgatcttttggttaggaacgcaggtggacctgcttgtttggccatttgcattccggagtctgcctctggccgcggcctgtgggatggtcgttgggcttcctcgttcgttcagatgcttcgcgatttagcttgctacggacgccagcagccagcgcttgcagagagcgcggtccactctgctctgagggctttacaggggcaggcgctgctatttcccggcattttcctcgaggaaataggcacagagaggttagtcgcgcgctgaaggtcacacagccggcgggtgggcaagtcaggatctggccctgggcctgcagccctggagcttgggccccagggcgcgccctgcctctgtggctctgcctgtggatcgcagtcgcaggctcgctccttgtggggcctctagcctcccggcctggggctaatcctgggaggtgcgtggcatggggcactggctttgctgatgaggagaccagacttcagaggccgtgtcacctggcctgggccgcacagctggtgcatgccaagctcgcgtgcagacgaagctccagaggcctggctgtcaggagggttcctccccgaggacacacacgcaacctcctggaccgccaggctttagacttttaaaacttccatatgcaggaaaccccacaggacgcagccagcatctcgggtcatgggtgcacctgtcaccgcagtcctgggctaaacagtgaacaggagctctgtgtctctgtggtcgttacagttgtagtgaatgttccctgggagagtcctcttcagaagatatttgcggtattttcaacaaaggactctccaggatggaggagcaactacaagtcaggaaggaaaaggctgacaacccagttttttaaaaaacgggcaaaggacgtgaacagacaccatgcaatggcccagagtgcacaaatcatcatttctcccaggaatggggtgcccgagcccccaggcggctgaacttgagacttgtcacgtagtgttggtggaatgcagagcagctggagatcacctgctgcaggtgggtgcgtaactccgcacggccaagccgtttggaaagctgtagcatatgcatgagagtccggaaagttccgagagaaagtgtgtggatgcacccgccaaggacacacccaccgaggccacagctgcgatttcatagtgtgggaccccactggcaaagacacgctggctgctgtggccgtggtttctgtcccagccgtctgtttccatagaaaaaggtaacgggcataagcagtttccaggagaaatacaaatggccagagtggagacagcctacatgtccatcagcaacagaaaggatcagcaggttgtggtgggtccatttggggaatgcagtgagaaggaataacttacagcagcacacaagacctgggcgacagctgtctccgggggtgccaggatagaattgctgagccgccagaggtagtcagcgtcttgatctgcatggtggtgtggagcatgtgaataataattttcatccttagaaagaaaccaccctttgcactttgatttttaaatatgttacagtgtaggttgggcgcggtggctcacgcctgtaatcccagcactttgggaggccaaggtgggcggatcacttgaggtcaggagtttgagaccagcctggccaacatggtgaaaccccatctctactaaaaatacaaaaattaacgggcacctgtaatcccagctattcgggaggccaaggaaggagaatggctcgaaccagggaggcggaggttgcagtga

SEQ ID NO: 1241159 - DNA, 4001 bp, Homo sapiens
gttcaggttaggaaaaaaaaaaaatcttcatcagttacttgaagtagctgtcagaatgagacagaggctctcattttcgctttcaactttattacaccaaaaccctatggataggggtaggtagtgaatggtgaagaatgcaatcaatgaaaagtaagcagctcagcagtgtagtaacaatgagctctctaaatggggtaatggggtgtagaggcctacatcttagttttggtctaatccatcgccagctgtaggatccacaacaagtcactcgcctctctgggtctggtttcccggctctaaaacaatattcacacctttagatctctaaaagtttttctgactccaaaattccatgacaagtctaataacagttgctattaacaacgtatgattcttgcaaagcaatttcaagtctttcttccacatttcaggaagaaagcaattcatttcagcaatctaaaggaaacagatgctattagggacaaaagattgttagttgaccagaccgggcgcggtggctcacgcctgcaatcccagtagttcggaaggacgaggcgggcggatcaccagaggtcaggagctcgagaccagtctggccaacatggtgaaaccacgtctctattaaaaatacaaaaactagccgggcgtggcagcgggcgcctgtaatcccagctacttgggaggctgagacaggagaatcgcttgaacctgagaggcggaggttgcagtgagtcgagatcgcaccactgttctccagcctgggtgacagagcgagactccgtctccccccccccaaaaaggttgttagttgaaaaagctaagtaattctgtaaaaatgtctactttctcattacagtaagatgttttcgcagagttaacagtgctctggtgtagataaccaagactgcttctgtaaattaggcctactccagagtacttattatctgtgctggtatgtgaagacgtgcaattgtagttcacaggagaaacaacactcctcagagtttcttgaaaaacggtgagaaagttctcaccctcggggtaaagctagcaaacactgtgcaaataaggtactgaaatatgcacactttttgccattcaagtagtccaacaagcacagcctcctcttctttatcaaacactcggtattgtctccctcccaacctgtcaaagctcaattccaggtttatcccgcaatagtaacttacccggacaatctaacttcccctgggagtagcagtcctcaggcctgctcccttcccagaccccgccggccactctcacgcccacccctggcggtcgcaaccccgcacccgggtaaacacgcgcccccgtctcgggagcggtttctcagcgtcctgggagcgacgggtcccgcccctcggcgcccggagcccaaagccggccgggctgccgtcgcgactccctcgggccgctctccccgccccgagcgccacacctcgcgcccctgccccagggacggcggcgcgctccagcccgcccctcggagcgcacagagaccggccagtccggcgccgccgcgcctcagccccagacggacgactggcccctccccgcccggcgccccagcgcctcccgcggcggcttggccccagccccggcgcccccacgcctaagaacagccccttcctctcccggacgccccgcgccacaccggacacagcctcggctccacagcctcagagacaccaagggacactcaccccggaggctcctcccgccgctgctgctgccgctgggaccgctgccgtcgcctccgccgccgccgccaccagcaccgccgtccgcaccggcgccagcacccccggccatcctcctcccaccgccgccgccgccgccctctcctctcctgtcagtggctcaggctccgggactgctccaggttcccctcgccgccattttgactcctagacggagcaggaggggctcggttcggcgtggccctggggcgcctgcgcggcgctgcggagccggccggagcccccgccctcccctgccgtcgtcccgctcagggtcacgtggcccgacgtcgccgcgcgagtcgggccgcgtgggggggcggtgcgttcgctggatccatgggagcggagtgcgcgcgcattatttttgctcgtcggctgggagccgggcgtcgggtcgctgggagtttgcctcttgtggcagcatcctgcttagtccagcgaattgtgacacattattaaatgtatcagaatataagaactgtgtcactactacgtcaccagatggccatttccacgaattcatgtttccgttcggcggccggcgtccctcgggtggtcgcatgcaatgagtgcatctttctcgagaacaactcttccgcggaaagtcattgctgacagtcctggcattccggtggctgcttcttggcagtgagcacttgtctatcgtaagcacttgtctgcatggtacttttacaggcaccaccttgctacttgtgtagtaggttaaaaaataatctttaagacactgaaaagttttccttaacaagatacccctgtaaacaaaggacaaaattgatgaaaacacacagtcgccacgtgggagagccaagtcgctcttccctagatgccccttgtttgggggtttgcaataatttcagcgatgcaataacaaaaatactgtatttatggggcactgtcgttttccagagagatccatggtttcatttgaacgccaaagccaccctttgtggtagtcaggataggtgtttttattgctgttttacaaccaaggagacaggctcagaaatactaacaagtaggcaagccaagatcagaacccaggcattctgaacccagtgaggaggcaccgttacacctccttttcctctgatagacattagcaactctgggaatttatttgaaagtattgtatttgcattttcaatctctacccattgtttaacaagttttgtgtcacacagttttttgttgttgttgttctgaaaccacctctaagcttcaaaggataagagcaatttggaattttgtgatgtgtttttaaccatctcttgaccctccattattttatgcttttcatattcagttggagacaatatcattgttgttttcctctggacttccttcagatttgtattttcctcaccctcattcttcatcaccttacttccttgaaaaggatagctctttccaatttgtattacttcattttctttacccatctcacccttttcaccctcttacccaatccttgaaggtttggagattgtagcagagattgtagcagtcccttgcctgaaattcccctctagctggtaagggtcacttcagttgaacatacagcctcagggcgatagacaagaaatgcatggaaaagtgagaaaatataaaagaaataggtccatctaattggagccaatgattacctctgagtgtccacctcttgttccacacttttatacttccccaaaggcgtaagtgaaccttatctaaattcaagccatttactgttattttccatcattttacctttgtcttaatttgctaaatacagttaacacttgaacaacacgggtttgaactgtgcggatcgatcaatgcaacctggtacatgggattctaaacaccgtattgagagggccgacttttcttatactcacattccacaggacggacaggcagacttgagtatgcttggattggggtatatgtggtgggtcctggaaccaatcccacgtatatagtatatgggggatgactgtattgcattaactgaaagagctatgattagcaaactaaaaagcggtgtgtaaacactgcttctttataatttatggaaatgttaaataagatcagtccccactgtttacacttattactaacctttattacttgactttgcttctatttcctagccacaatttaaaaaacaaaattaaaatggtatcaacaacaatagaattctaagtaatttcaggataacactttttctaacag

SEQ ID NO: 1241160 - DNA, 4001 bp, Homo sapiens
atcatggtctgctggactgctgcagtgctacctcattgtttgagactattttaatgaagttcccattttttgagaaagaaaagcataccatatccacttttgtcttcaagttgtatggaaaatacaattagattacatactttttgttttttaatttattatttatttatttatttttttgagacagggtcttgctctgtcacacaggctggaatgcagtggcatagtcatggctcattgcagccttgaaatcaaaggcttaagtgatcctcctacctcaacctctccacttgggctcaactgatccactcaccttggcctcgcctcccaaatgctgggattacaggtgtgagctacagcacccagcctttttttttttttttttaaggcttagttcaactcttgttgagtagtaatttcagttagtctgatttaaataaaaccaaaatagataaataatctaataatggaatgactttttcccatcctcattattattttcttggtccacggtttatctgttgtcaggttaacctcttgggcctgaagtggtaataaactaacaggctttctttgtcactttggcaatacaagtttcggtattgttctctgctacccagtgggacagatattaaagtcagcaatggcccaagacagtgtgaaacaccgccgcccccccccgccaactccccgccccaaacaagcaataaagagatctagagaaggaagggtgaattgatgagcccttcagggagagctggatcacaaaggtggtctctgtcgaagatcagagagactgagggtctactggacatcacaggccattatcatttgggccaagatccacccatcctctttattttctcactctctctcaagaggagactcctccggggtttagaaaagctgcatggatgcacctctccacttttctgcacaagtatgccttccatttcacagaagtgttatctgttagaaatcccaacagatagctgatgaggacagagcctgagcacttctgaattgctctgccaatttctcaacctaatttccctaaagcttaagggcctcttagagtgtatacaacatctatttccaaattttgtcctggccctggcccagcccagccaagcccagcccagcataggtgtgctgttaaaacttaatcaggagaaagggattcttatcctggccctaccacttagtagctgtgtgaccctgggtaagtcatttacacttttcagtctcggtttcctcatctgcaaaatggagatagaaatatcaacccgaagggctattgtaagaattatatgacaaaaagtgaaggctctttgtacagtgctaggctcatagtggctgctcattcgctcatccattccttcgttccttgaattcaccaagccttctccatcttcctagctcccccttgtcatcgcctctcgaaaccttttccccccaaaaggttgccttccagttatcttccttccatcccacctccatttttccagactctccggatcctctcaatcagaagcaacacagacacctacatccctcttctcccccatattctccttacctggcgaccgggcccccagcacagcagtggcagcagcagccgctgccgcaaacaagctcccccaggacagctccagcccggagtccacctgagccatttgtccccgccccctccctcagccctgctccaggattgggccgtttccgtcagtactctctctgattggctgtcccggtttcgcccgagcaggagatggggagtgaacccctttactgccaatcagcggttgccgctgcctaagcctctccccaggtacgccgctcacgccgtaagccctcctgttggacctagcggaactccgggtttggagtcaacctcttaggggcggagaaaaaaacagcggaaaaaaaaaaaaaaaagaagactcccttcagctgagggcagggctctgcgcccgcgctgcgcggcggtgacgacattcgcccgcgtccgcagctgagcgttatgagcgcctgcgcagtggctccgagcgggcggttgcttgttggttgttgtagtaaccggggaagcagccgtcggcggctgccctgagccttcctggggaaggaggagggaggtaggcgcagagcgcggtccacgcctgctcgccccgaaccatgggaagatgagacaggtaaacgcctgcgcccgcgcgcttccctaccctagggaggagcattcccgggtccgggctggcgcctgcagcaggacttcccgctcagagcccgggagtagctgttggcttccgggcgcgccgcgttgaatcgcggctgcggggtcgtcccgtccttcccggggggagcatctgcggacctacgtgggattggggtgagctgggggtggggctgagaagcagattcctttcgggagaggagtctccttaggtgagtatctctactcttcttccgatagacctgtttctccccgctctgcaggcagcctaggagaggttggcatcccttcccgtttggaggttttgtttgtttaaacttaaagggcttcccagcattttgggaaagatcaagaaatcccgttgagaatcccctgaagaaagccattgaagttgttagacattgcctattgcgccgaagatctttgatcattatcggggtctgttttttttttgtcttatttacagtctcatcgtatttatgaatgcatggaaaagttaagaaggattgacagcaagtaattatcgctgagtaatttgggattatggtcatttaaacatgtttcttttatttgtagttcctatttcttcttctgacacacacaacgaacatgtacttttttactttagaaaaaatattttaagttagaaatgcagtgttggaaatttcctaatttcatcgtctatttgagagtcgtaccaaactttgtgatttttaggaagaataatttttaagagtggaagggcattcctcccctcccccacctatttatatggacctttgattcaagagaatatattcatctttcggttcattgttgaatttattttactggaaacatgatggcatcttgtcagcgtgcttgtcatagagtctaaataaatgttggcaggggttttttgttgtttttttttttttgagacggagttcactcttgttgcccaggctggagtgcaatggcgcgatcttggctcaccgcaacctccgcctcccgggttcaagcgattctcctccctcagcctcccgagtagctgggattacaggcatgagccagcacacccggctaattttttgtattttttttttttttttttagtaaagacggggtttctccatgttagtcaggctggtctcgaactcccgacctcaggtgatccgcccgccttggcctcccaaagtactgggattacaggcgtgagccaccctgcccggcctgcaagggtcttaaaccttgagtttttatttatttatttttaacccaggccaggtttgtctagcaaggaatatatgttttagggaatcagtcacctgcctcaaactgagtgaaagtgaggagtctatccttttggtgcatattcgatttagtaaataatgagaaactcaaacttagtaacagctcttcaaatatatagagcacagactgtatgtttgaaaaaaatcttgatttttgtggcatattgaggcacatattgaggcacattccatatgttatggaaagtaaacttctagaggttgagcactgtttaggaatatagtcattttcattacttagattatcagcaataaccaataaatagacaactgcattgtgtttcaggtcaattgatccaatcaagttgatttcttgcaggaatctgtgccatccaaattgcttgatccagtgaatctgctaggaaaggtctctgaggcccccgtctgctgactgcatgacaaaccctaaaggaaatgccaatcgtgatggcccgggacctggaggaaacagcatcatcctc

SEQ ID NO: 1241161 - DNA, 4001 bp, Homo sapiens
atggaaaaatccctgggtaattatgcatctctctccttaagacatgtgaataaccacttcaaggactttgttctctctaacttttagtgggatggaaactatgtccttattttcttttgaaaagatgccagcatattgagcaggatggaaacaacaaacatactggatttaacaatgtaagtattttcagctattttttcagaaggcttactaatccttattttttttattttagtgacattactccattatttaattagattttcctcaactggcataggctgtgtcaggcatttatttttacccctgattacaagtgaaaaaaattgatgaagtaacttgcccaaggtcattcgatttggtatttgatggagctggggtgagaatatgggagatcatgaggattctcatgatcttgttatttatttttaaatgtgattttgtcacttcagacataagctcaccatttattcagttacctaaatcttttttttcttttaattgagacagagtctctctctgtcaccaaaatcttaaaactctcaatgggggtttggataaaaagggaattcctcaataggagcattgcatactcttagtacacattcacgctccattttttaaatcatgtctatcacctatccctctatctatcataaaaaaattcctaaggggaaaattcccatccatgtgcttaagaacttgaagaacataaagaacataaaaacaggccatatagaaacaaccaaacgttatcaattctgcagacaatagccatgaaaaatcattccaggcaagatttgctaggtaccaaaagagaatgtgaggctttctgaacaaggcatccaataagggaaacttatttgtgttattgatccagaaggtgaagaaaagggaaaacaatatacatatatatatgtatataataaacatatatttttctaagtgagaatgtctgtttaattatcattgtggtcatcataaaacattttacatggcttataaaatatcccaggatttatggccacttcaggctcagagcttccaatcataatgggaaagaattctgttagttctgcagatgaccatgaagaatgtggggttgggaaaagggtgactcatccactcctctgtactgcaataaatcaatactgtttagggtggtttcaaaattcatgttagaattaactcactcttaaagtgttgctttcaaaaccacaaagtctggtgcattaaactatactggagagaatgatttaaatttagaatctaactgaaacgcgattgctatcatttatcactagtatctatataattttaatggtctggcaaaactaggtataaacattgaaagcattacaaactgagctgaaacaaaatgatttatccttctcatatggaatagtgaaaagtcctttgtacagtttatactcccattctaatgaacccagaatactttcaactgatgttcaatcctcattgaaagatttgagttttcaaagatagcctaaattcctttacatttcaggaatttagaaactttctgagatcatggagacagtcagataaacctattaataatgctccttggtccagatacacacatctcatgctgggttttatgtttacctgtagaatatcttccataccagttttcttgtaaaggtggcagctgcccttccaaggctttattctggtcctgcagtcttgccagtgaatatgaagtcttttcttccaaattctgattgaatgcaaagtccacacggccagccgagggagtctctacctctttgttttgcaaaggtgctactttgatcaccctaaggtgagtcttagagtgactcaggcccatttcatgtgaaagacattcagaggaaagctgcgagggaagtggttttggggtctttaatatagcttattttaatcaaagcatttcagaagtttaccctcgctttacaaagcagtcatttccttcatggcatccttctagctctgtttcactgcacactaacccttttggccacttcctgggaggctggtttccatggagacttcccttcaactttgccgtttcagacccaaagaatccagttaaacattgacttggttatgctactttctgaaatactcagtgataggaatagaagccactgttgatcattaaacaaatatcgaacaccaggaaggttattaacagagagagatgtagagcagaggtttagagaagtcttaaacttgaccctttcattgcaagtacctttgtaaaaaaactaactgctgagaatagctaagccatctttgcaattaagaggatgcatgctgattgccaaggctttgttaatctttaatttaattaaagaatttatcccccaaataggaaagaaagcagcggagcggctaaagcgtcatttgatttttctgtcgatgacttgagttgcctttgaagggggtgaatacattgcaggacaggaggataatagaaatttttttcctggggataaggggaaaaaattcttgaataaatggtctaagtaaaccttgagtttttgaagataacctatttactatgtttttaaactaaattaaattaatttatttatttttgagacagagtctcactctgtcacccaagctggagtcacccaagcccagcgatcttggctcaccacaacctccgcctcaccagttcaagtgattctcctgagtcagccacccaagtagctgggattacaggcacctactaccaccacacctgtctaatttttgtattttttagtacagaaggggtttcaccatgttggccaggctggtctcgaactcctgacctcaagagatccacctgtcttggcctcccaaagggctgggattacacgcatgagccacagtgcctggtctattatgatttttaaagtagaaaaaaagactggaaggaaatgtgccgaaatattgagtagtgatttttgaatggtgggattatgggtgatttttattttattctttatacttagaagtgggactaactttcaagctctaattgttcatgagcacagattacttgtgttttcatcacatctccataaagaaattaaaagaaaatttatttttcatctttgcagaatccatttcctaagggactaaggtgatgtttggaaagtcttggtagacaatcacgtttatctaaaaagatgcctgaatttagttttttccttactctctttgcattttccacatcattttctctgcagcagagaggtttataagtaaagactaatatattaacagtatctgcaaacacaacagcctctggtaaacagactagcttaattacaaggataataatacttgagtaaggtctagtaagatttattttttagtacaatcagtttaagtatttctaagggcaggggaatgtattgcgaactaacaaatgaactagacattgtactgaaaactgtggacttcatggatctggaccagtaagagggattcagctcttatgttttgttttattattatttaattttcagacaatatttgtggagaacatgagcctttgttgaggaaattggttagttgttgaaggaataattaaagaaataaagatgcatttctgtgcttctttctcttttcattactagtgactatcaagctttgtgactttcctgatctgtgaaatggggttaataacaatactttgtgggaaatgaacctgattccatttatagctcttagactaatacctggcatgtagtaagctcacagtaatcattagccagtatcctcctcctctgaggaagtattgctacatatctacatgtacataggatagtctttattgccagttggtcagaaattaaaatagacatattcctgtctaaaggagtttgcccctaggtatagaaaagaccaacgagggaagcgtaaattcatctggccaatttaactgggaaaaccaccatgtctaaggattatcattagaaaatattcatacactgaaagga

SEQ ID NO: 1241162 - DNA, 4001 bp, Homo sapiens
caccaaaaataacttcatttcctatttgcctgcctttttcaaacccattcttccccacccactgtcttcctccatctttcttataaagaacctaaaaataaccaatatatttcttgttcattctcttcctcttacttctatgtgccaggttgggtaaagaaaaaaacaatgattaatgttggtccattacatcttctccaaaatgaaaatgcacacattttaaaatctagtacgtgcagctggtcaaggctgatgctaattgttttgcagctatcaacagtgggggaagaaagaaaaaacattatttatgatgaaagagccttcaatgtgcatataagcctctgaaatatgccaacaactccataacatccgttacctccttacatttcctgtaaagcaccaggaaaagttaaaaagcagagtaaggaccttgctcaaaataaggtaacgcatgaaagaaccagaagcccgggtgtttgagacgttcttaaaaaagagtccagttggtttgttggcttagagatctaacaagtgttatactattttatgacaatccatgtctttaaacaattgtccttaatatttagtatgggccagacgcggtggttcttgcacttccaaagtaatctcagcactttgagaggccgaggcaagaggatcgcttgagcccaggtgttcgagaccagcctgggcaacatggcaaaacctcatccctacaaaaaataaaaaaattagttgagcgtagaggtgcctacctgtagtcctagctacgtaggagactgaggtaggagcatcacctgagcccgggaggttgaggctgcagtgagccctgatcgcgccactgcactccagcctgcgtcagagtggagggacccagagtggagtgacaaaaaaaaaatttttttttttttttagtatggtatctattggtgccttgcaattttttttttttttttttttttttttgagacggagtcttgctctgtcacccaggctgtagtgcaatggcgtgatctcaaccactgcttcctgggttcaagcgattctcctgcctcagcctcccgagtagctgggactataggcgtacgccaccacgcccggctaatttgtttgtatttttagtagagacggggtttcaccatattggccagactggtctccaactcctgacctcaagtgatccgcccgcctcggcctcccaaagtgctgggattataggcgtaagccaccgcgcccggcaccttgccactgattttgcatcatgaatgcaacggaaagatcagccaatttgactttaatagttttcagtctcttaaatctctaacgtatctcttaaatctctaaactatttgtctgtgacctattttactgtttgtgtttcttctgcatcaagttggaggattggtagtgacaaagaaagaagcccctaaacaattaatattagttcaagtaccaaaaaagttcagggcgcttgcattttccagttcttgccctacaggaagcagttcctccaagggaacttactctcttctgcggagcaaggaagaactttcccagaatcttgccacatggcttccaaggcaaactcaaactcaagttcagcgtcatagatcagttcatagtctgggtccgaagacacggcgatgcttcttgcgcacccccacggagcttgttattccgattccgcaccagccccccgcccctccccaaaaaaagcctaagatgggagtggctatgattcagaggacagagggcagaagctgtttgcgttaaggagtggggggcttgccctattaaggtaatccgcaaacaccgagtctgacccggcccatagaggtacttctaccccgcttacctccccttttctctcgaagggcacccgaagattgtcacgagtccttagactccaactactgcggcagcttccaaatttcctgaaaaccctaagctgggccagcccggcagcccacgcacttccggcctcggacccgccccaaacacccaagcgccccagcgcctcatctctaggtccggaaataaacgaacatctccgattatggttataccagggtcgagggtttccgaatatattcgattcaaagcttcggcaagacgaagaaaaccgagcctgaaagcagggcgagaaaaggggcgctgcagggcggatggaaagaattgattggtaacgatgtggagacggaaacatccgaggacatccggaggaacccggggagttctgagtggtaatcgaggggtagagtatggcagtgggcggggtcatctcggtacgttcgaagggcgttggcggaaattaccgaagatgcccgaagccgtcgggacggacccgagtacctcacgcaagatggcggagctggaggaggtgactctggacgggaagcctcttcaggcgctgcgggtgaccgacctgaaggccgcactggagcagcgaggcctagccaagagcgggcagaagagtgccctggtcaagcggctcaaaggggtgaggagtcggcgttgctggggtgtcggaggagagcggacccggtagagacgagcctctgccgcggcgcaggcgcagtatccgggctcggcgcgagctcgctcaggccgccagcgcgagcctctggatccgcgcgcacggtggttgatgaggttcgcgctggaatggagatcgcgccggttcccgccttaacggcagcagcgcgagcccaaatgggagggtgtgcactactctccaggagtgtcttaagctccttcctccttcccccaccccctccttgtttgtatctgtggtttcggcgcatgcgctgcagaaggagttaaatcccactacaacctacggcgttgctggcctgaggggggcgagttgggctgggtcggagttaggggtatagttgcgcgaaggggtggatggggttggtatcggtatctgcacgaataggactggggtagggtaaaatgtctgctcgattagatgaggaggtgagatgaagagagacctttatttgaagggacttgatgagagagaggtctctaatttagtggcatctagtggcaatttgggtggttaagagtttggtgaatattggtgagagaggcgaggcaggttgatatatattggggattttgaatcggtttgagtagattaaggtgggattgtcatgaggtaggtgtagctcgattcaagtgtataggtttggtttaaagaagggaagatgaggatgtcttggttttaattagagttcaacaggatacgtggcaggtagtgcagattaggtctgggttggctccagggttgagttggcagaccgttgcttatacagaagctgatagttttgtgtgtgtgtgtttgtgtgtgtgtgtttgtgtggatagactaggttagaccacagtttacagggtctgtggtcattttcttctgtagcttcctctttgaaaattttataaatttgataaatctaggtgccacagtactggaaattatacaaattgaccctggtactgggtaaccctttgaccaagtaattccgtcaggcaaaaaccaggagccccatggctggtttgagtattttaagtaattttacatgcatgatcagatttagaaggggcacttggcgaaagtgcagaagataatagggattttagtactggttctattactgatattatgacatagccaggtcactgattctgtgtgcctgcattttatatctgtacatttagtaacagtaaccatggctacctttatgggtcttctgaagatgaatgagaacagtgttagtaaagggttttcaggtccctggaaaaggaatacagtttaattgtgtgtatttaagtcattgcgtttaatttagaggttgtggtagaggtgggggtttgtttttcttttttttcctcatcatttctgacttttacccttctctataccaggctctaatgctagaaaatttacagaaacactcaacaccccatgctgcattccagccaaattcccaggtgag

SEQ ID NO: 1241163 - DNA, 4001 bp, Homo sapiens
gacctgtaaaatggggcctccgtcatggacttgtaaggatttgctgtgataaaatatgccaagcacccagcgtctggcacatagtaggtgctcaacaaaccttagcgtctgttctcatatgtgtggtacttcatgtttctgttccttgcagctagcacagtactgcgcatgtaaccagtgtcaaaaatgtgtcaaggagaatacattgaccgagtggaatgtgaattgtaaacaaaaaaggaaaaataggaacctggtctctgggcagattctgcctgaagacgttaaaaagccctgtatttatttcgtcaagttgccatggcagcaactgatgctccagccagctccagggttagcagggatcagtttatcttgttaaccatggaaattccggaggttcagtgggatccagaggggaaggcagacacagttcttctccagtctagaaataaatcctggaaagcctccttagttttcatgtagctaaaaccatcattatctaaaatgatgtttacatgacaatttttataagtatggatttaggcacaggagatgtaaaatcaggcaaaaaaaaaagggccagcgatactcagaagggcaattagcatcatggaaaacttaaggggctgccggagagccaggatctagacccccagaactaacttggggcttccgcatcttttaagcctccatttgcagactcgctgtccacacacagtctggattttgctgtcactttttaaacaggcttccactacaggtgaagcttggggaaaaagcaagtgtcccctcaaacttcgttccctgtaaaagaaaacagcagcagatggggtccctgccacacaccctggagacagaagggagcctgggtggcctcccgacctctctgctcccaccataaccaaccaacacaaccagagaaggtgcaagatgtggctttggtagattgggacttactctcccaggccaaacgcagcccttccctggagccagctctgggtcttctctagggtcacagactgatggagaaatccgggatttgtctttgttctggctcaagagagttaaggcacagaaatagaatcatcacccaagctcagaactccagggcattctgccggaggaaaattcaagctgtgagagatttgtttttccggccactgggagcctgtttgtgtcggggaggggggtgggggggttctggccgcgctgggcactggtggctccatcagactctacacaaagcaaaacaggacaaacgaccgcggcgcgtcgacgcttggcgggtcacggtcacaaagcgggtctcagagccttcctcaggcggcggcaaagggggcgcccgaggtcaccggcaagagacagattactggcgcctcgggaaaacagagtggggaagggcgagactgtgtgcccatccacgttcgcgcgggtctgagctggcccggccttggagggctccgggaccccagaagggggacagcagtgggggatgggcagaagggggcgactcgggctgcccaggctcctcgcagccttcctgccaacgagaggggcccgggcgggaacagctcgagccgcgggggtgcggggcgcgcagcccgccccaccccgggagagccgcgatcgccgcccccgacgcgtgcaccaagtgggggtgtccggctcgggacaaaggaccgggacgcggatcgcgggcgggcgccactgcccagccccagcgtggagggcgagaccgtggccccgaacctccccaaacttggcggcccggggcgcgtgggggggacgccccgttacctgcgcggccataaaggagagatccatggtgtcgctgcagccagcgctcgagtcctcgctgctgccgctgccgctgcgggtcagccgcctgcacagttggcggggatcgggctgagcagcgagcgtccggagaccgcacggcgcactcggctgtctctgggcttctggctccagatctctactaggcggagggccccgagcgcgggggcgggcggggcggggtggggcggggctcggcggacggggcgcccctccacgtgaccactccccgccccacccccggggcggggtccgtcagaaaccccaagcgctcgcaatcgcctcccttcgtgggcgggatggggaaactgaggcccgaggccgccccgctggttggtgcaagaaccagcctgcaacccaagtcctgagctgttggcgccccgccccgtgcagttgaacccaacccacccggggctgtgggcagcgctctcttggggctgacacgttatcccgagcctgaggaccaagatcggagtgacctggctttccacgccaacgctcctcccagagtccggtgtactcccggctcggcatctgggcagaacgaggtttaatcctagccctgctttgttgtgcagcttgagcaagatagtgtctttgagcctagatttcctcatctgtgaaaagagaatacagaaccgaataattaaatgagatagggaatatagcacgcggtgtcctcaataaatgagagccctaacatggctaatcatccaatagagacgaggctgtgagtggtgtcttcgaggaccgcacggtgctcaggttgcacagcgggtactccatggctctcagctcaaaccagtatcgaaaatcatgcaggtgccacagttcaagtaaggggaacagaagagacgcccacaggggcccattgctctgtatgtgtgtgtgtgtgtgtgtgtgtgtgtggtggacaccacagacttggtgacacgtggaggctttgccctccgggggctcactgggagggaaccagctgtactctaaggagtctcagtgagtacgactggtccctttgggtgatgtctcttccaggtactttacactcatggtcatcacgagcctctgtgaggggcagcctgggactcccagactttgtcacaggcaaggaagctgtggcacagggagatggaggggtttgttcaaggtcccccggcagctgggggcccagtagggactgtggctatgggaatgggaccagaacctcactgacctacagaaggctttcagtgttatctttcctgtaactttcctttcttttcttttccttcccttcctttctccctccttttcttcctcctcttccttctctccttctctccccttccccccacttttttctttcttttctcttttcacttttcctgtcatgcttgcctcctcccttcctcctctggtctctaaaccctccagttccctggccctcccttccctccctgtttttagccagtactgcactcaccacacccatcattcctgccacctcccagcctagtccacacggggcctgcccaaacagtccatgccaagagccgcccacctcctcccacccttcctgtggccaatagcaaagcagcctgcccagaactgcccagggctccccgtctgctgtaagaaatattatgtacacggcatacttcacaataaaagggcgtataggttgtgtgtgtgcaatttgaaaaataatatagccttgcataggttaaaaagtggaacaataaaaaacagtcgtgaagtcctactgtgtatctctccaaaggcatctcctacctgccccctttccagggtcacctccatcctatttagtattcactcttgtcaattctcttgcttttctttatagttttacctttatagattacctgctttaaccctttgtagaaaaattaaattgctctaaatttgctcttccatgtcttctttgttgttttctcagcattatttgtgtagttgacgtatattgtttttcagtgctacacaatattccatttgtatgtccttatcacagtttttattgatgcactagccctttgatggatactttggtcatctccaggttttctgataacgccaaaaaaaaatgctgctgtgaatactctcgatcttgtctttggatgcacaggtgcaaggggtcctcagggaatacgctaggaatggaacagttg

SEQ ID NO: 1241164 - DNA, 4001 bp, Homo sapiens
gtcaactttttgaggagctaccaaactctttttcccagtggttacactgttttacatttccaccaacaatgtacaaggtctccaatttcttcacattccagccaacacttgttattgttctttttgattatagccaacatccatattatcaagatgtatttcccaagatggaaggaaagtacagtttaagctcttcttacataattgtaaatcctgactctaatatctagttcttgggtttttcagctcaggacggttaaaatgtacctgcctggccaggtgtggtggctcacgcctgtaatcccagcactctgggaggctgaggcgggtggatcacgaggtcaggagttcgggaccagcctggccaacacagtgaaaccctgtctctactaaaaatacaaaattagctgggagtgggggcgggtgcctgtaatcccagttactccggaggctgagacaggagaatcgcttgaaccggggagggagaggttgcagtgagccaaggttgtgccactgcactcaagcctgagtgacagagctagactccatctcaaaaaaaaaaaaaagtacctgcctatttctgcattcgaggcaattttttaaaaataatgcagttaaacttcatgtttctactttcaaactgcacctacaaaactggaaaggcaagggagtctctgggagttaatacgtgataaaatgaagtctgtcccagtctttggaacctgttcctactctgcgatagattgtactcttccaagtatgtctgtagtttcacacctgataaaactcctttttattcaacacccagctcaaaagtcttatcctttctgaagacttcctagggtgtctgggtttgcaacagttacagaggaccacagaaccactttcactttttttttctttttttttgagacggagtctcgctctgtcgcccacgatagagtgcagtggcgcgatctcggctcactgcaccctctgcctccagggttcaagcgattcttctgcctcagcctcccgagtagagtagctgggactacaggagcatgccaccacgcccagctaatttttgtatttttagtagagacagggtttcaccatattggccaggcttgtctcgaactcctgacctcgtgatctgcctgcctcggtctcccaaagtgcagggattacaggcgtgagccaccagcccggaccacttccacttttaataagagtgtctgcctgtctagtccccttgtgtttcacaagggcaggaactgagtcgcattcacctcattcttcctccagggctcagctcagggtttggcacataatagtaggcattcgacacgtttttttgtgaaataaacgaaatagcgatgagttgtggaaacgcttgagtagaagcagcccaaataaatatagtgataaatgccaacaatttttattttttaaattattttaaaaataataatagaaacggggtctcgatatgttgccctggctgttctggaactcctgacctcaagtgatcctcctgcctcgccctcccaaagtgctgggattacaggcgtgagccccacttcgcctagcccgccaaaaatttttagatgcaattcttctttcctcgaggctcactttgtccaagtctgccactctacacgggctccccaagccaatttcccctgggcgcccgccccgtcctccggtcactgcagcaccgtctcagagctcaccgtccaagtcctcgtctggagccgccgccacccggtgctgcacttccccctgtaccagagggtcgaataattccgttaccatgtccttcatctgggccacgccagacaacaggccctggaaagggtcgccgtcacccggcgcctcacaggacacccgcagcttctgcggcttcccttcctgcccgacgtactctcccagcagctccatggtgaccgctaagcttccagaacacgacaccgggaagcgccacccggaggcggaaatcagcccgcgtccggcgcaggcgggagaagggagaggagtgacatccgtttgtcggaagtcgctcctcccccttccttcgctttttttccttgtcattggttcctggcactcgggccccacctcctccggctacgcccctcacggccgcttttcccgcctccgccggggccgagccgctgttcggctgacagttgaggatggccggagccgagggcgccgctgggcggcagtcggagctggagcccgtggtatcgttggtcgacgtccttgaggaggacgaggagctggagaatgaggcgtgcgctgtcctgggcggcagcgactccgagaagtgctcctactctcaggtgggcgcgcggcccgggcctcctctcccccggctcccgccgaacctccccttcccggcccggctgtccctattcccgccttgccgcagtcgtctccccagtggtggtccggggccgccgttagtctgccgcttcctcaccccaagctcacccttcccttttaaccccaacctcctgggcccccttcagcctgtgtccagcaggggcccccctctcccctgtctccaactctgtccggcccgccaggaagggccctggagcagctgctctgtccgtcctctccagcctcttcttggtgcaccactgcttttcacgaaaccaccccgcgacctctcagatccagacatctttgtccctgattttcccatcctaagattatttatttatttatttattagggaccgaatgggagagtcaggttaaagagattttcaaatccatagggatttgcggtgagctccttgacagctagttcctctgcaatttagttggacaagtgctagctagtactttttctttctttctttttttggcaaaatgaagcaagtacccatgtctatctgcagtctgcccccctcccctggaaatagaccggaaacagaacagcaagtggctctggcaagggaggggagagaggagaaaaggatctgtttggcatttggaagacgttgtgagtgagcaagtgtttgagggggtgtgatgtggtgtttagtgactcaccctacacttcgaggtacaaaaatggaaaaggatgggtaggaagaagactgacaaaggatgagaattggtaggaagaagggttacctaggaagaggggtggattggaacactggggagatgaggggagagacttgtattcattatgtggtatgaactgagatcataataccagttctcgttgttgaccaaggttagtttacactgcaaagtgctagattgttgaataaacctggtatccagacatagccccaggtattttaaaacctttggtcaccactaaaacaatttttcccctgctttacttaaaaaaaaaaaaaagaaaaaagttatgtctatatgtaaactatttttgaagtgtagttacctttataaaatggattccttaatattttctttgtggtaaaaaaaaaaatacggaaatttgcacaaatcatgtacacagcttgaaaggaaagtgtgcgtgttcccacaacccagatcaacaaatagaacattaggagtgcaaaaggcttattggaatagaactttaaaaaaaaaagaaagaaaaagaaatagaaccttactggcatcccggaagcctccttatctatcttcctccttcctagaggaaggtaactatacctcttatacatattcactttttttttctttttgagatggaatttcactcttgccacccaggctggagtgcaatgtcatgatctctgctcactgcaacctccacctcctgggttcaagtgattctcctgtcttagcctcccaagtagctgggataacaggcgcccgccatcacgtccagctaatttttgtatttttagtggatggggtgttctagagatgaggttttcaccacgttgaccaggttggtcttgaactcctgacctcaagtgatctgcccacctcggcctcccaaagtgctgggattacaggcgtgagccaccgtgcccagcctac

SEQ ID NO: 1241165 - DNA, 4001 bp, Homo sapiens
tattatcaaaccagaaggagcagcaatctgcattgcccacaggaaccaggcaggtacagaagttttggggtgggtcaaggaatgcaaagctcagtgcaggagaggtggggactttggcaaaccagcagctacagcgccagccgagctgcggaaacgtgagcccattctttcacaacgcgtgaaattttccaaatttccaagagtcctcactcttacaaataaaacatgtcaggggccaccagttggcctccggggatctagccctcagctggaagtgacatctgactcttttaagatgcttcctggctaggtgtggtggctcacgcctataatcccagcactttgggaggccaggccggatggatggcttgagctcagcctggctaacatggcaaaaccctgtctctgctaaaactacaaaaattagccagacctggtggcatgtgcctgtagtccctgctacttgggaggctgaggcaggagaatagcctgaacccaggagatggaggttgcagtgagctgagatcacaccactgcactccagcctgggcgacacagcaagactccgtctcaaaatgaaggggggaaaaaaaggtgcttcctcataattatgtacaagccacagtttagccttctttcagttaactccaccctgccctgcccttcccacccatcacctccttccccttcctgcttcctcagcttcactccacccctccagccaagtcagctttctttcttcttcctactctcggcctctcctttccttctttttagctcatactcagttacctttaaagcacaaagcagctctcgtcccctgcgtgccaatcaatgccaacattcttcctgccaacataatctcaacctgctgccctcctccagcactgggataatttttgcaatttagtgtggttctcatgaaagaaggtgggttatagctagctcgatctcccgtagtaaaagaggacagaggggaagtacagataatcctagagaagagacccccgcaaagtcacctggctctgcctttagccttgggtgggtacacaggtccaaagcacaccactgcagtcccctgtgccatgttggtgttgatgctcccagaggaggctgagatgagctaaccagtggcctggagaaagacttggcgaggatttacagaattctgcctccagccaacgcaggggtgatcagcctggccgctacctcatagccatcactcactcttcaaaacagggagggacctttgggccctgcaggtatccacgaagctctggcctgtgtgcctgcggcagcccagaaccccttccccaattgccacctcgattagctttgtcacctcatccccagcaagcctgtggctcaaaggcagtttcagttttactttctttgccttcatgtgacctgggagttctcaagggcagtgacaaggactgaaagggccttgcaggagagagaacagaggagaaacactaccaatacctgatatgttctgtcctcaggtgctatctggcttgaaccaagccttgacttttcaaggagaggaacagctgggcctcagtggagaatttcaggaattttctgccttgctcactggttttgccctgccattgtcctggggtgggctcccagaatacccttgggctccttaggtggggcggggcaaggtggatactgcctggggcggagggagggactgtgctgtgctctgttcccttctgacttactgtttgtttggggcgtctggacgagggctacaaacagttcctccctttgtttccacggccttgcagaatgtgtgcttccctcaaaagggcataaaggccccctttcttctgctctcctgcgccacggggggttgttctgcagggctcgggtctacaagctgaggccagccccaagcgctgactgtagcagctccatccgctcccacagcctgagctcacgtggcccatgcagcagcgtggtctcctcggcagctagcccgccccagttcttaaagctgcagagctgctggcagctggctggaccctgcaagcccagttctccctgcaagagttaacctgctctccccggctcaacagaggggtaattttgaaaaatcctgatgcctgggtgacagacccagaaatgcagatgtaattgatctaggggtgtatggcctgggcactaaggatttttgaaatccctcaagtgattccaatgtgcagccgatctggtgaatcgccatctgtgctgtacaaacttcagtgtgcactgggatcactaggggatcctgtgaaagtgcaggcttgatccagaagatctagggtcaggcagagattctgcatttctaaaaagctcccacaagatgcagctgctggtccgtgggccacactgtgaatagcaagggtgatgttttgagcttggatctgcattctgccacccacatttagaggtcttggtaagtttttaggcctgtttcctcctcacttatcttgcttggctgctctgacgattgactgagataataagcattatgcactagaacagtatcagcacttagaaagtgctcaaaagatagtaactatgaccatgattttctcctgatctgcttcaaagccatcaggacttacctttggaccccatacaattgacccttggacaacgtggagcactgaacctcgtgcagtcgaaaattcttgtataacttttattgttgttgttattttgagacagagtcttgctctgtcacccaggccggagtgcagtggcacgatctccgctcactgcaacctctgcctcccaggttcgagcgattcttctgcctcagcctccccagtagctgggaatacaggtgtgcgccaccacgcccagctaatttttgtatttttagtagagatggggtttcaccatgctggctgggctggtctcgagcgcctgcccttgtgatccgcctgcctcagcctcccaaagtgctgggattacaggcatgagctatcgcacctggcctttttttttttttttttttttttagatgtagtctcactctgttgcccaggctgggagcagtggtgcgatcttggctcactgcaatctccgcctcctgggttcacgccattctcctgcctcagcctcctgagtgccaccacgcctggctaattttttgtatttttagtagaaacagggtttcaccgtgttagccaggatggtgtcaatctcctgacctcgtgatctgcccgcctcggcctcccaaagtgctgggattacaggtgtcagccaccgctcccagcctattttttttttaatttgttcattttggttttggttttttgtttttgcttctttttctcttttgttatcatgcatcttgttccttttttttctttttttggaagtattcaataatgttggaatgagtgagtgaatgaataaatgaaagggttaaagtgaaaagtgaaagatctcttttattatagaatcaaaaaccccatgtcatgcagcctcacccacccagggtgccatctctgacctgctggaccctcaggcaacgctctgcgaaggtccataatgaccacagctacccatcacgtgtgttctccagccccagctttcctgcagagccctgctgtctaagttgctctgtttggtgtcatggtgtcatgtttccagagaatgaaatagaattaatcaaaaggtagttgttaaattgaggccaggctcacaaaggagagagatcccatctgccacctgttatgttaaactcttttttttttttttttgagacagagttttgctcttgttgcccaggctggagtgtaatggtgcggtgttggctcaccgcaatcttcgcctcctgggttcaactgattctcctgcctcagcctcccgagtagctgagattacaggcatgtgccaccacactcagctaattttgtattttttttttttttagtagtagagacggggttgctccacgctggtcaggctggtctcgaactcccgacctcaggtgatcc

SEQ ID NO: 1241166 - DNA, 4001 bp, Homo sapiens
tttcacttccactttgctatgaacttgcccccagttgcttcttgcacaaggtccaagaacactctcggggtctggtttgaggcccctttctggtaacacaagtattctggattgagatcatactttcagtcactatgcttttcaaagcataactttttacaatttcacacagtcaaaaagacacagcttggtcttccagagagctgtgcctgaatgtgaacctcaacattactgaaggaccaagggcagtcatttagtttctctacaattctgtttcctccaagacagcatgaggagatccaaattacagacttcatggagcttctggaaggataaaacaaattcaagtctgtttaagaaatgctttgaaagctgtaaagtgtggcataaatgaaatattgccttaaggcaggttggaaaatccttaaacccaaaataagaaaataaacttttttttttaatgcaaataccctctagcaacttggcagatcgcctggaaaggctgagaaatctgtcaaggagagggttggttttgtgtatctgccatgctccactgaaaaagggagatattaattgaaattaattgaaagagcatatacctgtgcacttggacgagaatcattattatcaaaccagaaggagcagcaatctgcattgcccacaggaaccaggcaggtacagaagttttggggtgggtcaaggaatgcaaagctcagtgcaggagaggtggggactttggcaaaccagcagctacagcgccagccgagctgcggaaacgtgagcccattctttcacaacgcgtgaaattttccaaatttccaagagtcctcactcttacaaataaaacatgtcaggggccaccagttggcctccggggatctagccctcagctggaagtgacatctgactcttttaagatgcttcctggctaggtgtggtggctcacgcctataatcccagcactttgggaggccaggccggatggatggcttgagctcagcctggctaacatggcaaaaccctgtctctgctaaaactacaaaaattagccagacctggtggcatgtgcctgtagtccctgctacttgggaggctgaggcaggagaatagcctgaacccaggagatggaggttgcagtgagctgagatcacaccactgcactccagcctgggcgacacagcaagactccgtctcaaaatgaaggggggaaaaaaaggtgcttcctcataattatgtacaagccacagtttagccttctttcagttaactccaccctgccctgcccttcccacccatcacctccttccccttcctgcttcctcagcttcactccacccctccagccaagtcagctttctttcttcttcctactctcggcctctcctttccttctttttagctcatactcagttacctttaaagcacaaagcagctctcgtcccctgcgtgccaatcaatgccaacattcttcctgccaacataatctcaacctgctgccctcctccagcactgggataatttttgcaatttagtgtggttctcatgaaagaaggtgggttatagctagctcgatctcccgtagtaaaagaggacagaggggaagtacagataatcctagagaagagacccccgcaaagtcacctggctctgcctttagccttgggtgggtacacaggtccaaagcacaccactgcagtcccctgtgccatgttggtgttgatgctcccagaggaggctgagatgagctaaccagtggcctggagaaagacttggcgaggatttacagaattctgcctccagccaacgcaggggtgatcagcctggccgctacctcatagccatcactcactcttcaaaacagggagggacctttgggccctgcaggtatccacgaagctctggcctgtgtgcctgcggcagcccagaaccccttccccaattgccacctcgattagctttgtcacctcatccccagcaagcctgtggctcaaaggcagtttcagttttactttctttgccttcatgtgacctgggagttctcaagggcagtgacaaggactgaaagggccttgcaggagagagaacagaggagaaacactaccaatacctgatatgttctgtcctcaggtgctatctggcttgaaccaagccttgacttttcaaggagaggaacagctgggcctcagtggagaatttcaggaattttctgccttgctcactggttttgccctgccattgtcctggggtgggctcccagaatacccttgggctccttaggtggggcggggcaaggtggatactgcctggggcggagggagggactgtgctgtgctctgttcccttctgacttactgtttgtttggggcgtctggacgagggctacaaacagttcctccctttgtttccacggccttgcagaatgtgtgcttccctcaaaagggcataaaggccccctttcttctgctctcctgcgccacggggggttgttctgcagggctcgggtctacaagctgaggccagccccaagcgctgactgtagcagctccatccgctcccacagcctgagctcacgtggcccatgcagcagcgtggtctcctcggcagctagcccgccccagttcttaaagctgcagagctgctggcagctggctggaccctgcaagcccagttctccctgcaagagttaacctgctctccccggctcaacagaggggtaattttgaaaaatcctgatgcctgggtgacagacccagaaatgcagatgtaattgatctaggggtgtatggcctgggcactaaggatttttgaaatccctcaagtgattccaatgtgcagccgatctggtgaatcgccatctgtgctgtacaaacttcagtgtgcactgggatcactaggggatcctgtgaaagtgcaggcttgatccagaagatctagggtcaggcagagattctgcatttctaaaaagctcccacaagatgcagctgctggtccgtgggccacactgtgaatagcaagggtgatgttttgagcttggatctgcattctgccacccacatttagaggtcttggtaagtttttaggcctgtttcctcctcacttatcttgcttggctgctctgacgattgactgagataataagcattatgcactagaacagtatcagcacttagaaagtgctcaaaagatagtaactatgaccatgattttctcctgatctgcttcaaagccatcaggacttacctttggaccccatacaattgacccttggacaacgtggagcactgaacctcgtgcagtcgaaaattcttgtataacttttattgttgttgttattttgagacagagtcttgctctgtcacccaggccggagtgcagtggcacgatctccgctcactgcaacctctgcctcccaggttcgagcgattcttctgcctcagcctccccagtagctgggaatacaggtgtgcgccaccacgcccagctaatttttgtatttttagtagagatggggtttcaccatgctggctgggctggtctcgagcgcctgcccttgtgatccgcctgcctcagcctcccaaagtgctgggattacaggcatgagctatcgcacctggcctttttttttttttttttttttttagatgtagtctcactctgttgcccaggctgggagcagtggtgcgatcttggctcactgcaatctccgcctcctgggttcacgccattctcctgcctcagcctcctgagtgccaccacgcctggctaattttttgtatttttagtagaaacagggtttcaccgtgttagccaggatggtgtcaatctcctgacctcgtgatctgcccgcctcggcctcccaaagtgctgggattacaggtgtcagccaccgctcccagcctattttttttttaatttgttcattttggttttggttttttgtttttgcttctttttctcttttgttatcatgcatcttgttccttttttttctttttttggaa

SEQ ID NO: 1241167 - DNA, 4001 bp, Homo sapiens
gtgctgggatttcaggcatgagccaccacgcccggcctattcctttactttcttaataaacttgctttcacttccactttgctatgaacttgcccccagttgcttcttgcacaaggtccaagaacactctcggggtctggtttgaggcccctttctggtaacacaagtattctggattgagatcatactttcagtcactatgcttttcaaagcataactttttacaatttcacacagtcaaaaagacacagcttggtcttccagagagctgtgcctgaatgtgaacctcaacattactgaaggaccaagggcagtcatttagtttctctacaattctgtttcctccaagacagcatgaggagatccaaattacagacttcatggagcttctggaaggataaaacaaattcaagtctgtttaagaaatgctttgaaagctgtaaagtgtggcataaatgaaatattgccttaaggcaggttggaaaatccttaaacccaaaataagaaaataaacttttttttttaatgcaaataccctctagcaacttggcagatcgcctggaaaggctgagaaatctgtcaaggagagggttggttttgtgtatctgccatgctccactgaaaaagggagatattaattgaaattaattgaaagagcatatacctgtgcacttggacgagaatcattattatcaaaccagaaggagcagcaatctgcattgcccacaggaaccaggcaggtacagaagttttggggtgggtcaaggaatgcaaagctcagtgcaggagaggtggggactttggcaaaccagcagctacagcgccagccgagctgcggaaacgtgagcccattctttcacaacgcgtgaaattttccaaatttccaagagtcctcactcttacaaataaaacatgtcaggggccaccagttggcctccggggatctagccctcagctggaagtgacatctgactcttttaagatgcttcctggctaggtgtggtggctcacgcctataatcccagcactttgggaggccaggccggatggatggcttgagctcagcctggctaacatggcaaaaccctgtctctgctaaaactacaaaaattagccagacctggtggcatgtgcctgtagtccctgctacttgggaggctgaggcaggagaatagcctgaacccaggagatggaggttgcagtgagctgagatcacaccactgcactccagcctgggcgacacagcaagactccgtctcaaaatgaaggggggaaaaaaaggtgcttcctcataattatgtacaagccacagtttagccttctttcagttaactccaccctgccctgcccttcccacccatcacctccttccccttcctgcttcctcagcttcactccacccctccagccaagtcagctttctttcttcttcctactctcggcctctcctttccttctttttagctcatactcagttacctttaaagcacaaagcagctctcgtcccctgcgtgccaatcaatgccaacattcttcctgccaacataatctcaacctgctgccctcctccagcactgggataatttttgcaatttagtgtggttctcatgaaagaaggtgggttatagctagctcgatctcccgtagtaaaagaggacagaggggaagtacagataatcctagagaagagacccccgcaaagtcacctggctctgcctttagccttgggtgggtacacaggtccaaagcacaccactgcagtcccctgtgccatgttggtgttgatgctcccagaggaggctgagatgagctaaccagtggcctggagaaagacttggcgaggatttacagaattctgcctccagccaacgcaggggtgatcagcctggccgctacctcatagccatcactcactcttcaaaacagggagggacctttgggccctgcaggtatccacgaagctctggcctgtgtgcctgcggcagcccagaaccccttccccaattgccacctcgattagctttgtcacctcatccccagcaagcctgtggctcaaaggcagtttcagttttactttctttgccttcatgtgacctgggagttctcaagggcagtgacaaggactgaaagggccttgcaggagagagaacagaggagaaacactaccaatacctgatatgttctgtcctcaggtgctatctggcttgaaccaagccttgacttttcaaggagaggaacagctgggcctcagtggagaatttcaggaattttctgccttgctcactggttttgccctgccattgtcctggggtgggctcccagaatacccttgggctccttaggtggggcggggcaaggtggatactgcctggggcggagggagggactgtgctgtgctctgttcccttctgacttactgtttgtttggggcgtctggacgagggctacaaacagttcctccctttgtttccacggccttgcagaatgtgtgcttccctcaaaagggcataaaggccccctttcttctgctctcctgcgccacggggggttgttctgcagggctcgggtctacaagctgaggccagccccaagcgctgactgtagcagctccatccgctcccacagcctgagctcacgtggcccatgcagcagcgtggtctcctcggcagctagcccgccccagttcttaaagctgcagagctgctggcagctggctggaccctgcaagcccagttctccctgcaagagttaacctgctctccccggctcaacagaggggtaattttgaaaaatcctgatgcctgggtgacagacccagaaatgcagatgtaattgatctaggggtgtatggcctgggcactaaggatttttgaaatccctcaagtgattccaatgtgcagccgatctggtgaatcgccatctgtgctgtacaaacttcagtgtgcactgggatcactaggggatcctgtgaaagtgcaggcttgatccagaagatctagggtcaggcagagattctgcatttctaaaaagctcccacaagatgcagctgctggtccgtgggccacactgtgaatagcaagggtgatgttttgagcttggatctgcattctgccacccacatttagaggtcttggtaagtttttaggcctgtttcctcctcacttatcttgcttggctgctctgacgattgactgagataataagcattatgcactagaacagtatcagcacttagaaagtgctcaaaagatagtaactatgaccatgattttctcctgatctgcttcaaagccatcaggacttacctttggaccccatacaattgacccttggacaacgtggagcactgaacctcgtgcagtcgaaaattcttgtataacttttattgttgttgttattttgagacagagtcttgctctgtcacccaggccggagtgcagtggcacgatctccgctcactgcaacctctgcctcccaggttcgagcgattcttctgcctcagcctccccagtagctgggaatacaggtgtgcgccaccacgcccagctaatttttgtatttttagtagagatggggtttcaccatgctggctgggctggtctcgagcgcctgcccttgtgatccgcctgcctcagcctcccaaagtgctgggattacaggcatgagctatcgcacctggcctttttttttttttttttttttttagatgtagtctcactctgttgcccaggctgggagcagtggtgcgatcttggctcactgcaatctccgcctcctgggttcacgccattctcctgcctcagcctcctgagtgccaccacgcctggctaattttttgtatttttagtagaaacagggtttcaccgtgttagccaggatggtgtcaatctcctgacctcgtgatctgcccgcctcggcctcccaaagtgctgggattacaggtgtcagccaccgctcccagcctattttttttttaatttgttcattttggttttggtttt

SEQ ID NO: 1241168 - DNA, 4001 bp, Homo sapiens
ttttaagctcatcttcatgatttttcagacaaactctctgtatttttactttacttcctaattcattaccttttcaaagaacttgggccagtcgctgctgtggatgtttcttaaattccctctgtcttcaatcttgtagtgcctgattttctggtcttcaagccaaacgatgaagtttctaaattctgtttcatctgcaataaaaaatatcacataaataactagaagcactacataaaatacctccttctcaggtatatgttcagatatatgttcttgtggaattttcttaacttcaaaatactaaattaattgaaccaaaagagggagttgaaagtacagattctggagttgaaagtacagattaacaatgatctgttcaaatcctgggtccagatacttactggttgtgtgaacttgggataatcacccacattttctgtgcctcagactcttcagctacaaaatgagggtgctaatagaacttacctcatagagttatgaagattaaaagaagttgttttatttaagaagtttcttaaataaaataaatacggataaaaacagtgcctggcacatagttttgctatttaagtgttacatattaatattccagttcctttgcggacagaaaggggaaggagggcaaggttaaatttatagcaaagtaataaagtaaaatatacaacaaaataataagtaaaagaaattaaatgacaaaaaagacactgtgacaactgttgtcatggaatgttaactgcacattaagtgcataattgtttcgtttaatcctccccatacctcttttgaggtaggtaatatcccattttacagataagaacattgagactcaaagattccaatccagaacaaggctctattgtcactgatacttttttgttaaagtagaaaaacaatagattataatttgatatgcttctacaggcgatcaacaaaacactgtcatcctgcttagaaattattttcaatttgtgagtcaaattcaagcttccattataaggtcttgagaattacacagtggtctgagtatcacaagttatacttgatcactttcaaacttaccagtctatcacaggccacaactatacaaaggaaacgagtagtggtgggtagcagtttagttacagtgagtagcaacgttattactttttaaaattctaatgctgtaaaatcccaaatacctttgtattcacaattcaaccttcccactcatctgctattaacttttttgcaacaccacataacacaactagcccgttactacacgcgcttaccctcccactgtgatcggtcctgatttcattgtgtactgtctcaaactgctcagtgggttctgattgcttccacccctcgtccctttagctcctggcaggcagtgaactagtcttcaagttactcagcaccttcctcagaatccagcaccgcgctggcccataattagcaggtgctcaaggtatcgcctaattacccagggaaccatggagttgaatagtgagtgagaaagacgaatgctctcccttttatgtacagagaaggtagttacgtgatgcttggagttaagcaagtgcagaaagtaacatgccgagacaggagtaggtgagagggctttaaaggcgggaaggggcggcgaagagccgaggtacgtggcgacccagaggagaggggcccggaggctgccggcggaaaccaggccgccgagggtcccgacggggaggtggggtgcgggcactgaggctgggacctccgcccaggtcagggacacgcggccgggctgaggccgccgcctcacctttgcagttgaagccggcggggttgtggtagtcgagagccgtcaacttgcgtcggaacatggtccccgcttctcgctctggtcccccgggcctcggccgggagagaagaagcgaggtggagcgggaggcgcaggcaccggcgacgcggcgagagggcgggcaggcgctgagtcgctccgaaatgacggcggccttcgccaatcgtggcttaaaagcggtggccgccggcaaatgcccaccaatcgcggctccggctggggaggcggggccacgtcggcgcacgtcgacgctcaaataaactttattgtcagcttcctggttgtacaataggcagaaaaccaccgggaagccactttcctttctttcttgctatagcatgcagagaatagtatatgtaggcttttggtattcgctgtacctcccgttggattacagaattactgtttagtgttttgagtgcattcattcattttattactcctcctacataacaggtgctcttctaacactggtaatacaaagactacaaagcaaggtccctatagtaagatgctttcagactaattgggagtgatccacaggtaaacatacaattgttaatacgatgcgatcgttccagatatcctcagccagagtgaaatctgaagccgagatcgtccctcactccccctcaccctcggtcacagcatccagtaggtcaccaattcctgccattctgtctctcctaactctcaaatccctcacctcctttcggaccccactgatacagccacagatcagatcctcatcacttttgcttactctaattatctgattgatttcttagggccagtcctgcgttctccaaaccattcctccatacagcgatgagagagatttttctaaagcaaaaacctgtacataactttctctgcttatgttttagtggttcctggttaccccctagaaataatcaaaactccttattgtatttaagatctttcctgatccagtctctacttgcttttcagacagtggagagagagcagtgaacaagacagaccaggcccctattttcatggagtttaaaaggctaatgagggaaacaataaacagataagtataaactaaggcttgaagatggtgaggcattcaccatgcagtcaaaagggtaacctagtttgagggaagaggatgtataaaggcaagaaatgagcaacagcatggcccagagggactagagcttataggggctggagggtgagagggaatgacagctgataagactatagacaaaggcagggctctgataaggaaaagcctctcatggcaagctaaggggagctattgaaattcttgggggtaagccaactatgtacgtttcatttcatttcattaattaagattttaattaaacacttaggatctgaggagcatacaaatgagtaaactacagtctctattttcaggaagtttaagtataatgacaaatatagatgtgtaaataaatacttataatctggagttagaaagagtaagtgaattacaagaaatataaaatgtactacaaagaagtacaggccaggtgcagaagctcatgcctgtagtcccagcactttgggaggctgaggtgggaggatagttcaagcccaggagtttgagaccagcctaggcaacatagtgagactttgtctctattaaaactaaaaaaaaaaaaaaaagaagaaagaaaaattagcctggcatgctcgtgtgtgcctgtggacccagctactcaggaggctgaggtgggaggatcacttgagcctgcaaggttgaggctgcagtgagccatgatcacaccaacctgtgcaacatgtaagaccccatctcaaaaataataataataaaaagaagtacagaggctagaatacagctttagttttaagggggcactgtaagataatctgtatttttcaattaaggtgcttatagagtgaatcaagaaaatcagttcaagagtgtctcatttccaacaaaatttgatcaaagatatggctataatctcatattgtagtgcatgctagttgtataattaatgaaatactaaccaaaaaatgaaaaaatgaaccaatcatggaagggaaaataataaatacttacatataaataataaattaaaaagggggaaaaatacaattgcagaccatgaatttctttaaaaaaataagg

SEQ ID NO: 1241169 - DNA, 4001 bp, Homo sapiens
ggctagaggcatcttagtgagcagcagccccttatcatacaacgtggttgccaaggacagctggtcctccacactgtcacagggcaggtcccccactctcacaaactctggataagaaccaagcaacagttccatggcatcagcttgctgggggtatatttccaagcacttgggttcttccagatgatacacacgggagttttccactgtgtaatagagaaacaaatggcccccctcacccaccagccgagctatcccatcctgaagcatatggacttctgtttctgttgtcaactgggcccccacgtttacaggttctccagcctcccagcgaattggaagcccgtaaacacttagtgccctctccctatcagtcaaaacagggggcagagaatcgtgaatgaagtctttggctcgctggtcggccacagcatcaacaggagcaaagtgtcccaggcgggcaaccaagacccgcaccttctccatgaaagcggttcttcgcggatccttagaatctgaatgctgggcccccatgtaatccatgaagtctcggggcagacccctccgaaactccacattttcttccattgcagcctgcactgccagaggcagtatggcctctaagaagtcaccccaggtattgcgctggtacgtggacaaggtgaggtgcagagagtggactccatcctggcattcagcttggtgaatgaagccccgaggaaaatacagcaaatctccaggttccagcacggtctgcagcaccggctcaccgaggtcgtcctgactgaagttggggctggatgtcagagccagttcctcggttgggactcggggtcggtatacacgccagagtttcctaccttccagctgcagcacgaaggcctcgatgtcgtcgtagtggggggcaaagccctgcgagttagggggcgtgaggtaaacgttggagcctgccatgcttccaaactgctcttgaagcacagccaaaaactgccacacagtagtagagaaagcctgcggacagaggagacgcagggagcagccggcctggtacagggaccacgcggcggcgggcagcgcgcggccgggtgggttcagggtctcgcgtcgtccgttgatgtagcgagcggcgtccaaatgctggccgaactgcacctcctcgttgcgcagcatcgaatccaggtcagcggtagagaaaagtccctggtagtaggtgtggtcctgccgccgcaccagcaccgcctcgcgctcccataggcgccggtaaaagtgatctggcggcatgggcgcgatgagccactcaaagaggcgggccgctcgccgccggctgctggggatgcggttcagctcggccaagacgcgccgcagcggggagtcccaggccggctccccacccgtgttatccacctgcggccccgacgccgtcgcaggggccccggacgactggacggccgctaagtgttgcgcggtgcacagcagggccgaggtctccaccacccggaccggcgcggcgggcacctccaccaggcgcgcgggcggcgcggaagcgggcaccaggcgcgccgacggggtctgcagggagcgcgcggcgggcgaggcctccagcagctctgcgggccccaggtggccgtatggctctcgccgggctgcgtccgggacggccgccaccgccgccccaccgggtagcgcgtcccccaggtcgtcggccgtcgactccaccctcgattcctccgagttctcgctaggcagcgtctgcgtcctcagcgctgccatgcgggatacaacacttcgcagctgctttcgtatcttcctggacctcaagggcagggccaggaccgacccgctgtgtggctggggcttgcgccggcgcttcggccgcccgcgcctcaacggccctgcactggcctggagcccatccatggccagaccacaccagtcttccccgcccggccggccgggggcgaagctaaagcggttcctgaatgcagcggctgcggtgcactctgggaagggggcgcggcctccagccacctcggggttggccacgcccatcattcttctattcggcccctcccgctctctttcattaaatgtttggcttcaagctgtagcggcagcggcaagaacccttgccaaacaaacaaggaatctacactcagagagcaatttaaaaatcaagttgcggccaagcgcggtggttcacgactgtaatcctagcactttcggaggccgaggtgtgtggatcacctgaggtcaggagttcgagaccagcctgaccagtatggtgaaaccccgtctgtactaaaactacaaaaattggccgggcgcggtggctccgcctgtaatcccagcactttgggaggccgaggcgggcggatcacgaggtcaggagatcgagaccatcctggctaacacggtgaaaccccgtctctactaaaaaagaaaaatacaaaaaactagccggacgtggtgctgggcgcctgtagtcccggctactcgggaggctgaggcaggaggatggcgtgaacccgggaggcagagcttgcagtgagccgagatggcgccactgcactccagcctgggcgacagagcgagactccgcctcaaaaaaataaaaataaataataatttaaaaattacaaaaattagccaggtgtggtgacttgcacctgtagtcccagctactcgggaggctgagacaggagaattgcttgaactcgggaggtggaggttgcagtgagccgagatcgtaccattgcactccagcctgggcgacagagtgagactcttgtctcaaaaaacaagaagaagcacaaaatcaagttactagagactccccaggagaaatggctacttgactgttttttccttctagtctctgcacattgcagtgttccttggatgtcctcatttctaaacaggatgttccaccggcaggttcccaccaaaaagtgcagaattcttcttttcaaggaatgcccccaggcagtttgagttccgcagaaacttctgctctgcagatgaattcactgattgaagccttatctaggagttcctccacctaacttctctccctcttttctccaatacaaattctcaaattcattgtcctctctctgaaaaataagttaagaatttctctacttgcattcttgatatctgcccttcctgcccctctgggattttgtttctttagctacaacttctttggctcttaaactcaggatcttaaatcggcttctaatttaacaggcaatgtggtggcatgcgggtgtaatttttgagaacgtggtcactgtctgtcatgcaactaattgctttgtacataaagattccttgtcttcatttgaatcatttaagataaactcccagaaataaaagtgctgggtcaaaaagtaagatactttttgtgattattaataggttttaccaaactgccttccaagagggtttacaatgtttcaagcaatgataagcatattagactacagtacatggcctctaggacctttctctgtttgagctttcaacactccctctttctcagttgcaagcctatccaaacacttgccaaggcttttagattttgtccttacccatgtctaacatccacccttttttatttctcacatggtctgttacacacacagttatcaactgggggtgatattgtctccatagggacatttggcaatgtcatatagggggctaggggttgtctaacatctagtaaacagacactagagacactactaaacattctacaatactaaggacaaccctcccacaacaaataattgtctgatgcaaaatgtcagtagtgtagtgttgaggcagacaaatcctggtttattacaaatagcctcccaactagtctctttacctttattttttatttttattttatttttttgagacagggtcttgctgtgttaccccaacctctgtgttgcaatggcccaatcttggctcactgcaacctccacctcccaggttcaagcgat

SEQ ID NO: 1241170 - DNA, 4001 bp, Homo sapiens
tggtctcgaactcctggcctgaagtgatccacctgcctgggcctcccaaagtgctaggattacaggcatgagccaccaagcccagctgattctttttaaataaaattattattattattatttgatacagggtctggttctgtcatccaggctggagtacagtggcacaatcttggctggttgcaacctccacctcttgggctcaagcagtcctcccacctcagcctcccaagtagctgggattataggagtgcaccaccatgtctggctaatttttgtatttcttgtagagaaggaattttgctcggttgtccaggctggtctccaactcctgagctcaagggatcctcctgcctcggactctcaaagtgctgggattacaggctcccatgacccatggccccccagccacattcaatagactctttacactggggtgggtgctgtggccacagcaaaaggaaacatgcatttatttattcagtgaccaaatatttgtgacttgccatagtggttggtatgtgagaataaaatcattctcattttatagaagataacactgaggctaagtgaagttggaattactattcatactcatatctataatactagctcattctacgtagctcatcttagggccctagtctcaataagaattcccatagtaggctttcaacttactgattcttcaagtcattcctaagtgtaaaacaagttcttacttatgacgcattattaaataaagtgagctactaggttggtgcaaaagtaatcgtgattttgccattcttttaatggtgaaaaccacaattacttttgcaccaacctaatattttggattgcaattatttcaatataccacttcatatgatattttgagactgcctttgagtgaggtctatcgcttgtattgtgcctcagtaaagccccatttagaactcttctataattcagtctttcagaaaatcaagactctttaataagtccccgatttgctcattcttgcacatcataaagaggctttcatgatcaatgtgttttggaaatatgactaaacaaagtaaggttagtgcctttatagcagggcctcttgcatcctgtaatgcacgggtatgtacctgagatctccatgagggtgttaccatttgctgcttttacttttcccgaagttcttttactctagaaagtactatcaggaagcatctgacagcactggcattcacagaaatctgtgtcgcccccagttaatcttaatttctgtcattggcactgtatctgtggggttttgctgcaatgtaaaacggaataatgaatatttgttatattttagacactttatggattccaaagcatttatctcatatggttcttaaagccatcttgagagatggatatgattactccattgtattcaaaaagcagtgagaattttagtttagaatggtgcaccaaataaatactacaactttcccccacttctctgaacacataaggaagataggaataatattagtaagccatactaattacatagcagggccctgaaacaagaatgggcaatctacagataccagaaatggaaatatttcctgaaaaggagggtgcttgggatggttactaggggctgaatcactagggcccaagagggtgccgggaaaagagctgagagccatgcacaaggctgtgtcgagggtttcaggtcctaggaggggcaggggaccacatctggcaatctaggtgtggcaaaggaccgcaaacctgcagtggggactgaaaatctaccccccactcatttctagagtctgtatcagctctgtgtctgcctaccgagtgctgtggctgaagccctggtcctggaacttgagaagtgccttctgcatggggcagggtctggagccaccataagagtaggagctgtctggaaataagttcttcatgtgggtttggggctgaacttagacacgtgcagaacctgtgtttacagccatgataatgcatcttgggggttcctggaattcaaagaaaggaaatcacccagggtggtgatgacctcacaactaagaattacacaacactggaggaagacagagcccaagtgagacaaacaaaaacacagcacagaggactatataactggtgaaaagaagggaacttagagaatctgaaaagacacgtgaaacattttttaatatcctgaaagaaaggagagaaagcaaccatggcaggaggaaagaaggctctggaggaaaagaagtcttgaaataataacagaaagttagggaaggcagtgataaattccatatataaaaatacattttttgcgtgggcgcagtggctcacgcctgtaatcccagcactttgggaggccaaggagggcggatcacgaggtcaggagatcgagaccatcctggctaacacggtgaaaccgtgtctctactaaaaatacaaaaaatattagccgggtttggtggcaggcacctgtagtcccagctactcgggaggctgaggcagaatggcgtgaacccaggaggcggagcttgcagtgagccgagatcgcgccactgcactccagcctgggtgacagagcaagactccgtctcaaaaaaaaaaaaaaaaaaagaaaaataaatttttgaaaatcacaaaagtacctttaaagatgttctggacagatgaaacctccaagaccatagcagtacaaagagaaaacacattagaaaaattaggagacatagaagatgggtggccctgtgacacaagttcagtggggtttctaggaaaagcaaatgaatagaagagagcacaggagacctctacaaatgtgccaattagatattccaagaactggctgatgtcgtctagaaaaacctccaaacataaagagtaaaaagaaaattctacaagctatgagagaaaattaaaacacacacacacacatacacagatacacacagacacacacagacacacacacacagatacacacagacacacacacatagatacacacacagatacagacacacacatacacacacaaacacacacacacagacacacacagatacacacagacacacacatacacacacacagatacacacagaaacacagctacacacagacacacacacagatacacacagatacacacagacacacgcaacatacacagaaacacacgcacaaacacacacagatacacacagacacacacacacattttctgcaaaggaatgaaaatgaacattaacatcattttctcatcaggaatattagatgccagaagaataattaagtaatatattcaaagagaaaacagttttctgtcataaatactttactcattccaggtagtttccaagagtaagtataatataaaataaagaaatttaaagacatagacaaaccagcacattaccacagacgctctctggaagaacaacacaacctaaagccatcgtcaaaccatggcccgtgggccaaatccagccagcacctgtttttgtatggtctgtgggttaaaaatggatttaattttttaaatgattgaaatgaaatcaaataagtattaacattttctgacaaatgaaagttacataaaattcaaattttggtgtcaataagtaaagttctgttggaacataagcatgccctctggcttccccgttgcctgtggctgctttcctgatacaagggcagagctgagaagctgcgacagatgccaaatgtttggcaaaacttgcactatttattatctagcccttaaccagaaaattgccaatcctgaaggatgtactttagcaaaaagaaatatgaacccaggagaaaggaattagatgctaaaaatgaaagtaaataatttttattgagtctattatttgatacatgatgtaatagtgattaataaaaataaaatgtaaaaacaagctggagctaaattttagacaacaatgaaatggggaggagagttatttggaggcagtggactctgaagattg

SEQ ID NO: 1241171 - DNA, 4001 bp, Homo sapiens
gcctcagcctcccaaagtgctgggattaaaggcacaagccaccacacccagccaaagctacatcttaaactctaatcttcgggctcccaggccatgcaggttatattacacaatgtgattaacaatcctgtatttaccaaaagattttttctttttgtttttttggtttacatgctgtggcaggcagaattctaggatatcccccaagatctcctcctcacccaacccccacagtacctgacctacataacccctggggccatgactatgaagattctgattctgttatgcggtgtggcagagttgattttttttttttttttgagacagaattttactttgtcacccacgctggagtgcaatggtgcaatctcggctcactgcaacctccacctcctgggttcaagcgattcttgtacctcagcctcccaagtagctgagaaaacaagagcacatcaccacacccagctattcttttatattatttatttatttatttatttatttatttttattttttgagacgcagtctcactctgtcgccaggctggagtgcagtggcgtgatcttggctcactgcaacctccgtctcctgattcacacgattctcctgcctcagcctccccagtagctaggactacaggagcgcgccacaacgcccagctaatttttgtatttttagtagagacagggtttcaccatgttgcccaggctttgtcgaactcctgagctcaggcaatccgcccgccccgacctcccaaagtgctaggattacaagtgtgagctactgcgcccggccaagagttgatcttaaaatagggagattatccaggtgctcctgatctaatcacatgagccctttaaaagcagggcatttttctccaacagtggcagaagaggagtcagaaagatgtgcctcagaaagcaaatatccatgttgtgaactaccaataaatagggctcatgtgggaaggactcgagagtgacccctaggagctgagggtggccaccactaacagcacaaaacaaaacagggaactcgatcccacaaccgccaggaactgatttttgccaacaagaatgagttaggagatggatttttctccagagcctcctatgagatttcagccttgtcataccctgggcagagaacccagacactcggtaaattaccaaggattacgaaatatctccccaagagagtgttttggcgggtgagaggatatggtttaaagaaaagttttgagtgtgaatgttttcagagagtccaaggactctccattagctagtctcattattacctgtcgttttaaacgccctatcactcttacttaaagtagctgtccccgggaagcttttgtattttgtaccccttctcggggaacgggactgagtaaggaacgtaataaagcggcctaaaaggcatctccctgtatctttgatattttgcctagggaacgccctatcatgtcgcatataagcgatcgagttatgcatttgttgctagctgaagagattattccttgataaccgcttggtctggtcagaatacaaacggtactcctgttcaaagaactacaaatcccagaaggccttttcggccagagcgcctgcgcatcgcgcactccttcctttccgctcctcatcatctggaaagacccgcccagcggtgctgtcgctcgcgctggaagaagcggaagaagatggcgctcaccaggtgggttgttgattggggtcctcgatacggaagggtctgggagtaccagtcttcttcatttctcttcccataccctccgggcggtgacctgacccggggcacagaatgacgtgggccaagactacggctacgccctcccgctggccgccgctacgactaggcctagtcgaagctggggtctttcagcggtttcccgggtttagttcacccgctcaccgaggccgaaagctgcggagtggtctcagacactgaagagtgggtttttcgcgtgagcatcttgcggggagcggacagcgctccctcaggtccgcggctcgggcgaacgagatggggttggtgacggtagtggcttatttgggcggagtgaagcgcgcgggctgcgactgcgcggctttccggccgtttgcctgtggtggtctctctcctttcgctgtccactgggtgtcccgaaacaaggattcctgaaaaaagaggcccggagctgaacacagatttaaatgagccacagtagtgaccgccgtctgctgatatgcgccactgctccgcattttaactttggagcttagaatttcttccgtagatagaaccacctcagttttgctgtttccggttaccttagtaaccgtctgtaaagtgctctccgcctttaagaaaaagatgcttttcagtgggagagtccgagaagttacgctactcctactagttcccagccttgctgccccattttaagtggaaaaactttccatgcgaactcaacaggaaaaggctagtgttcaggaaggttatagataaagtaatcctttcaggacatcagcttgagctcttttaacacccttcattctcctcacgcatgtttttttttctggctgatgacagtatgactccaaaagttttaatcaaaaaattattttgggaattactgttggtgccttgctctgtcctgggggttgtgtacacagaagaaaatctgtctttggcaacagggaagataggggtgcaaggtatacagacataaaacaattacagaacacaaaatgtgcatttgtgtaatactaaccttagtgcaaaaagaattgaatggaataagttatgtgggctggagagttttctccccaccctcgtttctaaaatttttttgcttttttttttaactttattttttgagatgcggtctcgctgtgttggccaggttggtcttgaattcttggcctcaagcagtcctcctgtctcggcctccgaaagtgctaggattacaggcatgagccaccatgcccggcatctgaaatttttttaaaaaaaaactagaaatagggtgttactgcgttggccagagtggtctccaactcttggcctccatcaatcttctcacctaggcctcccaaagtgctgggattgcaggcatgagctaccatgcccagccaagagtttgtttagtaaatgttacaggcagcaaacatttgagtgctccccaggtgtgagacactgtgtcatagactagtaaagttatgaggggagactttgtggaaaaggtggaatttgaaatggacacacaggaaaaatttctagagatgtcatgggtattttttatttattttattttttgatatagggtctcactcttgcccaggctggagtgcagtggcccaatcacagcccactgcagcctcaacctcccaaggctcaggtgatcctcctgcctcagcgccctagagtagctgggactctagacgcttgccatgatgcccagttaatttttgttttttttagtagagatggggttttgccatgttgcccagcctggtcttgaactgggcttaactgatctgatctacccatctcagcctcccacagtgctggcattactggcgtgagccaccacatcatctggcctgtcatgggtattgcgtgcttaaaattgcagtggcagaatgcgatctttaaatggccagtcttgaggactccagagctttccatacctaccatctggtgttcctcagtattctttgtaatatcctttaaatcagtaaacacatttccctgagttctgtgagctgccctagcaaattagttgaacctgaagatgaggtcatgggaaccctggtttgtagttagttggccagtggccttggacctactgttggcatctgaagtaagggcagtcttgtgggactgagccttcaacctgtaacatctgacagtatctccaggtagataacatcaaaattgaattgaattagaggacacttgactggtgtccagtagacacagttgatagcttgcttga

SEQ ID NO: 1241172 - DNA, 4001 bp, Homo sapiens
acacacacacacatacatactctctctctctctctctctctctctctgcccctgcccacctgggctcctgctggtgctgtacctccggggtggctcaggcctgatcagccccgagatccactggcggtcacagcctcgctgtcgcagggtgtgaaccagagctgttgcggctcacaaccagctgagaagtttccattacggcgacactgagcagtggcctcagcggccctgagggccccggctgacttgctgctctcgggacagcccggtccatggggaggccgtcaaccacgggcttggtggccccaggaggagctgggcctcctcagtctcccagcaccttagtagtttggccacaggcctaacccaatggccctggggctgcagatgcaggttgtgccttcttccggtggaagaagactgggaccatggacactgcctcgctggcctttcctctgcagggcggaggcagaacacagccaggcggggtggctgggctcctgggaaaagccttggctcccagcccaacgctcaccactggaaccacgctggcagctccccagacaacatgcgttctcgacttaagtaagagggagaacttgtggggaggcccctggctgggctgaccgcccactgggcttgctcaggtgcctgcaggccctaccaggtaggaacaggagcaggagctgcctggtggccccctgaggcccctctccatgcctagatgggccctcacatcccgaggtgcagttagggctcgaggtagcagcagtaccgggtgatggctgctcatctgctgggtgcaggggccaccctaggcctcgagagctccagacagacagggcgggggacccccccaggcccttcctcccatatgtggaatgggggctgtttgccaactgtccagggcactgcaaagctcagtagtgcccaagaaatggcgtggcgtccagtgctgggtgggggtcccatggccacacagggcaggacagggattccttctgactgacggctcagaaaagagccagttctcagggattcccaaacactgagaactaggcttcagttactggagtaacgaatccattcctgctaggctgggcctgcgtagacttgccctcggaggatgccccccaccaaggcccttcagggaaggctggctgggttcatgcctggcacggctgcctgcattcccctgagagtgcagccccttctcccactgcccaggctgtttcgcgcaacatcaggtgccctttggaagctcctgtgtggccaggagcacccccgctgctaagtttgaagtggccgtgttccctgcttcccccagaggcggcctggcctcagtgtggacacagggccggcctgggactgtctccgttttagggaaaccatcagtcccaggagaagggggaagggtggccactctggagcttgttcaggtcactcaggatcatcagtgtgtgctctgcccagtctctgcccacacctgctgcccagctggggcaggttccccacctgcacctgcctttggcaatctctccgctctgcccagtctctgcccacacctgctgcccagctggggcaggttccccacctgcacctgcctttggcaatctctccgctctggcatcttcatacccaagcaggaagtgagccccctctccctggggctggaactcacctggttccctcctggctccccgagggacagaaacaggctcttcgggatctccctgtggggcacagtccagtgaggtcctggaccctcttggccggcagcacccctcccaggcccttgagagttgagcctcgggcagaactgcagggcacacaggtgaacgggccaggcccgcccaggcctccttcccgagggctctgatctggaggcgccaccgcccgctggcagggccgggtctgttgtggccttcgtcccgtctccagccctctctgctggatcgcaaagctgggccagctggcagcggccaggctataattacctctcccctttggcagaaatagcagtgaacccgaggacaggccgctggccccggagcagaagggggtggctgtttcccaggcccccggtggacaacagaccatgatttcagataagaccagagtttgctgctgttcctacccctcccggcccaaatgtgccccctcccaggtcaattccagagctgtgcagctcttggaaaaacctatggattggaattcggggcagagtgggagagggagggcactgtggggctgcgggaggtgaggtgatcacagagtccagcctccaataagaccctgacccagcatggggcctccgtggtggcgagagtgcccgccctgccccaggcccctgtgcccctgtgagtcctgacctggggttgccagagggagaggcaaagaatgggtcccaagctgccgttttggggcacactggccgaccctcgatattgccctggcaggaaggggcaatgtatgggtcagtgagcgatggcaggggtgagggatcagcctttctcagggtctgtcctgggtgggcgtccaactgccctgcctggcgctgctgagtctgcccctcatttgtaggtgaaagtgcagctcagagagttgaggcaccctgtccagagtcacacagcccggaggtggtagcctggctcaggcttggtggcccgtcctcgccagcccccccgtctgctggtgcatgtaaaggcaggtctgaaagaggctggtgagggcatcactggcgcagggcaccaccacatgtgggcagacccctgcctggtttgtggggctttgacctgtttcaggggactgctggaggaggtgtggagagacccgtgtttctccattaggaatgggggtgcatctcccttgggtaaagctacaggacccctgggagcccagggtgtgccaggctgggggacagtgtgcacagagggtgactgctcagggccagccgtggggctgcatggacacagagtcctggaacccaccgtcagagcatgagcaacgcagccactgggatggggttcagcagaccggccctcccctcactgccgtcttcagtacagggcatgggggagcaaacttttctcttacagggccatatggcacacagtgcgctctgtgtctacacaaacggggtgggccagattggcaggagggccttggctcgctgacgcttgttccagggagagcactgaggaaggctgggtggtcctgctggcagtctggcttcctgggaagagtgaggtcctgtagccagacaagaccctctcccgcctgtgcccaatctgggcgcttatccttggcttcccagggctggagctgctcctcccagatttcagaggtcaggctgcactgcccgaggtcggggggctccgggacaactccttcctgacccttctcattgacagaggggagggaacggtcagcccacagaccttgggtgccgccccctctctgtgctccctggaaaggcgatgcgggctgaccctgtggacattcgctctgggtaatttattagtgagctgatggctcggctcagggctcaggtcccagcggggtcatatttccggccgtatctgatagggctcggctgcaccctcctcgcctccgtccattgcgcctcactccagcctgggctctgcagggcaagataaggctggcccaggggagtgctgagctgccgggtccgcggagggtccccagtgcctgtgccaggcagtgccagggaagagcccagttgtgtcaggcctgcctgcagccggcaggtgggcacatgtgcccacgggcagtggtgccaatgacgtggtgcccaggtttgggcccagctctgtcactgttcagccaggtgacctccgccacaccctcatctctccccgggagctgggaatgatcggatgccccaccctccccagatctttgtggtgcacccaccctgagcagtgccccgggaacacagcaactaaggccagctgtcattcagcgggagggcggagcat

SEQ ID NO: 1241173 - DNA, 4001 bp, Homo sapiens
ctccagagatgcaccttcacgtgggccatgctctgctcccagacagcctccctgagccctgccatcccctccctaactgggcttcacgcttccccttctggaagagaggtctggctcaagtcctgggctctgtccttctttggctctgtgacctcgggtaagtggtgtgacctccctgggcctcattttccccagtggaagcagggaaggagtggctctggcatgctcggcaggtgggggcggggaggcctggggcctctggcagggacagtgtgtaactggaggcctcgtgacagatgggagataaagggcggaaaatagcttcagagcctggacctgtaagtgtcccgctaggcccgctgctggggagggcgcgtccacccgaggggactctacccccactctgggaacaggaaccccatggcgcctcccttggtgctggggggctggggggttcttaccagctcctctactgagagggggcaccgagctccctggcggaggggaaactgaggcccagagagggagaacagcctgccaggtttcagagcctgggttgggacagaggcgggagtcagggcccggagctcccagttgtgggcatgaccagcccgtactgctggtgggaggtggggccatgagggctgaggcccaggaccttggtctggggtgtgaccctccaacagtctttgggggtctagcccagtaccccaaagaccccacctcatcttgaagctgctgagagacgtgagggcactgatggagcccagcggccgtggcagtgccgagtccctccccctcgagaccagcctgcagtggggcgtgggggcgggccagtggttcttgcctggttctgtggcttggataacgccaagctctggggcccagccactgctgctccctcccactcctgccccgtcctccaggacgccgcccgctggcttcccgcctcctcccaggctgctgcctctgcctggcccgtgccgcccgcccttttgcccacagcccacctcctgatgtttctctgtcctccctgagggttcctcggggcgggcagtgccccccatgcagcagctggctcgtgagaaatcctgacatcccacccaccccacatgggaggtccttcctcggctctgagcgtgcggccccacactcccggctcacccctcgcctggcactgcccttcctcggctctgagcgtgcggccccacactcccggctcacccctcgcctggcactgcacccattcacacggcagcctcacagccttccaggggcagagggtcccggggcctgagcgagtgcaggctggggccaggctccctgtttccctgttccaggtgcagcctcccccagggcaactcacttgggagctggagacagggggccaggctcctgggaagccagagacctccctgggagaagctggagactcacagcccccacccccaccacttacacacacacacatacatactctctctctctctctctctctctctctgcccctgcccacctgggctcctgctggtgctgtacctccggggtggctcaggcctgatcagccccgagatccactggcggtcacagcctcgctgtcgcagggtgtgaaccagagctgttgcggctcacaaccagctgagaagtttccattacggcgacactgagcagtggcctcagcggccctgagggccccggctgacttgctgctctcgggacagcccggtccatggggaggccgtcaaccacgggcttggtggccccaggaggagctgggcctcctcagtctcccagcaccttagtagtttggccacaggcctaacccaatggccctggggctgcagatgcaggttgtgccttcttccggtggaagaagactgggaccatggacactgcctcgctggcctttcctctgcagggcggaggcagaacacagccaggcggggtggctgggctcctgggaaaagccttggctcccagcccaacgctcaccactggaaccacgctggcagctccccagacaacatgcgttctcgacttaagtaagagggagaacttgtggggaggcccctggctgggctgaccgcccactgggcttgctcaggtgcctgcaggccctaccaggtaggaacaggagcaggagctgcctggtggccccctgaggcccctctccatgcctagatgggccctcacatcccgaggtgcagttagggctcgaggtagcagcagtaccgggtgatggctgctcatctgctgggtgcaggggccaccctaggcctcgagagctccagacagacagggcgggggacccccccaggcccttcctcccatatgtggaatgggggctgtttgccaactgtccagggcactgcaaagctcagtagtgcccaagaaatggcgtggcgtccagtgctgggtgggggtcccatggccacacagggcaggacagggattccttctgactgacggctcagaaaagagccagttctcagggattcccaaacactgagaactaggcttcagttactggagtaacgaatccattcctgctaggctgggcctgcgtagacttgccctcggaggatgccccccaccaaggcccttcagggaaggctggctgggttcatgcctggcacggctgcctgcattcccctgagagtgcagccccttctcccactgcccaggctgtttcgcgcaacatcaggtgccctttggaagctcctgtgtggccaggagcacccccgctgctaagtttgaagtggccgtgttccctgcttcccccagaggcggcctggcctcagtgtggacacagggccggcctgggactgtctccgttttagggaaaccatcagtcccaggagaagggggaagggtggccactctggagcttgttcaggtcactcaggatcatcagtgtgtgctctgcccagtctctgcccacacctgctgcccagctggggcaggttccccacctgcacctgcctttggcaatctctccgctctgcccagtctctgcccacacctgctgcccagctggggcaggttccccacctgcacctgcctttggcaatctctccgctctggcatcttcatacccaagcaggaagtgagccccctctccctggggctggaactcacctggttccctcctggctccccgagggacagaaacaggctcttcgggatctccctgtggggcacagtccagtgaggtcctggaccctcttggccggcagcacccctcccaggcccttgagagttgagcctcgggcagaactgcagggcacacaggtgaacgggccaggcccgcccaggcctccttcccgagggctctgatctggaggcgccaccgcccgctggcagggccgggtctgttgtggccttcgtcccgtctccagccctctctgctggatcgcaaagctgggccagctggcagcggccaggctataattacctctcccctttggcagaaatagcagtgaacccgaggacaggccgctggccccggagcagaagggggtggctgtttcccaggcccccggtggacaacagaccatgatttcagataagaccagagtttgctgctgttcctacccctcccggcccaaatgtgccccctcccaggtcaattccagagctgtgcagctcttggaaaaacctatggattggaattcggggcagagtgggagagggagggcactgtggggctgcgggaggtgaggtgatcacagagtccagcctccaataagaccctgacccagcatggggcctccgtggtggcgagagtgcccgccctgccccaggcccctgtgcccctgtgagtcctgacctggggttgccagagggagaggcaaagaatgggtcccaagctgccgttttggggcacactggccgaccctcgatattgccctggcaggaaggggcaatgtatgggtcagtgagcgatggcaggggtgagggatcagcctttctcagggtctgtcctgggtgggcgtccaact

SEQ ID NO: 1241174 - DNA, 4001 bp, Homo sapiens
acacttaaataagcagcaggaagaaggtcctggcagagacagaacacctgagttttccacatggcacacggaccttggaggcacagagggatgggccccgctactgagtggcaagaagacgaaatgtctgtgtcgtagaactgtgtgtgatcttgaaagacctctcggttcgtgaatggcatcttgggttctgtcaggctccacacaggttctactgctcctcttcctccaacaggctgagctgtgtgacttttccagggttgccatccgacctgtcatttggtctgtggcccttagtttcttatccacatgtggctgtaaaagaaactccacaatcctggagggaactcagtgggtccctacttccaatccaaaaacctcgactcactcttttactttttctaataacttaataagttaaataataataaaagaattgttaccgttgttcagccaactctttccgggctcatcaacgattttctaggaaagaaggtttccttggttagacctgcacttcctctctgtctctctccattcatgtttgagcattcattcattctccccacaagcacatcatggattctaaaatgaagaaggcaatattcgtactttgaagatgctcacatcttgcatgtgcagtgttacaagagtggggttggtgcaggagtgaaatgggaggccgtgtcccgagatggggtcaccagaacctggagtgacaaggtggaggtggggagaggagcttttcctcctggctttcccacaaacactgacttccatgcctctggcctggaaccacatgtaaccaaagccatatgttcaacttgcgttaattaaatggtggcctcagcaacatttctggtgctgcttctgttgctttggcattatgatgtcttcaatatttgttactgtgtgtcgtttgtcatgtttaacccagtggctcagattctatttgtttgtaaaacttaaatgttgagagacttctgttcttgattttttagaaaataaaaattatttttggtttattccatgagaacatatcttctataggttgaacctccaaggttcttccttcttgatttttctgggagatgactgtaatttttttttttttttgagacggagtttcgttgctgttgcccaggctgctggagtgcaatggtgcaatctcagctcaccgcaacctccgcctcccgggttcaaggaattctcctgcctcagcctcccaagtagccgggactacaaatgcgtgccaccacgcccagctaatttttgtatttttagtagagatggggtttcaccatgttggttaagctggtcttgatccacctgcctcagcctcccaaagtgctgagattataggcgtaagccactgtgcctggtgtaatcttaactgctttttaggaaatggtgtaagaaaaggctgtgccataaactcaaaatcctactaatccccagttctcagccccaaaccgaagaaagattacatttccagtccagtttctaatcccaagtatccatgcacccaggatggcgggaaaagggaaaaggcggtaccttaaatgagggaaggacatctcagtcttggccagttcttactcttcccaggggccaccctcaagccccaccctgagcaggtaagtgaggcaggcaggcagcctgggagcatgtgtgggagggaatccaacggtgttctccaggctgcaagagctgggcagacacaatcgtgctgcagccctggcctgtgtttttctttcccacaaagaccaacaccggtgctgctgacatcatgacaggtttgatcatttttattttgcggtgagcgtggtgtcatggtgatgaagagtcctgtgagcttgtgcaggtcccctcaactgcaggctgtccaggcttcctcctctacagtaaagacaaggagaatggctgcttcctaaggtgatggcgaggtaggatgaggagtgtaaacggcccaccctgctcccagtggtaactatgggtatgatttccttttgggagaagacagagattgcccttctgatcctcccagctgtaaatttgggctggggcaacttttagacacaaacagggcactcctggctacagggcctcaatgttttccttgaggtggagtatctaggcatttccctgaggtttctgatgcctgggcagggtggggtggggtgtggctggttctgacagctgttccccacccagctttgtgccctggggagggagatctacctgcacatcccgctgcactggatctgcagggagctggggctgcccttggacgcctcaggcacaggccctcatcctctgcctaactgctttttacacccatcccttgagtccagggagattttgccacaatttcaaaaaagaaatgattattcagaaggcattcttctatatatttcctttttttttttttttgagatggagtttcgctctgtcaccaggctggagtgcagtggcatgatcggctcactgcaacctccgcctcatgggttcaagcgattctcctgcctcagcctcccgagtagctgggactacaggtgcatgccaccacgcccagctaatattttaatttttagtagagatggggtttcaccatgttggccaggatggtcttaatctcttgacctcgtgatctgcccgcctcagcctcccaaagtgctgggattacaggcatgagccaccgtgcctggccacatttctgtatatcttgcaagcagacacactgtctgtcttttatttgatcatctttccaaggatgctggtatagcatgtatgcttggaaaatagagatgctgtttctccagagaaagggggagcttgcttgcattcttctatgtagttctaaggcccctgctccactgtacagcaagtggccacacccttagtgtcttccttgcctaacccagacccttacagcactcagcttggaaaagacccttgcagcgctcagttgggtgccatgattatgcctgtaatcccagcacttagggaggccaaggtgggtgggtcacttgagcctgggagtttgagaccagcctgggcaccatggcaaaacgccatctctaaaaaaaaaaaaaaaaaaaaccacaaaaattagccaggcatgaggatgcacctgtagtcccagctactggggaggttgctgcagtgggaggattgcctgaacccagggaggttgaggctgcagtgggctgtgattgtgccactgcactctatcttgggtgacagagtgagaccctgtctcaaacgaaaacaaaatttcaaaaaaaaaaaaaagaatgcattcttgcccttagaggctccatcctcacctccctcttctggtttctcttcctctgtctctgctgtgtgtgtctttaataaagaacactgaaattagtgagccaggtttgcctcctgggcaggaattatgaaatccaggtggccttggttgtaatagggggaaaaaaaaacctttattttgtctgcttagtgttgtcctggcttttctttgcatattccgtccccctacccccaaactcactgtgctgttctggtgaggctgaccccacccagattcaggactgacccaggcctggccaatcaacaaggccttcagggactggtacgtgtcagttaaatgagtcagtcccaggacgctttgtatatatatgtatgtaatatttgtaactattgggaaagtgtctagctttccacaggaacttctaacctgttccagtgtgaccctaaggatgccggtagccatcttgccactctcgggagaggaagagccacagagacaaggcaactctgagagctgagtcctgatgaccggtcgaagcacccgaattcagcagtatgtgaagcccctgaacttccagttatatgtgctgatgaattatcttttttgctgaagtccatttgaattggagtttatatcatttgcaatttaaagagaactgatcaccagctggctcaagtctgaagtataaactggtttctag

SEQ ID NO: 1241175 - DNA, 4001 bp, Homo sapiens
cccttccctccccaccttcacttccctccctcttcctttagtcttgctgaagaggtgactctttttttcaggaatcaatctgcctgtggtcagcacggtgcctggcccattccttccctctaggctcttccacccttcgctccatcaattatccacccgctagtcacctccgtttatcttcaaccacaacctccctccccatgcacttctacaatcctctcaacccagtctctctcctgtttcctaccaaactttatgaaataagctactactctgactttctccactcttttgccctgctctccattcatgtctactcatttttgtattccctgtagaacctagaactcatattgtaggtgctcaaggaaagacagattaattatggaactggataatcaactattcctgagcaataagtgcaaggatggggcaagatgcaaagaagatgctgttcttgtcttcaaggaggaggccgtggaatttgtgagttaaaatagacacacaaaaaagtcggtagatctacactgtgaacaaacagaacaaagtctttaaatggaggcatcgggagagaggcccccgggactgcagtaacagcttcctgtccccctagtgcttatgtgagtgcagataaagtcataggtaaatcctaataaggtgcaaggaccgacccctgagccacagttgggacttttataaaatgaatgcccatggtgagtatctgggatcctcccttgttgaagatggacagtgtccctggagggaggaagcatcagtggacaaatggttctgtgccatggacagctcagcgcagtgtgaatcagtgtggggtacccagggattcctgagtatctgagtgatggaagccggaacctgttcctggctttccttggctgtgcaccccatctctccagctataaaatgaggggtgatgctctgaagacatgaagtgtgagcagcaacctctgggtgattttccacattctctgcccactgtcttccgtaatcttcagggctgtgcccctcccggcagcagcagcacttccctctctgagcagcgttggcagctgagaggacactggtgggctgtgactgctgagccttcccctgaggttcgggcttggagggagccctgtcccaggggccaggcttggtgagaacttggcaccctggaagcccaaagtcccagtgctgcctgatcctccacagcagagcttctcacaggctaggctgctttcaatcaggtcttggagctcccacagaccaaaatagtatttacagcctgcctgggaaggtctacaaccctaaattcttctaggaataatgaaatcagagtattgagctgaggagttgtttcatttgataggttgaaggaattaaaggaaacacatttgcaaaaccaggtcactccactatgctccagtaagaagagtaataataattggtatcaaatattggcctgtcccaggttctgtcctgtagtagccactcccttcaggaatttgctcctctacataacaatgggcagctggtacccagagcacctgccgcatggcctggcctgccagatgcagataaggagagatgatgactccttgtcttgagtcaccttctgtgaagagaaagcatgagaggaaaagattgataagatctcatccaggatcagctagggtccgaaaggaagccagcctgggagaccgaggggagcggatccatagtccatctccacccactgccatgcagcaggggctgaggaccctgctcatgcagagatgcagtagatctgcagacagctgctgtgagcaaaggtagctggaagtccaggtgccccatttgttcttttcaaatgtggtacgcagctgagaaggggaaagaaggaataatcaagccatttgtaaaccgtgagaaatacccacaggaactcacatttccatccagatttcaagttgacgtttggctctgacatccatcttactattcgagaaccctaagacctccatggctgaacataacaaatgtcaccaccagcctgggcatggtggctcatgcatgtaatcccagcactttaggaggctgaggcaggtggatcacttaaggtcaggggttctagactagcctggccaacatggcaaaaccctgactgtactaaaaatacaaaaatcagtcaggtgtggtgccgcacacctgtaatcccagctactcgggaggctgaggcacaagaatcgcttgaatccaggaggcagaggtggcagtgagccgagatcacaccactgcacaccagcctgggcgacagaggggaaactctgtctcaaaaaaaaaaaaaaagtcaccaccactatcatcatccctgtctcacaggtgaaaaaacaaactcagactgagggacctgcctcagaactcacagccagtcagcagcagaggcaggagtgcagccttctccctctggcttctgttagtccagaaaatccccaccaagtgatgctgagataaatcttcaaccaggagagggacagggtgacctgagggggtctgcatggccacgctcctaatcataatcaatgattggcatggattgtttggaaagatggtagcaaaatactctggggactcatggatgaatcagagtcaagggaaatgtcctatggttgggaagtgtttctggggagattcacacacaagctcctgaccaggggcagctgaacaggcaaaaccctgggctctctctttatagaatctcacgcttcttgccaggaacctcaggggagtatgaaaaatgatggcttttgtttttgtttttgttttttgttgcagaataacagtcacatttttcaaggctatctggaaagttacatctgtcctctggagacactagtaaaaaaataaagtaatagattcccctccagccttttaccaagaattacaaacctactaacagctttcaccctttctgtctctctttccctctctctctctctctgtctcacacacacacacctacctctgctcctctgctcatatttcacagggctggacagagatcgtcatctaaatgcatagctctgaattgctaagtggcaggattagcttggatcctatgttatccctgatcacattaagcagatcaatgaggcagaacttctgtcagaattttttttctttttctttttttttttttcttgagatggaatgtcactctgttgcccaggctggtgtgcagcagcaagatctcgtctcactgcaaactctgcctcctgggttcaagcaattctcctgctttaacctcccgagtagctgggattacaggcgcacgccaccatgcctggctaatttttgtgtttttagtacagacagggtttcaccatgttggccagtctggtctggaactcttgacctcaagcgatccacctgcctcggcctttcaaaatgctgggattacatgcgtgagcaccacgcccagccggcacttccatcaatttttgagtctgaagcccacccacacgcaaccccaacatttaacctggtaagctggttaattctgctacaactgcagccaatcatctgtcaatcatcaaagctgcctttaagatcaacctaggactctaccgtgggaacagtagatgtggggcaggtatgtgtcctatactggcctctgtcttcactttctgccaccacacataggcagtacccaagtgtcagattttcctgaaggctgggtaactgaagggaaatacaacagaaaaggaaaaaaattgaaactccactctgaaagtgactttccccataatccaagagaaaagcaacaagaaaacaccttcagttttaaaactattttttttaagctaagttcgtgctctgtcgcccaggttggagcacagtggcacgatcatagctgactgctggctcatctcctgggctcaagcactgcccccacctcagcctgtccagtagctggaacttcaggtatgtgccaccacgccaggttaattttttgaaatttattt

SEQ ID NO: 1241176 - DNA, 4001 bp, Homo sapiens
ctataaggaaaagggcaaagtaaactgggagggtacaatgactacggtaagaagggactaaagaaactgagtcatgctgacattgtgctccgggcccaggcaccctggtatggtctccttacaaaattacccttagtccccagtgcaacaggggcctgctattcagtagcttgcaaatacctttcccttcctttccccttgacttcagttgccatatttgcctggacaagtgacatgttcccaatacataataaaacgagggccccccctttttttttttagacagagtttcagttggtcatcaggctggagtgcaatggtgcgatcgcggctcactgcaacctccgcctcccgggtgcaagcgattctcctgcctcagcctcccgagtagctgggactacaagaggccgccaccacacccagctaatttttgtatttttagtagaaacggggtttcaccatgttggccaggatggtctcggtctcttaacctcgtgatccgcccgcctcagcctcccaaagggctgggattacaggcgtgaaccaccgcgtccggcccctactttttttttttttttgagacagtctcgctttgtcacccaggctggaatgcagtgacgcgatctcggctcactgcaacctccgcctccagggttcaagcgattgtcctgcctcagcctcctgagtagctgggaagctgggactacaggcgcgtgccaccacactgggctaattttttgtatttttggtaaagacggggtttcaccgtgttagtcaggatggtctcgatctcttgacctcgtgatccgcccgcctcggcctcccaaagtgctgggattacaggcgtgagccaccgcgcccagctacatattcccaacacataataaaacgacagcccctacttttttttttttttttttttttaagacggagtttcactcggtcatcaggctggaatgcaatggcgcgatctcggctcactgcaacctccgcctaccgagtgcaagcgattctcctgcctcagcctcccgagtagctgggactacaggtgcctgccaccacacccagctaatttttgtatttttagtagagacggcgtttcaccatgttggtaaggatggtctcgatctcttgacctcgtgatccgcccgcctcagcctcccaaagggctgggattacaggcgtgaaccaccgcgcccggccggcccctttcttgagtccattctgcccaggcacatttcctagctgtgtgtgtcagttttacagcaccagaccttttaaaaatccatcttattcataggccaaacgtgtgtctactgtatccacttaagtctgcaaagttttggcacattacattaagggcgaactattacctgacactggaaatgggaaatgtctgacccgcgagttccatacaatttcattcagcaccgtatgatctcttttcagcttccctgttgcctcacccaagttgtcatgtacagcataacgtggagggcagtgtggcgcaaggaaacttgagttataaaggagagaagggactggatgtggagtcagagttcttggcttggactctggcttctctaactctgcgtagcctctgggttaggcagctgaacctctcaaggccaaggtacgctccctgtcaaaaccgtgggagaattcaggtgcactgagcgcgttaaggccaaggagggaaacgcggcgcaggcctaggcgatgcttccctctggcaaccgaccctggcctacctcccttcagagaagggaaagccgggcagaaaagcaggcgcgtgccggcggaggggtggaaccccaagatcagctggggccaaggcggcttctcgccctcccgcccccgccgtctcgcacctcgggagccaggtccaggtccccgtactcaccttggcgcaggacagacggctcagaacgcaccacaaatctgcagccaactcggaaaggtcaccgagcgcgcaggcgcgcgcaggggatgccgggaaggcggaagcagcagagacgccgcaaggccagagtgcctccccagcggcgcctccgcaccacagcgcccccggcggccgcctggtgtcgcaggcaagaaggggcggggagagggtgcgttaggggtgtgcccgcgtgtgtcactgtgggctggctaatcctccacatcttcccacgactgatgggtttcctgggacgcgggaccttcaacgctgaaactaggaaagttctagacataccgggagggttggttaacctaagaaaagggaccctctttactgtgacgttaaagactaagtcaagtctcccatttcagtggtgtgtcttgtccctttctattgttaattatttagctctgcatgtataaaatatatatatttggagacggagtctcactctgtcgcccacgctgcagtgcagtggcgcgatctcggctcactgcaacctccgcctcccgggttcaagcggttctcgtgcctcagcttcctgaatagctgggattacaggcgctggtcaccaagcccagctagtttttgtatttttagcaaagacggggtttcaccatgttggccaggctggtcttgaactcctgacctcaggtgatccacctgcctcagcctcccaaagtgctgggattacaggcttgagccaccgcgcccggcctgctctgcatatttttatgtctgtattctgtgcatattcttctcagcagataatataaaacttccacaggggctccagacactgggcttaatagtcttaaaaatatatatatatatatatattttttttttcagaaatattttccagtagagaactagaaatcataaaagaaaaaaatttagcgagcggatcacctgaggtcaggagttcaagaccagcctggccgacatggcgaaaccccatctctactaaaaatacaaaaattagccgggcttggtggtgggcgcctgtaatcccaactgctcaggaagctggggcaggagaatcacttgaacccggagggcaggggttgcagtgagccgagatctttgcactccagcctgggcgacaagagtgaaacgccatctcaaaaaaaaaaaaaaaaaaaaaaaagccaaataaaaattggatggaggctgggcgcagtggctcagcactttgggaggcctgtaatctgtaatcttagcactttgggaggccaaagcaggcaaactgcttgagttcaggagtttgagaccagcctggctaacatggtgaaaccccttctctactaaaaatacaaaaattagctgggtgtggtggtggtgcgcacctgtaattccaggtacttgggaggctgaggcaggagaatcgcttgaaccctggaggtggaggctgcagtgagctgagatggcgccactgtattccagcttgggcgacagagcgagactctgtctcaaacaaacaaaacaaaaaattggatggatttggcagattagacagttaaagaataaactgcaagatcgaagaagccattcagaaaataagagggatacagcaggaaagataccaatcatatgggtaattggtatcttagaaggaaattaaagaggtgaggcagaaatatctgaagagctaatggctgagaattttccaaaagtgatgagaaaaaaatcatgccaaagattcaaaaagccttacagaggccaggcgcggtggcttacgcctgtaatcccagcactttaggaggccaaggcgggcggatcaccacaccatcctggctaacacggtgaaaccccgtctctaccaaaaatacaaaaaaattagctgggtgtggtggtgggtgcctgtagtcccagctactccggaggctgagtgagagaatggcgtgagcccgggaggcggagcttgcagtgagcagagatggcgccactgcactccagccagggaaacagagcaagactccgtctcaaaaacaaaaacaaaaaacaaaaaacaaacaaaaagccttacagaaaccaagcaggcagataaataaaaata

SEQ ID NO: 1241177 - DNA, 4001 bp, Homo sapiens
aagcatcctcccttttcaaactggcactcttccccaaccttgaggaccactaggcactttgtttttaaagccacagtaagtattttaataaatatgttgtgttatatgtatgttatatagcgcacatacttttgaaagaatgagttctttttacaattgtattgaaaaaactccttcactttacttgggacaagcaaataaactaacaacatcatattgttttccgaggttacttttatggagaagtattgttatgaaaaaagggaggcatctgaggagtggaaacagagaaatgagtgactgagatcagtgtcttattttgaccatcttttccaagtgctgcatcctcccaaacacaacatgaactcaacacttaataaagctgcagtcctacgtgttttatttgtgtaagaaactaagtccaaaacattctgcaacgcgagtaaaaattcacttctgcaatatattaaacacacatgaacacagtgttttcagtttgaagcaagatactgtggactctaaaatatccagtaactatatttagtatgaagagtggatgtttatatctagttggccaacacattgattctagtcatccacttaggaagaagagggtgtggcaaatctgcagcctaggaaaacacaaactcagtttcttcgtaatagatactgattcgttttgtttacaaagattttaaaaaacagttatgcattcaaatactttaaaaacgaaaataactttatggtttgatttatttccgttgaattttaaagaactttgtagcaaggtttaagattgcttaaagagcctgagttcggattcctaaaatagtgcattgggaaggaagcataaatctctaggatattttcttcacattatcttcagacatgaccaaatgaagtgtaactacccttacactctaagagaattaaactataatgacatatgtggcatgaaactttagtctttctctggaaaaaacgggaggagggaaggtttggaagaactagaggatactagtttcatcatgaatttggtgatttgttccaaagtaaattgcaataaaaatgaggggtggggaaaaatgatggaaagatagctgtgaagagctttacttaaaattgtcttagctgtttagctaggaactgtaattagaaggactggaggatgtattccgctggctttattctccaggctctacgggccctccaatttgaataaacctggaaaactctcctgacctctatttctttgacaaaacatctttctttcgtggtgacttccaagggaggaaattggtaccccaagctagccgtgaggaccccaccacatgcccaaggcattgaacgccagactccctaaggactcagggattctaaaagtcccctctcaaatcagcgcctaaaatacgcctgtacagccacgcgctaccgctcccagcagcgcgggacttcgggacagggacaaggcggacgctaggcgtgcgcccccggggagcccccacgttccggccacgcccaccctggccctgggcagccgcgcccgggaggcctggcaccgaggcgggcgggtccccgagttaggggcccgcgagtcggctgggcgcccccgcctctgcccgggcagtgccccgccgagtgctcagaactgcggacaaataggctggagggccgggccgcggaaggcgttcccacaccggccagtctccgtccaccaggaagcaaactcctcgtacctccctggggaccgaaaactgccggtgccgccgcacccgtcgccgccgccgcctgctcatggagagcccgggctgccgccgccgccgccgccgccgctgcctcatctatgagtaccgccggctgtctcggcctcccccggcgtgagttctgggctctggcatggcctccatggcagccgccgcggcgggagccacagcagctccagcgcccaggcccaatctcactggacccacggagccaggacagtgggacacgtcgcttcttattacggaggaagattcggcacgacctccgcccccctccccccaacccccccgttttcagccgcctgacagcgcagctgcgcaggcgcgaagacgccccagcctaatgtgcgtgtgtcggctgtgtatacagcatccagattcgcccaatgggaaccaggatcaggtgtggggggcgggacctcgcagagaggggcggggttccactggtagaaggtgggtggggaagccggaagtgggcagagtttgcacggaggcggagctttattggcaaacctgattggctttttgaggtttgtaccattttaggacttgattttagtttgcttctgggtcttgttttctcaaattcttaacctagaaagaaagctttgttttctcagtaaattacggttttttaagcgtttaagtatttacttagaaaacagttgaattgatctgttaaatgccagctttagtgttcaagttaattattggccaatatactgtaacttacagtggaagttaaccccattttgaaaaattagattgttttaattccattgtgaagttgaaaaaattgggttttggagataataaggtcccacacagcaagtgacggagctggaaattacagttaggacaacttaatgctagtttgtgggctcaaccactatttctgtttattagggccgagtttttgtatctcccgtaaagaagcaaggccctgtatggctctgcatctggagaacacaggccaccctgcaaaaactacctctccttgcaagtaggcatggagatctggttgagattttccccatccagcctttcaacaaataatgagggtctggaaagttagctctaacgttcagaacacgtgagggctaatgagagagctcaaggctatcctagtaaatcagtgtggttttccgtcacaggctgagcctgggagaggctggatgccttcttgaccggtgtgatggtcggccaaagctatggaggggaacttcctcatggatctctctaaaaaagtctagaaatggaagagagacttccatttcttgagttttggctctgcccaaaaaagaataattaatagctctggcaaagcctgctctttttagtttcctgttttttcttatttcttatggtattttatagatgaggaaactgaggctcttagagataaactagtgtgttggaaaacttgcaaaaagttcactctcaatattaatcctctcctacaggtagaaaagccctttaaaaatgtttgtaaatgtggattatgtgtttaattataaatctctcacaagacatggagttcattttatactgattaggtcattctcttcctgaaaacagccatagtatggtggatgacaccatttctggagaatagtattgagattgctcattaaactctgccgagtctcagctagatggaggaagcatggattccttgaatacttggataactcacaaacatcactgaggcctttaactgaaatttccattctgcatcttttccaccgtcttcaaaatctgacatctgagttgtagggtttttttagatatatttactgaagtataattggcatagaatatatagagcatacttaaagtgtataatttttatcagttttgacatatgtataaccccttaaaccatcactgtgatcaaatgagtatgcccatcacacttaagtttctgcttacctaccgccccccaactctgccttttttttttttttttttttttttttttttcagaatcctgatctgttacccaggctggagtgcagtgaatgatctcggcttattgcaacttccgcctcccaggatcaagagtttctggtatctcagctttccgagtagctgggattatagacgtgcaccaccatgcctagctaatttttgtatttttagtagaggcagagtttcaccatgttggccaggctggtctcaaactcctggcctcaggtgatctgcccacctcggcctcccaaagtgctgggattacag

SEQ ID NO: 1241178 - DNA, 4001 bp, Homo sapiens
ctggtttttgtggtacacaaatgtagccatttgcttggctagatctctaagtagctgacatttaaagggaagctgaaactagcttcagatacttctcttataatcaccaagtaaacacaatatggaaaaataagattgacctcacatcttgcttagggaatgagttttcattttacaaaaattaaaagcagtttccctctgcatagacagcttccctatgtgagaagttttttaagttcaattaacaaaaatacaattccatacaccacttttcagacaaacatctacagaataaagggcaaaggacacctttaggtggggagtggacattttccacagcagataaacccgttttcctcattttgattctacacttatatttagcatcgaaccatttccgtaataccaaattataatattgtaaaggtctggcaggaaactccggaatatgtagtaagaagcctcccatgaaaacaaagacaaattcacatctctctaattggctccgttgctgtagctaccttagacttggtgagccttgggagtttctatgaataaactcaactaatatcaaatctgtctgctgcacaagtgctcggttcattattgtgacaaatacaaaaaaaaaaccactttattcataagagcaagtcagagtacctttaaacctctgtgtgtaaaagaagcaatgttctgatactgtgaaaccttagccggttgtgtgtttcaatagatgctactgtggggttctactggcatacgtgccgaagtcagtcaatgactgtagatgcttggctaaaaggagactccctggagcccaacagcatcacttgtgatcaaggaaatacaccaaaataaagagaaggcatgtgaattctgaccactcaagaatttttgccctttggagaagagatccttcagaaccctagggatggttttgtgaaccactccccactccccctcaagtttcaaactaaaacttccaaagaaagaaggcagacactttaaagcagccatctctcctctcttccacatcagttctgcactgaaattggatgccaagtgctaggcggatcctcgggatcatctcatctttgagaacccaaactcttaagggtcctgttttgttcactcctgcttgcctcctcgccagccaaggttctacatgtttggaatctacacaagtcagattctgtcagtgaccacgaggcacatgagacatttgggcacctccggcagcacctcccaactattccggagtctcaagcagagcctcgcctcccccaggtctaacccgcaggccctctttctaattaagtgacctttccaaggagcgtcctccagccgcgtcctgggggacgagtcaggggctgagcaaggaggctcgacatctctgcgctaaacactcaactgtttgttttctgcaaagtggcaggacatatttcggtggtgaccgcagcaacgattcgctcctcgattgttaggctctgagtggcattggggacactgcgatcgacggtttgaaaggagtaaaccgttgttttcgggaacttctctctcactgctgtgggattgcgagcggagggagaaagagaaagaaaagcccacacaaaagcagccagccctgcaagctccgccagcacaaaggccggctcgctggtgcggagctgggaggctgggctggagctaggagtgcggtgagtcctccgaggcctgcgcgccgcgcccagcgcgcccagagctgcccccgcgcaccccacacctgggcaccgcgctccggaggaggatcggggcgcacgcctggcgcacccagggctgcaacgctcccgggactgttacgctcgcggagcgaccccacgccactgaggctccggttccgtccctgccccggcgccacgtctgcagccgcggccgcccaagtggccggagccgggcccgtcctcacctgtgcgccttcagctgagcagcgcgcggaggacagaggcagcggcggcgcgggcgctcggcatcccagcggcgggccctgcggcggcggcggcggtagcggcggcgactccctccgctgtctgggacgctagggggagggcgcttcgctttgttgcttattcataaggccgcggctacggccggggattgggcggtgagtaggtgtgcccgccctggctctgctggcactgacagccgacgccgtcgcccacgcccccctgcgcccacttccccgcctccgctctcccgcgggggcggcttctgctggagtcccggcacctgggacccctcggagatcccgtgctccgcttcccctctttaagcgggagcttctgcggcagctcgcctccctatctacgcggaagagaccagggcaccgtttacacgagaaaaacctcaattttgctgtctttggttcaggcaaggagcgcaaatctgagactgcagtgttccttgtggaaactatggacggcttggcggtgcccttaagtaggacccttaaagtaactctacacagaatgtcccttctcagtccgtcggagaagttgcaaactagtgctagtcacaagtaaggtttattgagcccttactcctgccaggcacaagagtagatgctttgcccattactttacctgcttaatctgcacgatagaagggtagatattgtagttctcatttaccagggtaggaggttaaggctaagggctgtgtaacttctccaaggtcatccggctcgcgtggccaccgggaatttgtgtcctccattcttgagcctctcaaggactgttttctttttctgttacttctaatggtgtggaaagaggtgtcggaatctaaaggcccgttttggaacaacctccacaacgcagcattttacatttgcagagcactcttcacatttgtcccttattgtgcttattagctcccttcttcataataccttagtccccttttgtagttaattataaacaccttgaagtcagagcaaaagctggctcacctttgacccccacacctaacacaatgcacaggtatgtactggtttctgtttgtttgtttgtttgtttttgagacaggatctcactctttcccccaggctggagtgcagtggcgccatcatggctcactgcagcctcgacctcctcctgggacctcaagccatcacccacctcagcctcctaagtagctgggaccacaggcatgcggcaccacgactggctaattttttattattattattattattattattattattattattattattattggtaaagatggggtcttcctatcttgccctggctagtttcaaactcctggactcaagcgatcctcctgcctcggtctaccgaagtgtttgaattatagacatgtgccacggtgcccagcaggtatgcactgttacccattccccctccctttagaaattattatctatgtataatcatgcattgattaattaggggaatacattctaagaaatgtatccttaggcaattttgttgttatgcgagcataatagtatacttacacaaacctagatggcatagcctactacgtaccaaggctatatggtatagcctattgctcctaggctacaagcctgtacagcatgttactgtactcagtactgtaggcaattgtaacacaatggtatttctatatctaaacattgaaacaatacagtaaaaatacagtataaaagataaaaaatggtgcatctgtatagagcacttaccataaatggagcttataggactggaagttgctctgggtgagtcaacgaatgatgagtgagaatatgaagacctaggacataactgtacactactgtaatgtacgtaaccttacactactgacataactgtatactattgtacataactacactactgtagttatgtaggctataactgtatgctacactactactgtagtgtaaacaatgtacacttaggctgtactgtagacataaacattttttcttcaataataaattaaccatagcttac

SEQ ID NO: 1241179 - DNA, 4001 bp, Homo sapiens
aaataaatgtcccttgtacctcatctttaacataaaagggctagattcagtgatatctaaggtcaatcgtatcttaagatgctatgaattcttgcaaacatttattcgttaatgacactaatagaagccttctgtttttgacaaatgtgaaatttctattcatcaattctatgtcaattattaaacgcactttcaactcacttatttctgttactagtgattaaatagaagataaaatggacataatttcttaaaaagattaaaataaattcttaatattctgtattcttttttgattgcagaaaatataaccaaactctaccttttcagaacgatgaagaaatttagaactctattttttatagttgttttgttggatcttaaaatactatacagtatttgtgtgatttgccttgctatttctctgataacattatttttcagaattattattcctgaaaatgtggcatctatcgattttgatccctgatttctggtggtttctataaagataaaaaaaatttcactcaactatttgaaataacttgttattagagaaaaataacatcttttccactgcacctaaggggtcatttctacttaagacaaaattcttcataaaataattaaatgctgaatatagaagtttattatcaaacaactatagttaagtcacatctatttcgtctagggtaaatagtttatttgtcgctagagagaactgacacaaaagttataacgccaacaataagttgccctaaacagagcaattgtatgttatatgccataaggaattaaaagactaaaatatcttgatcatgcaaagctacttactattaattctttgaatcatctcttctttagtacttatgtcttgctcatactggaagactaaaataaataattatcttgtgacttcaattcattgttaaaatatcaaatgatcatacaaaaagctacctattttttcactttatacctaccaaattctagcaaaagtctgtccaaactgacaaacaggctgtcattcatcttggatactatgttaaatgaaaaaaaaaattataagattttctgaagtcgtatgcaaaacaggatatatttcgtaacgaccttttcaatatagcattcttcacaggaacatgtgggcagagccagaactggaagacgagaggcccccttgagcccatggcgacattcccagccccttcccgggccaagcccaacgagcgcttcagaaatcgttgttgagtcggggcacgacttgaagttttggggatggggtgggaagcacccgcataaccgcttatgcgtgggattgcaacaagcatccggatcttccagggttcacggacacccagatttctccacaggatatgccctttaaagtaaacgctctgaatatgtcccttggtggcgtgtgtacaaccacgtgtagcaaaattctaacgaaagcccttccccaacacccgggtaaacctagagaaacagtgcgatttcgcatttacgaatttaccacgaagaataaaaaaattggaggttttcacagaacagccaattcgcattacggcatacgcctgaggcggggttcctgtctaccgtgcccctcagagcccaggaaccacagcccgtgcgcctcccgcagtgggagttcgccggccgactcccaccctcacagcctcctgtcctggcttcccctcgcccgaggctgcaacaccgcatcccccccatcccccgccgcgccctcagcctcgggccgcaccaacccaggggataaggcgactccggtcgctctgaggggcagggccagccagccccctcccacccacgcacacgctccccctcagagccgccggcccagagaaaaaccgccacatgcagctcccttccacacgcacctaaacagctcctctggacccgaacgcccacaccctccctccctggggtcccaaactccactcaggacgccacagcggatcctaactacaaacggtccccggagccctgggctggactcgctcagccccgcccccacgcccctggtaccagccctgagagaccccgcggagcacgccgcgggagccgcagatcgcgctgaagagcagcgagatcgcgctctggacgagacctgcgcggctgcaaccgctccttcttcgcgggtggaagcgcggaataagccccgtaaaaccacagaagtgggtgctggagttagaggaccctcaaagaagtagagacctgtcagagactctcctgttttcttgaagacaagtgttttttaaagcctatttattcctcttgtaacaagtttttaaaaatattttggagtacaacaataaaattgatattaacttttaacaagagtaaaaaatactcaattcaataatcaaaattcaattctgaattcagcatttttcaaaacatcttaaaaagcaagcacaactcaaatacatattagttgaatggacattttgagactgactcatttgctcagtttcaaataaagtacattttctgcccaaaatgctgtctttaggtaatttatgctcttaggctttgtctgcctatccaaagtgaaataaagagtgtaaacaaaatcattaagcagttcagtcctccaaagtgcctcaatcctttgtatatttctcgtagaaatgtttttaaccgtaaatgatcacaataattgtctcaagtcaccaaaacctaagctgtttcacggaatatttaagtgaaaaagaaggtttcagaagtttttcttccttaagtgcctcagatcagatatgcataaccaattttattatagtgtgctgtcatattgctcactagttggtattaatattcaacaaaactaacatgttttgataatgtaacaatttagcagatttattcttttgtgtgtgtgtgaaaaatcttttacttagtttttccagctttattgaggcataattgacaaataaaaattgtatttaccacgtacatgatatttggacgtatacatacattgtgaaatgatcaccacgatcaagttaatttgtataacacatccatcacctcatataatcatttttgggtgtgtgtggtgagaacctttaagatctactctcttagcaagtttcaaggacacaatacagtattattaactatagtcaccatgctgtacattagatctccagaacttattcaatctgcctaactgaaacttcgtaccctttgaccaacatatttcctcattcccacctcctccctcccccagccactggcaaccaccattctactctctgcttctatgggctcagctttttcagattccacctacaagtgaagtcatatagtatttgtctttctgtgcctgacttacttcaattagcataatgtcccacaggctcatccatcatccatgtggtcacaaatgacaagattccttctctgttaaagctgaataaaagtccgtgtgtgtgtgtgtgtgtgtgtttatccattcattgacaaatgaatggataggttgagtatatatcttggctattgtgaataatgttgcagtgaacatgagagcacagacatctgttccacaaagtgattttatattctttggatatgtattcaaaagtgggattgctgggtcttatgatagttctatttttaaattttgagaagtctcttcactgtttccctaatggcggtacccatttgcattcccgcaaagagtgtacaacttttccttttttccatatccttgtcaacacttgttgccttttttatcatagtcattctaacaggtgtgacgtatcctattgtggttttgatttgcatttcgctatgattattgacgttcagcatttctttatatatctgttggcgatttgcacatcttcttttgagcaatgtctattcaggtcctttgcccatttttaatcagattgtttgttttcttgcttagttgagttccttatttagatattaacccaaatttactcttattacatttgtttatatttattaactac

SEQ ID NO: 1241180 - DNA, 4001 bp, Homo sapiens
gcaggctgagttagtgtgaaggggtaggaggagggtggtctgaaccgggtgaagtcctaacaccaggtgttgacaggtgtgctacattggggcactaagcgctgtgtgagggtgtacgtgtgcgagtctcatgtattccaacgggccccagctcagctgggggcagttttctgcatttatctactctttcttgtgaaatttcaactatgctctaattgttccctaatacatcaatcacgctggaaaacaaatcctgtattcaaaacaagcattacagcagaccttactctattaagagtggatctcatcaggattccagggaaactgcttcagaaaacagtccggccgggcatggtggctcacgcctgtaatcccagcactttgagaggccgaggcgggcggatcacctgaggtcaggagttcaagaccagcctggcaaacatggtaaaacccagtctctactaaacatacatatatatatatatatataaaaagttagccgggcgtggtggtggatgcctgtaatcccagctactcaggaggctaaggcaggagaactgcttgaacccaggagacagaggttgcagtgagccgacacagtgccactgcactccagcctcagcgacagagtgaggctgtctcaaaaaaaaaaaaaaaaaaaaaaaaaaaaaaagaaaaggaagagaaaacaggccagccctgagaactacaatatctttatttccttcctcactggttttatttctgatctctcatgatggtgcttgggatgaaccatttgggaagaagtggcagagaaagaggaacaatggaaggaagaagacaggaaaagagaaggagcggaagtgtcaccaaacggtaaacacccacagtctgctctgaaagagagcagggggcaggggcctgaaggctgggaccctggctcccggacaggtcggaatgggcatcacccaattcattacaagctcccggacaggttggatcccgcgtcacccaattcattacaagcaagttgaaatgtgatcatgtgattttagaatctctgagacttttgaactcagcagattcagaattcagacaaaaagctcctcctcaaatgccctgagctggggccagtgcagcccccaccaatggggaatggacaggctgggggaggaatggtcagaaagagcgacccagctcaggtggcccccacctggccttcgtgtgacccatttctgcagcctcctctgccaactcattgcttccctggcctcaggatgggactgccaaccacatggccagggacgaaggccaggagagaagcagacgctctggggctgtcagccccctccctggccagcacgccacagcattcgagggctgtaggcctcttggtgtgtacacgtcccactcaacatggtgaccacagcacagcagaaatacctcagaaggtgggacggcagaagttcctgtcacccaaggtccaccctggcatggttggtgagaactgcactcttttggggcagaagtggttctcggtggctggggttctgtgggtccctcgaggagttcaagggactgtgagaattgtccagacttggctgaagattcccgaaagccttcaaactccccccaagtgctgctgtgttccccagggtcaggacatcgggcagtgcaggtggaaccgccctcacggggcatggagatgctggctttcccatcggacaggagaaggtcggggcaggtccgtctccattccaaactgtcatcactcagcctctcaggtgccactcggagggaagcgctggctgcttcctcctggaggtcactcaaaggctctccccccagctcccgccggccttgcatcttggagcccccaggccagcagaggcccgatgggcagctgctcaggagacatgcacgccggggtgctggccgcccaggactgcccaaccttcccctgccctggagagggccaggggacgctgcaggagtgccccgggctgcccagtggctgacggtggaaagtgcccacgtgctgctgtggaactgacacaaaccacaggaatggcccggtcgcccgggagtcctggcttcctcccacgcaggcgggcgcggagtccgacacagaggcgcgtaccagacccacggcaggtgtgagaggggcggcccaaggtggggctcctgctctggagagagccgcgagggggcctgggaggcccacgctggccagaggagcgagagccgggcgcccgcgggagtcccaagtgggaaggagtgggtgcggcgccccggggcctcccgagagtccctctcgcacgcggcccgcagagcagccctggaacgcctgggcctggacagggcccgaggtggccggctaagcgcctggcccacggctcccgagagtccccgcacccaccttggtcgccgcctcggcggggccgcgcgggaccagggcgagagaaacctgcaaccagccgttccctcctgcctgcgccgccccgttgcctggcaacggcgtgcgccagctccgcttccggcgtccgtcgccgtggcgtcagcacgcatccggggcgaggccagcgccggcccccgccgttcaggacccgccccggacccgccctccctgccccgggccgcctccgctgcgggtgggatcgggcttccacactggccgagccctgggcgccgggccgctcgagctttctgtccgtgctcagttcgccgcccgagtggttctttcttttttttttttttcttttttttttgagacggagtctcgctctgtcgcccaggctggagagcagtggcgcgatctcgactcactgcaagctccgcctcccgggttcacgccattctcctgcctcagcctcccgagtagctgggactacaggcgcccgccaccacgcccggctgatttttttgtattttaatagagactgggtttcaccgtgttagccaggatggtctcgatttcctgacctcgtgatccgcccgcctcggcctcccaaagtgctgggattacaggcttgagccactgggcctggccctagagtggttctttcttcctcacgacgagctccccaggtccgtcccagcgcacccgtcacccgcagccccttctcccggcgccccgcagcctaacttgccgcgccgccgacccctctgtgggtgcagctgagcgacggcccctcaggaccccacctgtccctggcgagagccaagtccgtcttgctgactcctgaatcccaaaacctcgcccgcccctaactcgtccccattcctgggggaaggagctgcggggaggctccacccctccctcgcaggccgcatggagtgctcccctcctttgtcaccagccagacccgggcagagcagggctgacggacagcccctctccagccactggacgaccaaggagctaggctggcctctggcagctcccctccgggcttccaggccttctgccatctgccctcacccccagactcaaggagtcaaccttgactccatctcctccctggccttcccagactggcccccatcactgcctcctctgggtaaggggagggcctggccctggtgaagccctgaaccatgccacctactgtccaccccctatctacctcaggctcgcatttctcccaccctggggcctggggccctgcctggactctgtccttgcttgaatcaccccttccctccctggtccttctcagccaagctacagaacaatttaattttacaaatgacaagatgagatcattctctgcaccttagacccagcctcctgtccccgctccttcctgaggggcagagcagccgggccatgcagtatggaagctcttcggtcagactgcccaggactggatcttggcttggccaccccagcaccgcagtgaccctaaggatggtgatcaggagctggctgggtttgtagaccaggcctgggcctgtcttgccagcttaagggcagtgtccgttcccactgctgcccctcatccactgcacgtccttgc

SEQ ID NO: 1241181 - DNA, 4001 bp, Homo sapiens
gccgctgccacagacccacctgtcagcgctggcctcacagtggacacaccactgggtacctgtgcccctgagccagcccctgccaccttcaggaccccacaggagctgtccaccccgcaagtcagcccccaccaggatgtggtggcaacaggagctgtcttcctccccctccagtgcccaggagggagtggctttcatggcacagaccccatcccactgttcacagagctggaagtccactggtaacttttgggaacagaaaggcaaattctgtgagctctctgacacccgtttctgcccaccattgcccaccccactgggctccctgcccagccctgccccctacaaggaccaccgggaaccacgggctcaggctttgggtaagccagggcaggaaggcccacatccagccaaaagcctgtgccaggcctcacgggacgggctgcagggactggcagctggcggcctgcagcacgggacacagcccctgagtggaagccctgtgccagctctaccttgctcaggagggcgcactgctcctgctgactggacaccagctggcgccaccggaaccgcagctttcccatcagccactgcacatggcggacatccacaggaccctctgcttccatgtggggtgcaggtgggccagggctggccagggcctcacactggagaggggcaagggtcaggccctgctcccaccccaccctgccccccagaaaaggccaggatggagacggtagtggaggcacagccaaaaacaacgggtgctccctgcacagggagcctccgtgctttcagctgggcagctgggtaacccttcatgggactgccctgaggagcaaagcagacagagggggctgacccaggcctgcccttgctctggccccaggagttgagaccagggctggctcagctcaccctcacccacacgcacctggcacacagtcatctcgtcacccagaggcactcgggcctgggccagcatctgctcgggcacaggtcctcgggccaagagccaggacagagccagcagcagctcccgactgccctgcgagccatcctcaggtagttgtgccagtgccagcctcgggtagccctgggagcatagtgctgacttcaccaagcgggcttggacctctaggacagaagaccaccaccttagggggaccacccacctggaggtgacaccacctggatccctccagagacccccacaggtcacttgagcagaagctcaaggcctagttcagaagagatgatagtgggagagctagaactcagaccaggatgaggagaccaggggccaacagggacgtccccagggctttgtaggagcagaagccagtgctacccaagggggtggagctagggcccatcagggggcgtggcttaccggggaaggcggagttttgaggagcaagcggggtcagtgttgggtgggggctagagcctgccggggcggggcttactggggaaggcggggctttacaggagtaggcggggccagtgctaccgggtgggcggggccaggagcggggcttacccagggcgagcgatgccaaggcgttgcccgcagggagtggcgagagcacacggaagaggagctgccagagcgcggaggtctgcggaaaataaaaagcgggcggtcagcggagccggcccaactccctgcgagggcccgggaccccacccggcccgcctgccctccgcgagagcgtcaccgcctccggacggtcgaacttggcgcggcggaagatctcggggctgggtcccgagggcagcgaccgactcaacgcggcgatggcctcaggcagggccccggcccgggccccagccgcggggtccacccgctgccgccgcctccccatgcagccagcaccagcctctttcggatcgcccgcctccgccgcggcccggggcctgcgtccaatcaccgcacgggccgggtttagtgcggcggctgggacctgcgcccagttaccgctccggctggaacctgagcccaatcatggcacgggccgggtccagcgcccaatcaccgcgccggctgggacctgcgcccaatcaccgcgctggccgagacctgtacccaatcaccgcgctcccgagacctgtacccaatcaccgcgctggccggacatgcatccaatcactgcgtcggcagggtcccgccttcgtgtccaagcccaatgaacggttcccctggagtttgagtgtagtctattctgtctcgtgcggacccacttccgggctcctggcagggctgttgatatggagaacaccgcagagtccgcccttgcaggctcaatcgtcacgacacccgacaccccgcctcgctcagaccccacccatcagcgcctcacgccccttggcaacctagcaaccgccgggcgggagcgcgcagactccggaaggcgccctgtggggccgcttacgcagtcggagcggacgagcctcgccccatcgcgccgccttccaggctgggccgccaggaggcgcccagagcccgccgcgccgcacagcgcagaccccagcgcggccggcccctggcccctggcgcgaagtcccgggcagctcccccgccccgaacgcgcagccggagcccgcggcagcctcctcaggcgctcccgatcctcgcccgcccgcggcagcgcttccctctgccgccgccacggagcagccccggaggaagccggcgcatggaagcagctgctgcccgggcgccgctgagccgggcccgcctgcacgggcggccccgaaagacgcgggccgggaggaacgtggggctgtctgcggggatggaaggtcgggctggcttctggccagcggcgcctccgggcattcgtgaagaccccgggcagcgtgtcaccggggctgttcccgcgatgcccctgcacctcccggggctgcgaggacggcgggagagggaaactcagtcctccctggacccccagccctggctggacacgcccacgagaggcgcagcccgaggggtcccggccccacctttcttctcggcctccttcgcccccgacctcctcttccaggcggccctcccggccccgcctcggggccccccccccagcaagcccctcctctccctccccgcacgccctccgtccttccccgcccgcagcctccttccctccggcgcatcgcgatctccttcacggcgccagtaggaggactgcgctcctcaccccgcccacgcgggtttcttgaagctaaggggcctcctcctcggagcgcctactgcacctgccgagctacagggcggcgggagccagggggatgggagcaggaggtggggaaccgcggcgccacagaacttggcaggaggcgtgggggagatggcggagcagctctgcggccttgttcagcgctctcccaacccccgagcttgcggatttttctctgcaccaggtgtcgctgtctcaaagatctcagttccctcagctccacccaccaccgtccagccagaaaccagcctcacctcagcaccccctgcccccatcccatcaaaagtgctgtggctcccagctcttggaattccaggaatcccccaatcacccccacacaccccaccctgcgggccaccctagactgcccccacagcacctgtcgagctgagcctgcagcacacccaccacagccctaaggcagggccagacccctgggctcttttaaaccagtgggtgtccggaggggtggccttctgccaaggccggtatctaagtagccagtgtggggaagagggtctctgaaggtggccagtcagcagcggctggctgagttgacaagggagtttccagaaggccccccagcccctgtgcacggccggtactcaagttccccactggacgccgggccactgggtaagtccctgggcacagggtagatggcagatgaggacgcacatggggcagtggtgcctgggtcaggggcagagcagcctcatcaggcccttgcagaagctgggcctggcctggaggggt

SEQ ID NO: 1241182 - DNA, 4001 bp, Homo sapiens
ctcaggtagttgtgccagtgccagcctcgggtagccctgggagcatagtgctgacttcaccaagcgggcttggacctctaggacagaagaccaccaccttagggggaccacccacctggaggtgacaccacctggatccctccagagacccccacaggtcacttgagcagaagctcaaggcctagttcagaagagatgatagtgggagagctagaactcagaccaggatgaggagaccaggggccaacagggacgtccccagggctttgtaggagcagaagccagtgctacccaagggggtggagctagggcccatcagggggcgtggcttaccggggaaggcggagttttgaggagcaagcggggtcagtgttgggtgggggctagagcctgccggggcggggcttactggggaaggcggggctttacaggagtaggcggggccagtgctaccgggtgggcggggccaggagcggggcttacccagggcgagcgatgccaaggcgttgcccgcagggagtggcgagagcacacggaagaggagctgccagagcgcggaggtctgcggaaaataaaaagcgggcggtcagcggagccggcccaactccctgcgagggcccgggaccccacccggcccgcctgccctccgcgagagcgtcaccgcctccggacggtcgaacttggcgcggcggaagatctcggggctgggtcccgagggcagcgaccgactcaacgcggcgatggcctcaggcagggccccggcccgggccccagccgcggggtccacccgctgccgccgcctccccatgcagccagcaccagcctctttcggatcgcccgcctccgccgcggcccggggcctgcgtccaatcaccgcacgggccgggtttagtgcggcggctgggacctgcgcccagttaccgctccggctggaacctgagcccaatcatggcacgggccgggtccagcgcccaatcaccgcgccggctgggacctgcgcccaatcaccgcgctggccgagacctgtacccaatcaccgcgctcccgagacctgtacccaatcaccgcgctggccggacatgcatccaatcactgcgtcggcagggtcccgccttcgtgtccaagcccaatgaacggttcccctggagtttgagtgtagtctattctgtctcgtgcggacccacttccgggctcctggcagggctgttgatatggagaacaccgcagagtccgcccttgcaggctcaatcgtcacgacacccgacaccccgcctcgctcagaccccacccatcagcgcctcacgccccttggcaacctagcaaccgccgggcgggagcgcgcagactccggaaggcgccctgtggggccgcttacgcagtcggagcggacgagcctcgccccatcgcgccgccttccaggctgggccgccaggaggcgcccagagcccgccgcgccgcacagcgcagaccccagcgcggccggcccctggcccctggcgcgaagtcccgggcagctcccccgccccgaacgcgcagccggagcccgcggcagcctcctcaggcgctcccgatcctcgcccgcccgcggcagcgcttccctctgccgccgccacggagcagccccggaggaagccggcgcatggaagcagctgctgcccgggcgccgctgagccgggcccgcctgcacgggcggccccgaaagacgcgggccgggaggaacgtggggctgtctgcggggatggaaggtcgggctggcttctggccagcggcgcctccgggcattcgtgaagaccccgggcagcgtgtcaccggggctgttcccgcgatgcccctgcacctcccggggctgcgaggacggcgggagagggaaactcagtcctccctggacccccagccctggctggacacgcccacgagaggcgcagcccgaggggtcccggccccacctttcttctcggcctccttcgcccccgacctcctcttccaggcggccctcccggccccgcctcggggccccccccccagcaagcccctcctctccctccccgcacgccctccgtccttccccgcccgcagcctccttccctccggcgcatcgcgatctccttcacggcgccagtaggaggactgcgctcctcaccccgcccacgcgggtttcttgaagctaaggggcctcctcctcggagcgcctactgcacctgccgagctacagggcggcgggagccagggggatgggagcaggaggtggggaaccgcggcgccacagaacttggcaggaggcgtgggggagatggcggagcagctctgcggccttgttcagcgctctcccaacccccgagcttgcggatttttctctgcaccaggtgtcgctgtctcaaagatctcagttccctcagctccacccaccaccgtccagccagaaaccagcctcacctcagcaccccctgcccccatcccatcaaaagtgctgtggctcccagctcttggaattccaggaatcccccaatcacccccacacaccccaccctgcgggccaccctagactgcccccacagcacctgtcgagctgagcctgcagcacacccaccacagccctaaggcagggccagacccctgggctcttttaaaccagtgggtgtccggaggggtggccttctgccaaggccggtatctaagtagccagtgtggggaagagggtctctgaaggtggccagtcagcagcggctggctgagttgacaagggagtttccagaaggccccccagcccctgtgcacggccggtactcaagttccccactggacgccgggccactgggtaagtccctgggcacagggtagatggcagatgaggacgcacatggggcagtggtgcctgggtcaggggcagagcagcctcatcaggcccttgcagaagctgggcctggcctggaggggtggggaatgaggacagggttggggggtggaaaggaggaaggccaggagttcccataactcccccagagcctctcagaaagggagccagcatgagctgattcaccctctgacccgaggccagcctcgcccgcccccaggcctctcggcctgctgagcctttggctggtggcctgcaaagccccccttccccactcccagaaggccaggagggctcagaggcacttctgaggatctgggagttgtcgaggcggactcagagtgccagggctgggtgcgggctgtctagggtggcctggactcaccctgcacagggagccctcgcctatgagaccctggaacggccccctggggagggcaatgggcagcagaagagcaggcgccggtggcagagcctgctgccaggaccccactgcagctcccttggcactccccagcacacacgcgcatgtacacacacaggttttccaagtgttcaggtttactgagagcattaggggcaacaagggagccctgggcatctggggacaaggcctggcatttgcctggacagtggccctgcaagcagccaaggatggggtctccaccacctgtgcagagagagacaggcacagacgtgagtgcagcgtccacggcctcctttggggcccacgagtggtcaggcctccctgggagggggcatccccatcccgagggtggaaccaggaggcaggatagggggtggggtcctacctacctggtttacttgaaagtgtggctctcggctccgccccgcccaaagcctgcagagaaggtggaaaaagtcaacaggctggggtggaggaggctgtggggtggggtggggtggggatgacgggagcatacctttaggcccaaacatggctgcgtagcaggggtggttgcagtagggtttgccttcgtgctgcaaagagaagggccgtgagggggtgccatcacccctggcccctgccaccagggtgggtcccacctacctcagcgtggcccccagaggtcagcgtcttcccacatttctcgcacttcaggcagggccgatgccagtccttgcccag

SEQ ID NO: 1241183 - DNA, 4001 bp, Homo sapiens
cttaccggggaaggcggagttttgaggagcaagcggggtcagtgttgggtgggggctagagcctgccggggcggggcttactggggaaggcggggctttacaggagtaggcggggccagtgctaccgggtgggcggggccaggagcggggcttacccagggcgagcgatgccaaggcgttgcccgcagggagtggcgagagcacacggaagaggagctgccagagcgcggaggtctgcggaaaataaaaagcgggcggtcagcggagccggcccaactccctgcgagggcccgggaccccacccggcccgcctgccctccgcgagagcgtcaccgcctccggacggtcgaacttggcgcggcggaagatctcggggctgggtcccgagggcagcgaccgactcaacgcggcgatggcctcaggcagggccccggcccgggccccagccgcggggtccacccgctgccgccgcctccccatgcagccagcaccagcctctttcggatcgcccgcctccgccgcggcccggggcctgcgtccaatcaccgcacgggccgggtttagtgcggcggctgggacctgcgcccagttaccgctccggctggaacctgagcccaatcatggcacgggccgggtccagcgcccaatcaccgcgccggctgggacctgcgcccaatcaccgcgctggccgagacctgtacccaatcaccgcgctcccgagacctgtacccaatcaccgcgctggccggacatgcatccaatcactgcgtcggcagggtcccgccttcgtgtccaagcccaatgaacggttcccctggagtttgagtgtagtctattctgtctcgtgcggacccacttccgggctcctggcagggctgttgatatggagaacaccgcagagtccgcccttgcaggctcaatcgtcacgacacccgacaccccgcctcgctcagaccccacccatcagcgcctcacgccccttggcaacctagcaaccgccgggcgggagcgcgcagactccggaaggcgccctgtggggccgcttacgcagtcggagcggacgagcctcgccccatcgcgccgccttccaggctgggccgccaggaggcgcccagagcccgccgcgccgcacagcgcagaccccagcgcggccggcccctggcccctggcgcgaagtcccgggcagctcccccgccccgaacgcgcagccggagcccgcggcagcctcctcaggcgctcccgatcctcgcccgcccgcggcagcgcttccctctgccgccgccacggagcagccccggaggaagccggcgcatggaagcagctgctgcccgggcgccgctgagccgggcccgcctgcacgggcggccccgaaagacgcgggccgggaggaacgtggggctgtctgcggggatggaaggtcgggctggcttctggccagcggcgcctccgggcattcgtgaagaccccgggcagcgtgtcaccggggctgttcccgcgatgcccctgcacctcccggggctgcgaggacggcgggagagggaaactcagtcctccctggacccccagccctggctggacacgcccacgagaggcgcagcccgaggggtcccggccccacctttcttctcggcctccttcgcccccgacctcctcttccaggcggccctcccggccccgcctcggggccccccccccagcaagcccctcctctccctccccgcacgccctccgtccttccccgcccgcagcctccttccctccggcgcatcgcgatctccttcacggcgccagtaggaggactgcgctcctcaccccgcccacgcgggtttcttgaagctaaggggcctcctcctcggagcgcctactgcacctgccgagctacagggcggcgggagccagggggatgggagcaggaggtggggaaccgcggcgccacagaacttggcaggaggcgtgggggagatggcggagcagctctgcggccttgttcagcgctctcccaacccccgagcttgcggatttttctctgcaccaggtgtcgctgtctcaaagatctcagttccctcagctccacccaccaccgtccagccagaaaccagcctcacctcagcaccccctgcccccatcccatcaaaagtgctgtggctcccagctcttggaattccaggaatcccccaatcacccccacacaccccaccctgcgggccaccctagactgcccccacagcacctgtcgagctgagcctgcagcacacccaccacagccctaaggcagggccagacccctgggctcttttaaaccagtgggtgtccggaggggtggccttctgccaaggccggtatctaagtagccagtgtggggaagagggtctctgaaggtggccagtcagcagcggctggctgagttgacaagggagtttccagaaggccccccagcccctgtgcacggccggtactcaagttccccactggacgccgggccactgggtaagtccctgggcacagggtagatggcagatgaggacgcacatggggcagtggtgcctgggtcaggggcagagcagcctcatcaggcccttgcagaagctgggcctggcctggaggggtggggaatgaggacagggttggggggtggaaaggaggaaggccaggagttcccataactcccccagagcctctcagaaagggagccagcatgagctgattcaccctctgacccgaggccagcctcgcccgcccccaggcctctcggcctgctgagcctttggctggtggcctgcaaagccccccttccccactcccagaaggccaggagggctcagaggcacttctgaggatctgggagttgtcgaggcggactcagagtgccagggctgggtgcgggctgtctagggtggcctggactcaccctgcacagggagccctcgcctatgagaccctggaacggccccctggggagggcaatgggcagcagaagagcaggcgccggtggcagagcctgctgccaggaccccactgcagctcccttggcactccccagcacacacgcgcatgtacacacacaggttttccaagtgttcaggtttactgagagcattaggggcaacaagggagccctgggcatctggggacaaggcctggcatttgcctggacagtggccctgcaagcagccaaggatggggtctccaccacctgtgcagagagagacaggcacagacgtgagtgcagcgtccacggcctcctttggggcccacgagtggtcaggcctccctgggagggggcatccccatcccgagggtggaaccaggaggcaggatagggggtggggtcctacctacctggtttacttgaaagtgtggctctcggctccgccccgcccaaagcctgcagagaaggtggaaaaagtcaacaggctggggtggaggaggctgtggggtggggtggggtggggatgacgggagcatacctttaggcccaaacatggctgcgtagcaggggtggttgcagtagggtttgccttcgtgctgcaaagagaagggccgtgagggggtgccatcacccctggcccctgccaccagggtgggtcccacctacctcagcgtggcccccagaggtcagcgtcttcccacatttctcgcacttcaggcagggccgatgccagtccttgcccagagaggtcaccctctcggctgcagaggcacagacaggccccggtgagacgctgcaggacgcggcgcctacccaccactggcgtacccgcctcttgcagccagctctgcccaaggccctgtgcacttagcccgcatccgcccagcctggcagcccaccctaaggtctcagcaccctccatgaggggaacatctccaatccccagagccaatacaactaaacaaagcgcggggtcgctggtccccggggcactttcgggtgcggccgggaatcttgctcctgaaggctgggtggggctagagggcgaggccgagggtcaggggtcgcggct

SEQ ID NO: 1241184 - DNA, 4001 bp, Homo sapiens
caaagatcactaaaatgtgactagatttcaaagaaatgcaggtctgaaattgtggaataatccacagtcgagccagtatttattaagcactggtctgacttgaattgttagagaataaaaatacactcagcacaagtaagaaacccagaaagcccaaacagggccacttttgttataaatttgtacaagtaactttattgcagtcagtatttaggagtcaaatactgcttgaaatagagtaggatgctagctgtgtaatagaaatgcattattatacagaagttttgttgtaatgaaatttaaattctacagtagatttttttttttgtctcctggttgtcactgcatttgtgacattccagtttctccctcagcacctcatatacctcctatgctttcactccaatctgcgaatacaaatttggatacagatattttccatacaacttctaatgaggagatagtgattctgtaacagaatgaagtgaaaatagggctcctataacaggaggttctgctctgcgagcctgtttttctctaattcatatacttttttctgtgactcttagaaatgagaagctttccattctaaaaatgcaacatgataaccaaaaggcatttcttatcccttctattatttgcctttgcatcctcttggctccccatcaccatcaccatgaacagtttttgagaattacacttgactggatttttttcctgatactttgccagctgtggagcttttcgaatattccaaccaataaacgaccattttgtcaaaaagccaagaaagaacttcccttctgaacacaccaaccaaaccacacataaaggccaaaatatacacagctgtacacttaagaacgtgagacaataaaaagcaaaaccacttaggcaaaacagtcactgaaggctttgaaccacagattcaataaattgcctactctcatttgccacatggactatatactccttggcaattatttaattattcattattctgatcctttaggagcagaaaaatatagtaaatgcacatagaaagtgcctaagtatgctaagcataggatttcttctaagctctgctttgcacacaaaatattttgatcacatttgggaagacaacggaaaaaaattcacatcctaggggatactttgcacacataaaaccagatatatttatcacttttgaaaataaaatctgatatggcacatatacacacatattgtacatatacacaaataaccccaagttataactttacaaatttgtttcaagaaacacacacacacacacacaaatgttctaatgaaaatgtgtgtgaaagacacactgtaattaaggtctttcccccttccctagggaaatgaatgtctccattataatatcccaatattaacttattggccttggacaagtgccacatcccagccacttggttttggttctgggggggtgggtgtgtaaaaagcacgcaaacggctttatgagggagcctcaaatctctctgcttccttcgatgttgcctgtggcagaaatttacattatcccttcagcccgcttaaaaaattctgtacttcccaagcggctaaatttttaaagtccctcaaccacaaaaatctaccagttcttaaaatgtgatttaaaaaaaagaaaaaaaaactataaatttggccggaaacggttgtacacggccatcctgcttctcaacttcttggtatatttaaaaccttgaccaggaaaaagaaagaggaagagagacagaaaaagaaatgggggaaagagcaaattccccttagcaacagtttcctcaccccaacactgctacagatctctatttttaaaaaatttgaaaacacacacaagattaaggaggaaaaaaaatggaaaaaggatacccgaaggtcgtatggctctttgtattcgtgtgtgtgcaaaaaggaggactcgcggagcccgagccggcaagccccgcccctccccggacgccctcccggattggccgtccgcggccgcggggcgccccgcccgcaagcacacgcgccgcgcccgaggcgccaaccccggagttgggggcggggggggccctgagggccgccggacccccgacccccaacctcgcctggaccttggcagacccctttcccacctctctccctttcactttctcaccgtcctgtcaccctttcccatctttttttctcagtgaaacaaggcccagtcaccagcataacaatccagtgagcgacctccggacactttgttaaattgagtgaactagtcagtaacattctagactgcaattaaacatcagggacttggtgcgtgggccctactccggtttccaggtgaaatgtctctgggtcacgtgtgttgcttaacacccccacgtttaaatgaacattcacgtatggaacatctttctgaagtcttacacttcagcccgagctcccagtttatctacctggctcagaccacattctcaaaactaaagtggctcctctttatttccaggaagacagctggtatacctggattttaagccacccataatctggtcccacccacctatttgttatttatttatttatttagacagagtctcgctctgtcacccaggctggagtgcagtggtatgatcttcgctcactgtaaactccgcccctccgcccccacccccacccccacccccaccccgcccaagcgattctcctgcctcagcctcccaagaagctgggactacaggcgtgcgccactgcacccagctaattttttttgtttttggtagagacagggtttcgccatgttggccaggctggtcctgaactcctgacttgaggtgatgtgcccaccctgccttttttttttttttttcagtgatgtgatctcggctcactgcaacccccacctccgaggctcaagcgattctcctgcctcagcctcccgagtagctgggattacggatatatgccaccacgcccggctattttttttttttaagtagtgacggggtttcaccatgttggccaggctggttttgagctcttgacctcaagttatcctcccgccttggcctcccaaagtgctgggattacaggcgtgagccaccgcgcctgggcacatatttgttcttagttccctctacgctcgtcttatcaatcttgtattattcctttactcaagtggcttttttttttttttttggcctgaattatgcgtctccccttccctgactggtcaatttttatccattctctttcagcacagactgcttacttccttctctccgctcccatcaacatgaatttcatgtgtactccagttagcggcacgtaactctaccttgattcacatattttagtaatttcactccagtaaactgtttgaggtcagtgatcatatcttaaaattgtttttccatccaggaactgtttgattcttactgcagtagctggcataattgtagatatttagtaaacactgaccaaaaaaatcatttatttatttatatttatttttgagctggagtctcgctctgtcgcccaggctggagtgcagtggcccgatctcggctcactgcaagctccacctcccaggttcacgccattctcctgccccagcctcccgagtagctgggactacaggcgcccgccaccaagtctggctaattttttgtatttttagtagagacggggtttcaccgtgttagtcaggatggtctggatctcttgacctcgtgatccaccagcctcagcctcccaaagtgctgggattacaggcgtgagccaccatgccgggccaaaaatcatttatgatcaaataagtgaatttcttttctagctaaaacacagattctgaaactcacatctcacaagaatttcccttctatagtaagtagcaatttgtgaacacttattgtgcaggaagtaactgttctgaacactttatgtgcatcaatttaggtattattattattattttttttttttattttttattt

SEQ ID NO: 1241185 - DNA, 4001 bp, Homo sapiens
taacaaccacgcttacactgctgggccgctccaacaggtaggaagcatcaacttctctggactcactttcctttctcaatgaggatggtcagaggagcccaggccccaagctgtagggtctgtgaaagaagagtaaacaagccatgaagaagcacacagtccatggcggcctctcctcggcctgcagaagggagacaggtgccttctatttgcagatcctgtgctctcctagcacatcacaaatcaaggccttcctgatgaacggtttcagacggtagagagcattccttctgccccccagcatggaacccccgactagtgcaacctaaggaacagggaagggattcagaaggaccttccggcatctggaaagattagaagattaaggaagaaaatgtagatctgtctcctcctcctcctcaccatctttactgtaataatggtactgcatttcattgctttgacattgttccttaaggtgttcagaacacttcacataagttacctcatctactcaacagcactaggaaacatattactccaggtccagagaagagacatgtggagaagttatatgtctttttcaaggtcagaggaataacagcagaatccagttattgctactttcaatgtagtgttgtatttttttttaactgataccactttttgttgacattaacaatcatgacaatcatgattctaccctctctgtaattttcatacaaatgcattcagagtaacactcctaaataaggaatacatccatcactgcagccctcagcatgtcaccaacttctcactgttatattatatcattaatgctttggggatgagggcagggaaatgaaatgaaaagatcagggaattgagctggggtaacccagggctgcacagccccctttcccacatagtcgtgtacctgggccatgagcctctgtaatggaaactagctgtcctgaatcttccagccaggagcccagagaaatcacccgtggggccccttatcttcatttctcaagctccttaagggtggatccaaaattcaacaggaatgtttgaacagctatgctgtcactttgcctgcatgaccagcccccattaaaggagaaaccagaatgtcagtaataaaccaaactgcctttcttttaaattactgtagttaagcaactaaactactccaggagagaaaaaaaggggtaaagaagttgatttgtaccactgagaacactcccgggaacttaataaatattgtaattttctaaataatacttgatgatagaaaaaaaatccttctgatgtgccatgtcaaaaccttaagtatgtttacaatttctctgagagatgcatttctctcttaccctgtaaattaaaacatcacaattaaaaggagaggaggagccgggcatggtggctcacgcttgtaatcccagcactgtggaaggctgaggtgggccgatcacctgaggtcaggagtttgagaccagcctgactaacatggtgaaaccctgtctctactaaaaatacaaaaattaaccgggcgtagtggcgggcatctgtaaccccagctactcgggaggttgaggcaggagaatcacttgaacccgggaggcaaaggttgcagtgagccgagatggtgccactgcactccagcctggcaacagggcgagactccacctcaaaaaaaaaaaaaaaaaaaaaagagtaggaggttaagagaattttctatatattgagggttttcttttttctttttgaataggcaatctcatttcagaaagaggcaatatcaatgcctctgaggtactaaaacataaatctgacaatgcattttaattacatgtggttattaaagaatagtctttaatttgctctttccaccctttatatcgaagaaatggctttttctgtgccagatacttacttctcgcaaaagcttaactcaaatacatttacagcttccttgtcattatagtcactgggaggcacagctaaacctgaaactaaaggttaaaccaaattaaaactaaaggttaaaggaaagcactaagcacttctatgtcaatttatagatgaatcacttatgtattcttttccttcctaaataagggcctacactgctcctgcagagctttttctttttaattctttatttaacctacatcatgcagggagtttgctcttaaacatagatgctgtgggcaaaagaatgttttggtgataataaataatagtattcaaatgcttgccagctgggttcagtatttgtaaaatcagtaattaagatgcatccggctgggacactggctgagttgtctaactcctttctggtaccaaactctcttgcctcacgcacttactctttcttgcaagaggcttttacccctaccagtgttgagcctgcctcaagctcttcccctctcttttatttttatttatcatttttttgagacggagtctcgctctgttgcccaggccagagtgcaatggcaagatctcggctcactgcaagctctgcctcccaggttcaagtgattctcctgcctcagcctcccaagtagctgggatcacagacacgtgccaccacatatggctaatttttatatttttagtagagacagggtttcgcgctgttggccaggctggtcttgaactcctgacctcaggtgatccacccgcctcagcttcccaaagtgttgggattacaggtgtgagccactgcgcccagctccttcttctttaaatagtctttccttggtcgtccttccttggtcatctttccaaaacagcactgtactgcaggttaaaaaaaaaaaaaaaaaaaaaaaaaaaagggctgggcggtggctcacgcctgtaatcccagcactttgggaggccgaggccggcgaatcacgaggtcaggagatggagaccatcctggctaacacagtgaaaccccgtctctactaaaaatacaaacaaattagccgggcgtggtggcgggcgactgtagtcccagctactctggaggctgaggcaggagaatggcgtgaacccgggaggcggagcttgcagtgagccgagatcgcaccactgcactccagcctgggcgacagagcgagattccgtctcaaaaaaaaaaaaaaaagggtggccgggcgtggtagctcacacctgtaatcccaatactttcggaggctgaggtgggtggataacttgacgttaggagttctagaccagcctggccaacatggtgaaaccctatctctactaaaaatacaaaaaaattgccaggcatggtgatacttgtctgtaatcccagctactcaggaggctgagggagaagaattgcttgaacccaggagtcagaggttgcagtgagccgagatcacgccactgcactccagactgggtgatggaacgagactccatctcaaaaaaaaaaaaaaaaaaatgaggttctcctctggctgcaccatttatgagctgtgtgaacattagtaaattatttcacttttctgagaccaagtttcttcatcactatctactttgagtggtttttgtgaagattatacataatatatgtaaggcacctatagagtgctggcacatggtcagtgctccactagtaacggctggatgatattatggttattcctgtaacattttgtgttcccaacctggacacccaccctgattccttaatctttttttttttaagaggcggggtcttgctatgttgcccaggttggtcttcaactcctggcctcaagccatcctcctgcctcagcctcctgagtagctgggatcacaggtgcgagccaccaccttgattcctgattccctaattttgaataaaatgcaatggcttgaaatagaatttggggaaatttgcccccaaatttaatattgaatttctaacaaacaacacattcctcaagtctatgaggatgcatttatagatacaaaaccttctatgacgcaaattagaaaggtaatttagtatttgtaatttacttgct

SEQ ID NO: 1241186 - DNA, 4001 bp, Homo sapiens
gccaattacaaaataagtcctaatagaaagctgatgaagtttatactcttaagtgaaaactttaacagtaggaatggtgttccaatatattgattctgggtgaaaatttgtttttacaaattataaacggatctttctttctacctcaatcactaaaaattggctttctttaaatgacggagacacgatgatttacgtaacgccaaggcaacatctgtcttgtacaacaggaagcgctgccacacctcgcaagagaaactgtcaccttatggggagaacagtcccacctcgctacagaactctcttgttagaggggttaccaggagcatccaactttctcgacaacgaaaacctcctcccccaaatggcgctagccctgggggcaaaggtgtaccagaaccctgcggggaaccatctccccacccgccaaaccagaaacgcagtcggtgatgtcagccctgcacgccgaggaggaaggggctgtggaaaacacacccagcgaggcgcacagtcgcatctggcaatctagaggctgcagagaaagcagaaacgtggagggcatctctctgcggactggaagtggcgcggggcgagggaccgggcagggcgcgtgcccgggggcaggcgtgggggggaaggcggcccccgagcgggcgtctggacgccgcccctcctcggccaggagggtcaccacccccggcccccgcgcaccagggctgaggccaaggccacccgcacctcccacccgcttctgctcccccaggcgacgagcccgcggcgccgccgcctcctcccggagcagaaactttgcgtctctaatggaaaccaagccgcgcgccagttccctcctcccccgccgccccccccccccgccccaattagcgcgagcccagcgcctcccgcgggaagtgcctcctggtgcaccgaggctcacgcccgcccgcactgctgcactgggtggggggccgcagggtgcgaaagcggcaggaacaagccacggccacaccgcagggccccgcccgggcgcagggcggcccggccgccgcttccgccctctccgcccccaacccctcgccttcctgcccccaaccccacccttccccggctccttccttcccagcccacgcccgcgccgcgccccccgggaagaaggaggggagagcgaccgagggagggcgcccagcagggccggccaaagtggggaggtggcgggcgctgactgcgcccctcaacacccggccggaacaatgtgcgccaccggccagctccagcccattcattctccactgcccgcccgacctgccaccttcgcgccggcggagaagcggggtggggaggggcgggccgggggggggggtctagtgcccggccccgcccggctcccaggccgaaacgctgcgctgcaggcagcccgggtgcggcgctagtggatgcagtgggtgcggggctgggcggggggcagggggattggatgcagaaacccccgctgcagttgcggccggagcccctgcccgtggacggcctacgaccaagtccagctccaaggggaaccaataaatgaagctccctggcagaggtcgccgagatgcaaatccaaaatgcaacctcctttaagcgcagctgctgcgtaacactcagaaaagaaaaacctccaagaaccaaaaacaaacaaaaaacaaacaaaacaactagaaatctgggaagaaatctcgggcagctgctacgccggcatttgccactcccgacctaccatggtgcgagcgaagggaggaagagcagagggagcgagggtggctgcaccagcgcgggggctgcgacggcgggggtacctccgatgccgctgctgctgctgctgctgctaaggcgcgctgtgcgctatgccgccgccgccgcctgcgccgccgcctgactacgagtaacggcacggcgtccacgacactcccagcaccactgccggagcgcgagtctgcgccccgcgatatatatatggtgcgccgtatccctccgccgcggcggagccgcctcgcgcagagcggcgctgcggcagccgggccttgcccgcctggtcccgcccccgggttcgccaggcctcccgccgccccctgcgcgccagtcgcggcggccctacgctgggtcggggaagcgttctaggctgggcgcgcggtctcgggtcaggtgtggcggggagtcctcaggagacgcccaccctgggcgggggcgaagacagagcgcctgcttagtccaacctgggggcggcccagagcttcggaagccgttcactccgctacctaccccagcctcaccccacctgggtgaccctcccacctcaacatctccaaccgctccactagggctgccggctcccgcgtgcccctcgtccttgggtctgcagcggccacttccagtttggggtgctgcaggaggtcctgagagtagggggtccgcggggaggtggaggcagattggccacactccttcagctgccgaggagaggggtctgcagaggacgaggtagttgtcctcctggaagaaattggtcctcttcggattttggagcagtatccgagtcaaattatttatgctcagttgctaaatctgtgtcatgctgcgatgtttaatcagtctttaatgtttttacgtttccactgaatattttttaggatgcctgaatatttctcccctactattttgttctttttcctggcgcccgtcttactaaaattagtgtacctgtgcagcttctacagaccttaaacccaggctttaaatttttcgtaattttcctgatcctgagaagggtcagagtctttattcataaatccatagaaacaagggaaaaaatagatgcttcaaatcctctgcattacaagtggaacacacagccaattgcctctcttatggagctagattgtattttaaactacagttttgattatattccttttaaaagactatttaaatctttaaatatactagtgttttccattttttattatattccttttaaaataatatttaaatctttaagtttactagtgttttccatttttctgtaaagtagagaaagaacaatttcagccagtaatgtgaaccccaggacttgtaaaaatctagacaaaatgctgcagtttcttttcttgccaaggcagaacacagaatttgatcttctgttttacagggcccgggcaacagttggaggttatcatttgcttactgtttcacagaatatggcaaagtgtgtgattaacatgctgtgctagaaagggctttgcttgcttgtgtttgtttctgctttcaacaaagtctgcaggaatatgttttttaaaaaaggaaaaatgtacaggcacattgcaaatgccacaggacttcttgggataaccttagacaagacgtcagcatctgtggagctgttcctactgatgttccttctggaatgccgcagaaagagtgaacctgctgtttaatttaaagagaggctgcagcagcaagccaggggatgctgccttccctctgcagattagaaagacactattcacttcacaaacctgatcctaatccctgcaaaaaaataataataatactcctgggctcataggggaaaacctgagtaggaataaagcgtgcatactaatgcgagagttggagataaggaaatagaagaaaagggactaatacaaattaattttaaagaatatgcaataatccagtcagttacaagcctaaatggccaaactccttattaaaactgcatcttggccgggcgcggtggctcacacctgtaatcccagcacttggggaggccgaagcaggcggatcacaaggtcaggagatcgagaccatcctggccaacatagtgaaaccttgtctctactaaaaatacaaaaattagctgggtgtggtggcgcgtgcctgtaatctcagctactttcagtaggctgaggcaggagaatcccttgaaccagggcatcggaggttgcagtgagccaagatagcgccatcgc

SEQ ID NO: 1241187 - DNA, 4001 bp, Homo sapiens
gcatccattatgggctcaattttctaccctcaaaattctgaagttgaaatcctaaccacccttacctcagaaggcaatcatgtttggagataggatttttaaacaggtgatgaagtgaaaatgaagtcattagggtgggccctcatccaataggactggtgtcctcagagaagaggaaatttggacataggcagggtgaagtgaagacacagagggaagacattcagagggaagatgaagggaagacacaggaagaagacagccagccacctataaactcaggagagacgcatgaacagttccttcctcatggccctcagaaggaattaaccctacagacaccttgatctcagatttctagcctccagaactgtgagaaaataaatttctgttgtttaagccacccagtgtatgggcctttgttatggcagccctagaaaactaacacagcatccatgatgaatttcacctctaaggaacttgggggacaggaggtactggagtgagcaacctgtggacactctggctactgcttttgctattagtaataaagtccttcgtctctgacctaggagtcttgtgtcttttgccagcatccaagaaaacagaaacatactaatttgccaactctaagtggaataaaatctcagaactttgtgcagttcctgacaactgctgagtaaattaaatgtaactggtgtttttccttcatcaaaactgacttgcttattaaatacatttaattgacaatagaaagctcaaacagtttgatttttttgaattcattcttatcacattaacaggggagaactgaaggtttttagtgcatttttaaaaatcatctgagaaaacaacttgttttcacaaggtaagaggaaacaaatggtagattaaaattctgtcggcatggtgcaatgctcaagtatatttttggtgtaagaacgaatttaacattaagtggagacattatcacagttaaactctgaaaatagtccctttaccagaaaaatcttatatcactttgctaaacattcaaattaaatgatacaacaccattattagaatctttatgcctcttcatgggtcacctgtgcaaactcgagagagttagtatgaagcacgtggtggaaattctggttttaatgtcagcaagcttgttctgcaagctttcttatctgccatcctgcaagctcaagaatttctgctacctactggtttctttaattctttggggcatagttccagtctcattcttcttattttcccttcaatattacaacttttccttatttgatactatcttctttcaactttcagctcatagttagagtaaaaacatagactttagcctaagacgaagtctgtccatcgaaatatttgatttttagcaagctatttaacttcttggagttcatattctattcagtaaaatggggataacaggcacttcacagtgttgttgtgagaattaaatgaaaaataccttaaaacatctaacatattctatacagaataagcacttgacaagtattacttctgaattccatatctccatacactgcagcaacttctttttcctcatcacactcccctactgacctacttagcagttaaattacccccagttatcattcctttgtaattattataagttttacataattactggatacaagtcatgtatctgggcattttctcttctctggcactaaataaacattgggaattgccccattgaaggaagctatttcctcccccagttggttcatttatagttactccattattatggaatagtgatcacattataaattcatactccagcagggtccttattttaatattttttactgtaattacctctttaggagatgcgcaactagttgtgttcttcttttttatattttttctcagttttcttccatatagactgagaagaaagacccaaagtcaggagccaagttttccctgttgactggcttagcactctagtcacctttggtaacagccaatcagcagctaccaagtacagaagcatgcttagaaaatctaaaggacaggcagttggaatttccaactaactgcctctttcagagcaccacaggccattttctttaaaaaccgatgagaggtggaggttctccaaaccttccatctttaatatagcatttatctaggaaggatcagaaacctacatatgattatctataaaacacttcaatgatcatacgatcattgaatgcctggggaaaaacataaatgctaaaagctcatgctaactgcatataataaggtttaaaaggaggcaatctctcaaaggggaggagcttcataactgggtctttaaggaagactgggacttaaaaaaaatagagaaggccttattgacaggtaaacaagacaagcaaatacacaaagcacaaagttagaaatgagctgtggacgcatggaaacagtgagaccaaatggcatgccagtttgtcctccgtattcatgttgtgtgactgtccttgatgtggttgtatgtgctcactaaggctgcctttgactgagtaccgagtgagctgagcttgaacctttctgtcttacccagcgccctgactagtcatgaatggtcacagaggctgacacatactttttgataatcatgataataaaacgtgttttatactcaggttgtccttcagaagtcccttcacatggccatgtaaaacctgctttaccctcatatcctgaaatatgtctggtatctgggtttaatctattcctggaagagcccgcatcagaaatatatttctctcaccctttctggtgaccttgacctaaagaagaacctgaaacagtgtgcaaaacacaacaaaatatatttccttataaagactcagttcccagaaacttggagctctctttttttgttgcctgtttcccactagggaaggcaataaagcttttatggaagaagatgtagctttcagttaccatagcaacactgctacacattaaaaaaaagtctgagcaatactgaaggtacacattgagagctctaaaaagaatgatgaagcaggtgacatttgccttctttctccccagcaacctcttagttttcttttcctcatttgcccccacattttgtttcctaacttacgaaagagtaaaggatctgttttcaatcacagtcactgatgaattacactttgatgtgagtaccaagactactcccacagtaggtgattcatctgtaacagtggaatgaaaggggttcttctgcctgaaaaacaaattatgcactgggcttccgtctagtcaggaggatagggggcaaggcaatgggctgattgaaagaaggatgactttgactttttttgtaattttttgctggctataacagggcttattatgtgtgaaaaatgaaaacaagtatagagaaatcaattacgcataaatcaacaaccagatataaccactgtggacattttgacatttctcgagtctgtttcttctgcatttatatgtccttctttcagtcattgttagtctgaccattttctcgtgtaactcaagtgttttatttaagtcttcgcagttgtagatctaaaaataacggtacctaatttacttaaacataaaatatttttctatttccagtgttttcctttttgagaaatgtggtaatgaataatcctgaacaaaattattttcctacatttaaaaatatttccttaggatatgaacatgtttaagactcttgaatgtatgttgacaaattgctttccagaaacccagcagtgaaaattagatataatctgaaataatttgatacattaaaaaatcttgttttacttttttcaatattggttcaactgaacacttataaatatgcttgtttgacatttttttcttctataaattatctgggcatgttgttaaacattttctacgggaaatttagtgttttgcttgtgaaatggtaaaataaccccttgcaatatttaatgtaaata

SEQ ID NO: 1241188 - DNA, 4001 bp, Homo sapiens
ccctgatcctagggctgcaggcaggaacagatgcagcaggtggctgggagggtaactgggggtgggtgggtggaaaggcctggtctggagatgccacagctctactcttctcttaaacttgggtgtttggcacagggtcccatgcaaagaggtgggataggagccagagggagtctctctcctgcctctgctgtttctggggcaagagagggcagaagaaagttgtcaggggctggattcttgtgcttgaaagacttgggtcctcagagagggaagatgaggaagccagagaaacttgagtatttccaaccacccagtagattcccccgacgcaggcgcagagacactcggtccccagggtccaagggcagtagcacagagctggtggctgcctcccgggtcacgtcaggatcattggcaaaggctgagatgacaggccacgtgttcagcatcaggctcacctggggaggggagcccagttagcccccattccccagcccttagctcaggaccccccactttcccaggagcttcctcttgggaagctgggttttaatgggctctcccgggagggctgaggggcggccagcattggactctgcacatcctccacactcaatgcaaggcaggcccattcctcccctggtcctggcctccaggacacaggtcaatggagagtccacccggaggtcagctgggctccccttcttccccctccccaccctcctgagccggggatgggggccagtgctgaggtcacctggacagtttggcggttgtacaccttcaccacatggaaccggaagctgtagacaccccggacaggggctacgaaggagccagaggcccggtcaaagccaccgccctcgttcaccaggacctgggggaagcagagcctgctgagtggggctcaggaaatgcccatggctcaggggtaccatggggactaggggcaggggcagtgagtaatgaatagaaggagtggcaagtaggagtgaataggagtgaacagattcaaaagaaatggtgagaaggggcaaggagagggctgcgtatgggtggagggaggggaaaccgtcggtggggtggtggggcaataggccagattagtgaaagatgtaggaagctgttttcttaaagcctcagagacagcaaagtgggcttggacagttgcttccaggtccttgcagggtctttccaggtcccctggacaggggtagggggattacctggtcgaagtagatggccccactggtgccattgccggtttcccctgctggctcatggtggtggcttcggaccgcagcaaatgccactcgcccagggggtgcctctcccagggctgctcccccgggcccccctgcagcagctcggccaggctcacagaccaccaggcactccccctccagcaggacgggctctgacccctcctgggcccacccggcccccagggccagaagcaccagaaccaagggcagcccgggactgtgtaggggacctggtagccagtgtggcttggctcccaacatggctgaggggctctgcaacccacaagtgccccggtcttctgcccctcttctgtttccgctcctctccctggattctcaccgccggcaccctgatcgtctgccctctctaggctcgctgaaccccctctccatacctgtgtcccagctctgtcctgcctcccactcttactcctgctgtcactgcagttccctcctccttggcagagcatgcagtgacagcagttgggctttgggagagaaaggagggatgaagccgcctgcccactggacgggagggctgcagccagagcttcagggcagccctgctggatgggacagcactgagggctggacctggggggatggagaacatggtatgtgtgtgtgacgggtgtgacagaatgtgtgagtgtgtgcatatgccagaggcagcccctcaaccccttcctcctactcttcctctcttcaaaatcccccacaaatcaacagcccttcttcgtggcatctttccgtttgttggaagaaaggggtactccaccacgggtaccctccgcctcccgcctcccgcctaccccctccgccacgattgctttggtggaaagtgcttgggcctagagcaccagtgggccagtcacgctgcctctttggtcggccacatctttattcgcgggaaacaactttcaacgcatggttcccctttccgagaagtaactgcgcagaatgcgcgaggaccctgagggccgggagacagacgggagggctggtgagaagcgcaaggggcgagccctggagccgccgaggggactaggccgagcgggcccgtcggggcctctgggcgcggcggcggggttgggaggagggcgcgcagccgggaggagctgggctgactccgccccaggccaggaagtgactcaagaaacagtttgcgtgcgatgtggacaagagaggtccccgctgggtgaggaacccgggaaggcccgcccagattcgggccccctgcccttgtcccctgggctgggggcgcgggcaaagcgggggcctggcgggcgctgagaggacctgaagccggcgcgggcggcggaggcggtaggcgcgcccctccaccgcgcccgggagcggggagcgggggccgcggtgcggagtaggcccggcccggggtggctgccccagtccgcggtgggcgggcccggcccggcccggcccctgggccctgggcggtgctcctggcccgacggagaggggcagcggacggctgggggaggggtgggagtggcttgaaccttggaaatggcagaccagggcccccagaggacagcctagttcaatcccctgctgaggattcgtccttaagaagcttcagagtgccccaggagactccttctggcctccaggccgagctggagcccccccacccttcttgctccggactgtggtcatccttttccaaagcccagacgcccactctcgatagacagccttgtttaccgggacttcctctccggagaggcctgcgtgacatacaccctccctacctccagtggactcagatgcttgtcacctcctggggctgtttaccagagccttaactaggtgcgacctgttgatagctggtgtagtcccaggaaccaggatttggatggagggtacaatgaggctctgagctgccttctccccttccagggctgggggcagcagccatgcctacctggggggcccgccccgcgtccccagatcgctttgcggtgtctgcggaggctgagaacaaggttcgggaacagcagccccatgtggagcgcatcttcagcgtgggggtgagcgtccttccgaaggactgtccggacaacccccacatctggctgcagctggagggccccaaggaaaacgccagcagagccaaggtgaacgccttctctcccccatccctccaggcaccaaggacgctttcccccagggcggaggagagcagggccgaggagagcagggaagaggaggggcctggggaggatctccacttcttggttgtctcactggcaacctcagtgcccctgagttttgagggactttccaactctatatttgttttcagtttcagcttaatttcttctgtgatggcccaggctggcaaaaatcattctgtgctctttgggagaatagagatatctggctgaacaagttggccccaccaaggaatgcactgtggggtgggaggctgggccacattgcttcctttgggattaggctggggttccaggatggctcaatcatgtaccagctttgtgatgggagtctcagtttccttatctctaaaatgggaataacatcatgtggatactccagacatcctggagctcaggagcgagcaaggagccaggaggggtgatctgggccagttagtttacttttcctgaccttcccttcctcccaaccaggagtacctgaagggcctctgcagcccagaactgcaggatgaaatccactacccgcccaaactgc

SEQ ID NO: 1241189 - DNA, 4001 bp, Homo sapiens
actatattccctagtcatctacttaatactttgaacagaattggtgcgaaatgaaagtttgaagaaatatgtggaagattgaagaaatggttcttatagataatacaataccaatttcttaacagctacagcaatgtccttaagaaagatcttagcttcttcattacatttaaaatagtcactttgcagtgattgttctgaaaaaaaaattagaaaataaagatctcttatttatctatccaaatcctacttaaccttttatgatctagctcaaatgcttactcggctggaagttacatcttcagtctctgaatttttattgtacattacactaatctcttttgtacttatttcctattccataatgttataatttaggtatatattttatgctccttgaggacaaatgtgctggagatttacatattaatattttataactcagggcaagagggtgtaatgatttttttttcctatgaaatatgttctgagtgtctagacattaacagaaaaatgtatttgtacataagtactagggttgcattggcatgccgatctagagatcaagtatgaaaagagttcaaggttctaggtctgtcattgacagtgacctcagatacatgtgaataatttaggtcttaataactttaggtctcctcagtgggtaacattccttttttttttttttttttttttgagacggagtctcgctctgtcgcgcaggctggagtgcagtggcaccatctcggctcaccacaacctctgccttctgagttcaacggattctcctgcctcagcctcccgagtagctgggattacagacgtgcgtcaccacgcccggctaatttttgtatttttagtagagacggggtttcaccatgttggccaggctggtctcaaactcctgacctcaggtatccacccgcctcggcctcccaaagtgctgggattacagacatgagccaccgcgcccggccaacattcttcatgataacatttacccaagcatatttgctaagaattgtgaaattaacctagcgcatttaagaaggaaaataaaaactatcccaaattaatagtaacattgtaacataaatcaatacgattatcttgaagaaatgggatgattctagtgaagcactgaaatgttttgttgtttggcctaaacggtttttgcaccgaacaagaaacaccctttcttggattgtcttaccttaagcttaagtgacttgattacaggttcagctttctaactgaaaaatactttaacctggccctatccaaggtcattttctattagaatctcctaaacaaccctttacatctaatttttcttgctcaacacaacagaagcctcttaaacactccctttcctatttgcttgttaaattctccagtttgccacggcaaaatgtcggaggaagttaacttgtaaaggaacggcaagaagagaactgaaatcgaaggcataatctaaatgcaggtgtgtaatcaggtcgcaggcatagggcagtggcttgggagtcccggatttgtcacctcagtaatttaactactactgagggttgagcgaagtcacctcagctgcgctagggcaggagatctgggcacttggtcccacccgccacctctctctccccagcctccaaggagcggggagaaggctctgccctgcccagtgatgccctggttccgggaggagagtccccgctcagggttcccgctgagtgcctcctaagcgccacctctgaggagacgtcccttccagcgcccgaggggcgtcttacccacaacaaacagctgctccagcgcctcgaccgcgaccgaggagcccagggtggagggtaaggtgcataactccagggaggggccagtggagacggcagccgcctgcaccagcttctcgccagcgcccagccctggggtccaggggctcagggccattttgccgctctacttgagcgcctcctaagccagagccaaggattgccggttgccacgggcaacgaggacaccgaggtcgtggggcgccccctcgtggcccgcacctctagtaggtaccctcctggttctctaattttatccacgataattaagcagtctgggaagaatgactctctctttagctaatttttcccctttcaatttccattgcgttagttcaggcctgtatcttttttgtgggccactggaatcataataatgatcacttttgagcgcatctttgtgccggatactgcaggagaacctttatatacagtagctcacttaatcttcacaaggactttgtgagcaggctcttttagtacctccacttttacagacacgtaaactgaggcgcgggcgactaaatgaacggctcaagaccacaagaggataatattggatttaaagtgacgtctgggccgggcgaggtggctcacgcctgtagtcccagcactttgggaggccaaggcgggaggatcacctgtggtcatgaattcaaaaccagcctaatcaacatggtgaaaccccatctctactaaaaatacaaaaattagccgggcgtggtggcgcgtgcctgtagtcccagctactcaggaggctgaggcaggacaatcgcttgaacccgggaggaaaaggttatagtgaaccgagatctcgccattgcactccagcctgggcgacaagagctaaactccatctcaaaataataaaataaaataataaagtgaagtctgtatgactctttctactatgctacaaaaccttcttttgtactaatttagaactttccttgtatctagtacatcactgagcacattttgccttgaatcatagtgatttttctctgtcttcccatcgaactgtgagctctgtgatgacggggacaggaggatattattcatttttctctgcatctccaaaattcagcttagcatgaggcttaggttgagtctgtcagttccttttcctctggtgggttagagagaagcaaaggtgattcaaccctcctcttcttttctctacagatggcaaaattgaaattagaatgatagtaacaatgacaatagctatcaattgttaaatgcttattttgttccaggcactgttttaaatactttgcagtaccccatttaaccctcacaaataatcttttgagctaggtattattgcctgctttgcaagtgagggcactgagctacatcctaaaccactgtgcaacactgccttggaggggacacagcataccagtagcagaactagttctagaatccaggcctccttcatccagggagtgccatattttggtgttggaaaccatcctggacaacatcctccttttttgctggatttggtctattggtattcaaatctgttcctgcccttctgggccctcctctgtgtggcaggagtaagaagactggatatgaaatttcctggatgtccttgccacctgttttcttggtaagttccactaatgggaaacacttgagggagattagaaggccgagaaatcatgcatttctgcctccagaagtggtagtttcaggctacagttgactgtaggtcccagcagttttggtggctctagaagtggcaggagtaggagccaagtgactccagcagtctccagctgctcagcactatatgtgagcttgtgcgtacagtacaggtgttatggcagctctgatgtctggggtcttctttatcttcttaccctttggcttctataccccttgtaacaaattccttgtgatatacttctctcttctggaaatatctagactggactacttcaaggcaacccttaagctgtcaccagaagactcttcttacatatcgcatcatttggatcacattgctctccattatctatgaataaaggctaatcttaagggggcattttgtgtcctccccacttactggatttgttacagattttcttacatttctctatttcccttcatgtctctaatactttctttttccctgaactttgtgagaaagttacatgtaca

SEQ ID NO: 1241190 - DNA, 4001 bp, Homo sapiens
ctgctcagcctcccaaagtgctgggcatgagccacgatgccccacccaccgggctttaaggatgcctgagaaaccataatcatttatatagaggtggagaggaaaaaggatggattcaaagattaaagtggtaaaggaagagatttttctaaatatttattgtataagcattaacaaaacactcccccttatatatggtaggtaccatgatatataaatatgtacatatttaagaatatttcacctgtatttgaattctaaatattttcacacatatgtacatgtggacctttctatactgccaccctccacatccactttcctacctctggttctcagtcctcttccacagaggtaatgggtttgcagtggagagaaccaaagtcccactttcaccttttgttctcttcaaattaaggccagctccattcccaacccctcagcctgttatagctgttgatgtccctttctggcatgatttaggcactagtgatacactgtctcactacgaccatccaggtatcaggtctgagtggctcgaagtacttgatgcgacagggcatggtggctcacggctgtcatcccagcactttgggaggccgaggcgggtggatcacctgaagtcaggagttcgagaccagcctggccaacatggtgaaaccctgtctccactaaaaataaaaaaattagctgggcgtggtgacgggtgcctgtaatcacagctactcgggaggctgaggcaggagaattggttgaacccagaaggcagaggttgcagtgagctgagatcgtgccattgcactccggcttgggcaacaagagcaaaacttggtgtcaagaaaaaaaaaaaagtacttgatgcaagaaattagacactctaataggaccactgatactcactgtagaaacaaagccaggtttctcaaacaatgggtcatggaaaatccaaggaataaggtctcttacccttagtgttcctcattgttcaaatgtgtactgtagaagcatggtcaaaatctgaaaacatatgttagtgagttctaggaatgtgataagcccttggcactttaagggctagactaactgtgcagttatgtaaaaacaaaaaaaaaataccataaaagaatacttacattaacaaatgggaagaaaaaagccacatataagtatgtacattgggctatcgttttattaaaaaagaatactccaaaatatagtagtgtttatttttggataatgagactacaggtgatttttgttttttcttttggtacttcccatgtttcccaaactttctgtattgagcatgaattactctcttaagttactttacaaacatctcaagtttggtgccaactctgtgttcccatatatggtgttgttgctggacaccacgtatgactccaacgtgtccagaaaccaccggggtcccccaatagggctagtagcaatctagcagcaactccaggcctgtaaggggttagtgctagaacattacccacctcagtggctctgatcagtttgggaaaacctcaataattatccaacttggtaaaatactttaggtgtcccctttgaaccaaaagagatctctgaaaaggcccaaggaactactttatacatcctctacacgtttaagataatctgaacacatagtagagatctgccagactatggacatgggagctgtaatcctcacaagccgggagagccggggagagggtccgagtgggccggcgcggggggcgccaggttgccagccccagacccgaaatcccaggcaggcccagggagaggggactctcgggtggcttctccttacttcgtgtctttgcctttgctcttgcctttctttttgtcctttcccttcgacggcatcttggcttccccaggggctccgctgtcgtagttgcccagccgcggccgccctggccagctctgtctccaagggaaccgggacgccgagctggcaatgccccacccgcgccgctgacggcgcgcggagagcgcacgcgcccgtgacgtagcccaggcgccgcggcgcgcggggtggggcggaggtcgcgccgagggcggcgggctgccgcgcaagggtggcgcgcgcgcggtgagtgtgcgagtgtcggcggcgccggatcctctacgtggggcccgggctctgcgggcgggaggcgggagctggcagccccaggcggtagcgcttcgtcctgcggcctgggtgtgtcaggagtcgctgcggtcggggcgcccttgcctcaggagacttagatccccgctgatccgcccgtcccgccgcagtggtctgagccgcagccctttcccgtgccgcccgcgggtcccgttcctcccgtgtctccatgccgcagccagcgtggccgcggctaccttgccctcgcccccgctccgcttctgccgctcccggcactgccttactcctttgggttgcatctctttcctggcttttcacccttgctgattctgtaagggatagtgcagccagcggacgtcccaggccaaatgttttttgataggcagtcgaggactttcccgagggcggtggttgagggcgaggctgccagcctccgaagagcagcggcacgccagggagccgggcggggaggggagtgctgccaccgaggtcgggagcagggtcctcggcctcactaggtcctgtgtggccgatacttcctgcccacgaccgccccccggatttccatttgctaataccggtccgcagccttctttcctgaaagttgcataaagttggaagctcttcaacttgcctccccgactcctgaaatcccgaatacacctctgaaaaggagtgtactcacaagtattctcatttttcaatgagagtcagtcagtgagtcattaaggaaggtacggtattctgagtgccaagccaatagttaggagacttgtggttgaagctctgctctgttatactccatttcaaattaaaaagtttattttaaatgtggttgtagatccttcgtcaccatttctctagggaggacttaatccgtacactccttcccgatgtctttgacctctaattactcccctccgccttgtttcccacttgcatagtttctgtttctgaatttctgtttcttctgagggaacatgccgatttggtaatgataagccttgtaaacttttttttttttttttctgagagagagtcttctgtcacccaggctggagtgcagtggggcatctcggctccctgcaacctccacctccttggttcaagcgattctcctgcctcagcctccccagtaagtgggactacaggtgcatgccaccacacccggctaatttttgtatttttggtagagatggagtttcaccatgctggccaggctggtctcgaactcctggcctcaggtgatccacctgcctcggcctcccaaagtgttgagattacaggcgtgggccaccgccccggctgtaaaccttttttttgagacaagagttttgctcttgttgcctaggctggagtgcaatggcgcaatctcggctcaccacaacctctgcctcccgggttcaagcaattctcctgcctcagcctccccagtaacagactataggtgcgtgccaccatgccaggctaatttttgtatttttggtagagacagagtttcaccatgctagccaggctggtcttgaactcctggcctcaggtgatccacccgccttggtctcccaaagtgttgagatttacaggcatgagccaccgcccccggctgtaaaattttttttttttttttttgagacagagttttgctcttgttgcccaggctggagtgcaatggcacgatctcggctcaccgcaacctccacctcccagttcaagcgattctcctgcctcagcctcccgagtagctgggattacaggcacacaccaccatccctggctaattttgtatttttagtagagacagggtttctccatgttggtcaggctggcgtaaaccttattatacataccatct

SEQ ID NO: 1241191 - DNA, 4001 bp, Homo sapiens
cggagctgagggcgccctcacgccggcgggacagtgagtccagcgaatggctcttcctgcctgttcgagaacccgctggcggaggttgggtccgggcggaggagggactaggggaagccttgcgggccgcacgcggcgcgggcgaggccgggaggctggcgctgctgcagctgctgctgctgcccgcgctcggggccgaggccgcggcggcggcggcggcggcggcggccgcggggctcaaaggcgtgaaaagacgccgcttctcctcgcgcatgatgcgctcgcgctcggcccggcattgctgcagcttggcgcgccgctccgcctcgtaggcctcatacaggccggtggccacccgcatggagcggcccggagcctctcgcaccaggtcggccagggcccgtggcagcagctccaccggcttgaccgcacagcgggcgcaggcctctagcgagcgggggctggtcagcacgtagcggctgccctccgcctctgggcagtcgaagttgaagaggtcgaggtgcagcagcggggactgctcccgccgcccgccttctgcggctgcacatgggacttctgccttgcggggcaccgccgcggaggccgaggccgaggccgaggaagctgcgggctcctgtgcgccctgggaatcagggggcacggacgccacggcctcgtcccctccagagtcgccgggttccgctcctgccttctcttcttcaggcactgggtccaccatggctgagccccgtcctttgttggaatctctgcagatcacaaggagggacatcgaggaatacgtctgagagctcttcccccctcctcatccatagtcaccccatcccaacttaatccgctttcggattaggctcagaggctttggtggaacgtaaatcataaaaccgatgtcggaaagcccaggctgagcgccagaacggggatgggggtggggcggacactcgtgttcagagagcagcctgggtctccctcagccccggaatgcggggtggaggcctgtggcgaggctcctctgggcgcctagcccgctagatgcatcccctttctgctgcaagttaagatgaaaagatccaggtgcaggcaggagctagagagggaggcgctggaggattcccgggaggattagcgtatttgtttgtagcttaggcgggctactggggatgcagctttgcaggaacaaaaaagcaagaggcctgttcatcccaagggaccccatttgcctaagggaagaagtttatggttgatttcccctgccaaaggagactcggtcgcaaggcccccgggtgattaaagggctgggagaagtccccaaaggcctctccgggaggggtgatggattcttgctccagcagctctggcagggcttactgagggctctgcacgccgcctccgcccccacctccacccccaccgggtgtttgctggggatggagaaggtgcctggatactctcagacgcaccggatctcctccaagtctgaatgtgctaaagataccatccaccccagtcggggttcagatacccgccctcgggtgccctccgagttcccccacagcatcccagtgggtgggctcctggagtgcaaagaacctggccgcccaggttcccgcagctcccggtacccgagccggtttactcaccccgcgtcctgggcttcggccccgcgccaagggcttttgttcgcagctcgccgctgtcccctgcgcttcttcagtctctgcgccggcggggtcgggttactgccggctgcaaccgtgaaaggagccccatctgccgccgccagcgtctctccatggggtctgcgaacagggcgcacgcaccccagatgctacctacacgtgggagggggagtgcgacaatgtctccctaaaataacgcggctctgcacccttccctcacattgattctttaaaaaagaagcccggttccgtcgctgcggcatccctctacacctctacaaccgtggaggtaccgcaggtcccacgctgccccctgcgcctcctggcggacactcgagggtgctggtttgtttgcttcgaggacgaaggagaaatttttgtttaaatgtatatatgtacatatatacacacatataatatgtatatatatacactacacacatacaggtagatgtaggtatagatatggatagatatcgatatataaatcaccaagaaaccctagtctttcagcagcctaactgggtagaatgaaggaattgctcagcttgtttctaaaggaaaccctgaggagcaaacaaacttgatagcgaataattgggtggaaatatggcgcctgatgcaaattgtgattttttttttttcaatgaaaaactaaaaacaggctgggcaaggtggcttacacctgtaatcccagcacttcgggaggtcgaggccagtggattacttgagtccaggaatttgagaccagcctggacaacatagcgagtccccatctctaaaaaaattttcaagaattagctggggtggtgtcctgtgcctgtagtcccagctactccagaggctgaagtgggaggatcacctgagcccaggaggttgaggctgcggtgaaccatgactgcaccaccgcactgcagcctgggtgacagagtgagaccctgtctcaaacaaaataaaacaaaataaaaacaaacaaaaactaagaacacttatgggtttgacgcaggtggaacatatgtaactggtgtttaatgcaacattttatgacttcctggttatagataataacaattataaccagttagtgccatacaatgagtgttattttgagacatctcctgcccacctcttttccattttgagtgatagtggccgtaggagacagaccggaggagtgcttgatggagggaagtcgaggagaggatgggacataacattagagggaatattgaactatgcattaaataaccttggctgggtgtggtggcacacacctgtaatccgagcactttgggagggcgaggcggatggatcacttgagatcaggaattcgagaccagcctggccaacatggtgaaactccgtctctactgaaaatacaaaaattagccgggtgtggtggcatgcagctgtaatcccagctactcaggaggctgaggcaggagaatcgcttgaacctgggaggcagaggttgcagtgagccgagatctcaccactgcaccccagcctgatgacagagcgagactccatctcaagaaaaaaaaattaaattttaaaaaataaccttgacattgtcaggtagactgtgaggagaaagtgaagggttttaagtggggaaatgacatgatttggtttttattttaggaacataactctggcaacagtgaagtggaggctttacaaaggccagggccaagaggaggcaggaagcccagttagctggacactgtggtcaccccaggcaggaaggattggggccagagaggaacagtggcaggaggaatacagcacatagtgatggggagggccagggaaggatggtttccttttcggacctcttgattgaggtggagctgctcagcaggtggctgataagttgtgtcagagatctggactggagctagaattaggacatcgtgaccctatacctggttcctaaaaccaacagtgtgagtgagatcactcagggagggcaggtggagcaatgagagaggctggcagggcatggatagggctgctaagggaaaaggagtgcacgaaggggaccaacaaggagtgcaacaaggacagacagcaaagtgtggtcttgtgtgagctaccagtggggcactgcagaaggagagtgtgccccttgtgttaagggctgcagaggtccaggaggtttcacctggagtcaaatacccactgaaactggcagttatgagtcttgggtgacattggcaaaaacagcttagtattgcactagggcagatgccaagtgcaggaagctgaggtgcaatgggaggtgagaattactgatgcttt

SEQ ID NO: 1241192 - DNA, 4001 bp, Homo sapiens
ctgtaaggcgatcaacagtttataaatcccttcagaaggtttatctccacctcaaacccacgaggcagaggtcatcatctccatttcacagacaaagaaactgaggcacacagaggagaaaagctagaatccgttccaaatacatctccctcgggaaagtcttagagtctcggctgagaaaggtcccaggactagaagggcggaatttatggcaaacaagaaaggctctgagccccaggcctctccccaactgcctctgggtctcaagcggctgcctgtgcaccttcccaatccccacaccccactgcagaactccagccaccgcacacacgtggacgctgcttggtttggaggacacctgttgctgcaagaggggaaattcacttgcgctcaaggggccttgtatcctttgctgtttagaacttcccgctactaggcaaggatttccaaggctgggatgaggcgcccaccgccagcccagcagtgacagaccctaattttggcaactacacccgctagaaacttttctgggaccggaccggcagcaggttctgagctggacaaaaagacgctccaccactgaaccggcccaccaccgcccaaagccccactttgggtgagtgcgggatcccctggcccaggatccatgacagctggaggagtctggagtggcggccgcatgagtgggacagccagggaccacctcctctcgccgcagcctgggaaaagggctgcagccagggagacccgcgctgcccggcccgtgtagtccttaccgtgcaggccgttggggatgctgcggtggtgcggcggcgccgacaagtcgtccagggaccgacgtgtggctcctgccttgccgtcgggggccttgtgcggcccggggggcagcagcgggggtgggacgtggtggtggtggtcggggctgccgccgctgcccgcgctggacgtactgctgccgtcgcccacgtcgcgggcccccgcgccgggcgcgccacccgacagcggcccgctcaggctggcctggctgtcgatggagctgcgggagccggcgccgcccccgccgccgccgccaccgcttgcggcccccgtcgccgccagtgccgcgcgctcctcgtccagcagcagcaccagctccttgagctccaggttctcgcgcagcagggcctcctggcgcgcctcgagctcgcgcagcttctgctgcgagcgggccacctcgtgccacacggcgccggccgcgtggcgcccgaagcgctgccactcgcgcgccagcttgcgccccttctgccggtcgtcgtcgaggaagcagcagagctcgcgcagctcctggttgtcgtcctgcagccgctggttcacgtccttgaggccgcggatctccagcaggtgctgctgcagccgccggttcacgtcgcgcatcaggccgccgtgctccagcatgaggcccaccttctcgccctcggcgcgccgcagccgccgcgccagctcctccttgctccagcgcagcagctcctcgtccggcacctggctcagctcctccgacgccgccgccgccgtcgccgcgggcttagccatggcggggccgtcaccgcggcatcgccctcgccctcgcccggccggcgcttccccgcgccggggctccgctgggccggtccgcgcgcgggcggggggcggccgggggcgcgtgcggcccgccccgcgccgcctggcgcgtcctctcgccgcgcccgccggggccgcccgggagcccgcgcgcctcggggttgacgagcggaggcggctgctgcgtcggcggccgcggtgccgggcgctctcagggttctggagaagcaggcggaggcccgcccccggcccagctcccggagcccccgccgccccgcccaccccgggcggagagtgggcgggtctccgaggcccggccccgcccccgagggcgactggggagcagaggcgcggcccccgccgtccccctgcgcggtgcgcccgcccgtccagtgccctctcagaggcgcgttccggccgcggtcccgccctcccggccgggcgattgggccgctccgggggtgtgcgggaggggcggggcgcgcgcgggggaagctgcggcggtggtacggtccatccgcggggtttccgacccccgcccgcggccggctcccggcggttcaagtttctgcgcccggaggacgcggccttagccaatcccagggctacagggcgcttttaaaatgcaggtacggctgcggggagggggacggtgggaaaggtagggccgggcttcccttaaaggcgacgcgcgaaaatagcagtcgagccccctccccggcccgcgtccccggtcctcttccctctccccagataaacaaatacccacgatccgggcgacggcgccccttctccctcccgggggcaccagagttcagggcagtcggagacacagcgaacaataggactgtgacatgggggtcgctcttccccgcagcagggcggctctttgtccccttccctgcccccaggctcctccgcccccgtccccacccgggtcccctgccggagcacgcggcggggctgcgtctccactcctagcccagggctgagctaaacgctggcgtccgcgcccctgcagggccagggccttgccagccgcgtcccgcagcgcggtcagtactctctgccccgatggggcgagagctccgggaacctgccccctgcccggagcggcgctcggagccccgctccacctccgctcactcgaccgctaaatccctgggattcgggagataatctgcaattcgcggggtggaaaccactgggaagggtgggaaggtctcccactggggcctgaacgccggggtccgggggcgccgagccggccacagaactccccaccggcggcctcgcgggacccccgggcttcccactgcctgtaagtctgtctcgttatcctccggtccccaaagcgcatttacggcgcgtctaccgccagcaggcggggcggggcggggcgggggggggtccctcccccggaacctgcaacgagatcaaatccgcgcacgcgacagtgagcggcccacggcctggagcgcgcgcccgcgcagcagctgatgccccatttacagttgctaagccgttcattcagctgtgtactcagcgcctactcgccgcggggcctgctccagccccgggggattctgcagggcaccgaactgccctctgcgggggacttggcgtcctgggagcaggatggggagaagatagacgagctagatcaggatgagacttgtcttaagtgctgtgcggggcattaagtcgagctgctgtcatagaaagcataatcagttgctttagatccagcggtcagggaggtggggaggcacatctaagctgaagtctgattggcaaggtacaaagataaggggaagggcattccaggcagcaggaacagccagtgccaaggccctagggctggcctgttacagacctgttccaagaaggccagtggggctgggggtgggccagggaagaggcgtgagagctgaggtcagaggtcagaggggccagatcatgtatgattccaagacagctggggaggcagtggggttttagcagggaagcaacatgacctggtttacctttttaagaggctcaccctggcccacatgttgagaagagatggaggggagtacacagagaggtccagattcaatatctcatctcccacccgttcgccactctctccagacagatggtcaggggagggtggtggggagaggatgggctgagcacagcttccaaggttaaaccccagggatgctgagggtctcccaggccctgcccaagagaaccagctcctgaggggaggggacatcctcccctctgaggcactgctctgctggtccagcacagctcagtttgggtttagagagggaggggctttcagcttctgcctgggggagctgcaggtctgtctcaacccccaggaagccatattaacttcaaggagctccttg

SEQ ID NO: 1241193 - DNA, 4001 bp, Homo sapiens
cgaagctgatctctcattagctaatagatttatgctccagtatgacaacttgctcagtcgtaggtgaataggtgcgcacacgaggctgatccacagagaacattaggatgttttattttgcttcaagtgcctgtgaatcatcccgacactcagttccaatgttccctgcagtttgagttaaaaacagaatgcaaaggtagaagccaacacctacgttgtggcaagctgtcaatcaggccgtgcagagctcagcaacaggaaaggatgtggtcagatgtactcgctggcaagagtaacttctactaagaccctgttcaggctgcatgcttccaaacaaacagcaccatgggaccctcctaacactgtgactttaaactcagtccatacagtaggacttaatgaattgcacttgctttggggcaactgaaaaaggaagatgaaatgtaaaggagctcagaaacacagacaccctcatctaaaatgaaactttacagtaaccctcggatgcctgggcccaccccgacacttcctgtaaccagacactctccgttacagttccttgccctccaaaaggggactttttcatttcattgctcaaaccacaattaagtccttgagtctgaagtcaattgcactatctacaccacgtaaatgacagtcattcaattccaaatttccttcatcaaaccaactgccagacccactgtcctggagttcttcaaacacctacgaatgtccaacaggcacgttaatactgagataccagcgtctccaccttcagagaactaccccccaccccacacacaccccgccatgcaaccttccactccatttctactctcaaactttctaacgcaccattctttccttcctccgagaagaaggtaacttacatttgcagcataatttggttcaaaaagatgccgtccactaaatccatgtacatagtcaggttgtcctggctgccgcttccaaacgggccaaaagttttcacctgcggggagggggacgaggagagaaagacaggaagtcaccccgtgcgcacaaacggtccaaagctctcccaggcagagactggacgggtcagtgtgagcagaagggggtcacccacgcccacaccacccttcagcaggcaccaagcccggccttctcctagggcctgtctcccctccccgcgcggggcaacagacacgagacaggaggaaaaacttcctcgccacttttctcccgcgttccagagcggaagaaataaaaataaaaaggacttttcaataaatgtctcacgtctcaaatccattgtaaatcagtgcgcccaccccagtctgttcgctttcccattcggcgccccccattccccacccgtcaccgccatccaccggctggtctcagggattcagaaaaactacatgagatatttggttgggaagaatggggtccttttcgggagtggctaaaccccagggacaggagtgaccactgggacccggtccgccccgaggcagccagcctagagccccagcgggaacaggtgtacccgcccggctcctggcccggccgaaagcgcggcggggtcccgcgccggacgcacaacgggggcgccggctccagagttacaaagctccggactccaggacgcggccccaaccccggccgggagccacttgctgcgtccctcgcgccccggagccacccggggccccggccgtgtcgggtctgcggcgtcccgtcgccgggctagagagaagccggtgcaccaacaaaggggcggggagccaggcgcactcacccaggtcaccagcgggctctgcaggaagagctccaggagctccgagactgtcacgtccatgctgaggctgcgcccgccggctccgcgccccccgccccgcgtccccgttcccccgcgccgcggcacaaaacggctccgcagcgagcagcgggcgcggggctgcggcggctcgcgcccgggagacaaaggcggggcgcgcgagcccacgttccgcggcttcggcggccccgcgccccgcccgggtctgggggaaggggagggccagccgctcggggaggaacaatacgggcggccccgcccctcggcggccctgggcgaccggcgcgccgcctcgcggtgccagcccgggagcccgggagcccgggcgcgggaccaggctacgcggggcgctgggaggggactggtggcccgaggcgggtgggtcgcggggcccggctccccgcccgtgggaccgcgcgccctcgccgagcgcagcctccccgcgtgtggggccccagcacgtggcgcatccctgcgcgcgtgcgcgtgcagccggggcccgagcgccacgtgcgagctggggtgcgcgggcactggtgcgtgccgggagcggggacgccctgccctccgaggttgctctgccctccgaggtcgcccgcagctgccgcccgctctgggcttggggacctcggccctgcgcctttccgcactcctggcaggtgcagccccaggtacagtcaagaggccccgcaaacccccgctcctcacgcttgtgcgcggcgcgataaacgcgccccgaccctggggctgggctggagggcaaagaagaaactttatgttgagtttaggccttaggggcgcggcccctcgcgccctaccgtgccccaccgtgccatgttccgggctgcctgccttctaaaagttcctgcaggaagcaggtgatgtggcctccccgacccgggcccgcccccaccactttgccggaggcgagctaaattccagccggggttcctagcagcagcttagtggcaggcgacaggaaaaagggcaaaggccccaactggctggaaggcaagcccgggggcaggacctccttgcgggacggcacgaggcaggagccggctccaggctggtctcggcctggtaataatttcacaccaccagccggtcattgttcaaagcactgtagaccattttactaatttaaccctaacgatcgccgcatttcgcagctgggccaactggtacagggttgacccgaagggccctgcgtggcgcttggcaagtatacagcaggcactaaatggctgccgacaggctcggtggtaattttgaaagttggctctgtgcagcgttggggctgcggcatctgctggtggcgagtggtattacagcccagcgctggcggaccccgttgggctggggagggttgtgagattatggcctgagagccaagggggtcggttaggggtccctagagactgtggaaggcggggtagcataaaacacaatgggggactgcggaggaactaaaatttcgagactacatggttttgttgtgcaccagaagttcattagagaagttccttaattgcttctccgcccgccgcgatggcactcgaccccgcggattaatttaacaactctgatggttgctctgtgaaatttaaagaacagtggtttaagcaaagaccacaagaaagaagaattgagatcaaagaggagtgtgtgccatcgctgtggaggagtttcagttgtgaatcatgaaatgtcctgtaaaccatttcaaggagtttgatttttataccaaaaacaatgggaagacactacaggtttttggagcagcagctcagacgtgtcgaaaaagatgttttgatccctaaaataatgagagaaaaggccagagagaggtcttctgacaagttcaagattttaccaaatgttgcaagaactctggaatccttatggtagtaaaatgctggaaagaaaattctgcattgaaagaatgtcttaacagctcactataatgacccagccttttatgaataatgcaaagtggaaaacctgaaggaaaaggaagaattcagaaaaactggaatttctacaaagaaaagtctacagaagctgcccacaagtgtgtagacaaatattcagatgacattcaggatctctaatactcatggaagtcgtttatagaataaaccttaaataatggactcaagaatgtgtgtttgct

SEQ ID NO: 1241194 - DNA, 4001 bp, Homo sapiens
gctcataacaagataaaccatccccactcaaaccaaagtgggcaaagatatattcacataaaagccatcaagatgattttcctttcggtagaaaatcctttattgctcaatcaagtttagagtattgattggtttctaatcaccaccgtgtacaaaataaatataaataggaagcactgcaaaatatctagagtccttttaaacaagaatataccaaaacccaattgaaatgcctttatgccaactgactgatttacaaggttattcatttgagggggaaatatcaagatcataaactatctgaatacctactgataaaagctaaataaattatagtaggtacataaattagaatactgagttaccattataccctgaaaacctactgaaaaaatatattttttaaaaaaaataatttttaaagaatactatgttaccattatgaagaatgtgaacactctactcatggaacttaagtggaaaaagtaagacacatagtagagtaggtatagtaaaagggaaggatacctacacatatttgcttatatgcataaaatatcttagtaacactgttatgagggagaggaattggatggcttagggaaggggataagaaactttgatatcttttgaattttgaaccatgtgaatgtattacctattcaaaaatatatatatatatgatgtgtatacatatatatatatatatatatatttttttttttttttttttttttttgagacagagtttcgctcttgttgcccaggctggagtgcaatggcgcgatctcggctcaccgcaacctccacctcccgggttcaagcgattctcctgcctcagcctcccgagtagctgggattacaggcatgcgccgccatgccccaaaaaataaattttaacaatgcttgagaattataaaaattatgggaggcctacaaatacctattactacattcgattaactggtttattatttgtctttctcacactttctgcctataagaatatccaacacaaacatcacattaaaattaacatgtaccaaaagaaaggaattcagtgaaatgacattgaaggtcactaagcaaactttttatgagaaaacagatatccaaaatacttgctgtaaataaataagtactgcttacttctaaaggtacctaacatttattacacaccaactagagcctagtttttatatattttatctgatcttggaaagctaagcctcggaatggctcactgcttctcccaaggtcaccagagctgtaaactgtggcgctggaatttaaatctagaggcttgccctgaactaaggtccctaatctttttccatagcttttaaggacacaatcaccacagtggcaacattaaaaattaggagctccttttaaggcttatctgtcttcagagtttgctgcccaggttcaccaagaaagccgaaatgatctgagcgaaggccaggagaaagacaaggtacgctgcagcttccacaaacccagtaaggacctgggccctctagacactcaccggagaattaaactctactgagctgaacgccttctcccgaaatctgacctcacccagggagatataaatcaaaacagcattaggatgataatatctttcccgccaagcaaaatgaagccggcgttttccaagaacacacgcactgtgcacatgaagcacagtctattgttcctgggtcaccaggactcggagacggaaggcaaacccagtactgcagaggcccacgtggaaacaagccaggaagagcatttcactgccttctcccaacctccacacagccgaaattaatctccttgcgactcacacacactcctatgccgacttgaaataaaggcctgccacctgggtatataactcaaatggaagagaaattcaaaacaattagagagcaaaattaagcgcacactcaccagcccaccaaaacggagagggaaagaaagtggagagacaggaagtcgccttgggaagtgtcttcagaacctgattggctaatgagttcaagaggattccctcctcctttaccttaaaaggtgctgaaatgacgtaacccactccacccctctttatggaccagtgatgcttcttgcactatttttggagtgaacttcttaaaccgagtttccttttgagttaatgtacttaggcaaaaacaggctaatttaagctatttatacacgttgttgtttgcgtgggcctactgcattctattctaaagaattttcatcccttaagggtaatttcttatcctttgtgacctcaacatgcttaacttatgctaggcaacagattccattataaacagtctagatcgattcaagttaaaatttaccttcattttttccccccagatccaaagctggcctgataaaatttaccttcaggtaatctttgaactaacaggcttagtagataaaaggtaggtgggttaagtgttttaggcttcaaataaaatttagctgattttgaatctgaaccttgccacttatttgcacacatctaagcctcagttccaactataaaaagagggaaaaaagatgaaatcttcctactctgatggttatgaggattaagtaaaataatttatataatgtactcagtacaatgcccggtacacagtactcaacaatgttagctgttattattgttattacatatttcttgttagatttatattcccaagtagactataaacaactggagatcaaagtgtacgttttacacatctccagacaaaaacaatgactttcaatgctgaggacataattgattaatcaattattttgactcctcacatcgccctccagttaaagtataggttcttactctgttaaattttttttttttttgaaacagggtctcacttcgtgtcccaggctggagtgcagtggtgaaatctcgactcactgtagccttgacctcccaggttcaagcgatctcctgcctcagtaagtagctgggactacaggcgtgcaccatcacacccagctaatttttgtatttttttgtagagatggggtttcgccatgttgcccaagctgaaagatttctttttaagccataattagaggactccccggcacaatattcatcattattcttaataaatactattatagtaatagggaatatatatacaagtatgtgttatatgtacaaatatacatgtaatgtgcaaatgtttgaagtataaagattcaagttatatggagaaatgatacaactctaactcatagtagttctcattttttaatcatttcatcctatccaccctgcttccaccttactagaaattacctattccaatccactttagagtttacctgccccaaatttcccaacatttagcatcaaatgctaatttgttatttcataattgatttattgtaacttctagagtcaaaacatttcttgaatgtttactataaatattcaagaaatgtaatattcattaccttgtttaatcttcacattaacccaagaatgtaagcactttcattataactatttcaccaaaaaaaaaaaaaaaaaaaaggaaacagagttatagagattaaggaatttgtctatttagcaagtggtaaagtcaggattcagatcccagttgctatggtttgactgtccccttcaaaattcatgttgtcactctagtttctcttcatatcgcataaatctttcaccttttacaaaattcatgttgaaacttaatccctaaagtggctgaaacttaatcctcattagaagtggggccttcaagaggtgactggatcatgagggttctgccctcataaataaattaatctattcatggattaataggttatcatgggaggggaactagtggctttaaagaaaaggcaaagagacttaaggatagcatgttagcagtctcagcatcctggccatgtgatttcctgccacgccttggaacatcacagcgagtcccctccagcaagaaggagttcagatgcaa

SEQ ID NO: 1241195 - DNA, 4001 bp, Homo sapiens
tttttgattttttttttgtagtggtgaggtctcactatgttgcccaggatggtcttgaactcctgagcttgtgtgatcctccagctttggcctcccacagtactggtattataagcgtgagccaccacctctggcctcacctggccttttctcactgaagctctgctggcttcagggaatcagctctcctttcccaagtactcataaacttgttggctcttccaacaagattctaaaacagattattaataggttcctagtagccaagagccatcgaatggttctatgtgaaaacagacatttaccagattctagtcttctatcattaactgtacttttaggatttttcaaaatctaagaataacgattttataaagtcatctgcaaatactctggtatacaatttacctgagcttaaaaatatgatcactctgtaatctcctcaattaccttgaatttaattcctctagatttttttgtccttatccaattttaaagaaaacaagcagaaaacactgtcctccctttcagacactcagcagagtcactgctttcaaatataatgtcctgaaatgaactagcccattttataggccacagctatgaccaatttttctttatgacattcaattttagaaacagcatttaaaatttaagaacctcattaacaactcgaatagtttttattgcttgttagtgcaaactacattttcaaaatggaacaaatttaaacaggatttgcccagaaatcaactaatatgcttgaataatgcatcacaatataatcgaaatgagataaaagagggaaaaaaaccctaaaagacaccagcggtggtcactctgaataagacaatcttggataattattatattcatagtcaagattatttaacaggtaagcatcctaagggcactttaatccaaatgtctatcaatactactaccactaccatcatccatccattctttcattcagcaatacagagggcttattaaacgtcaggcagtgttctaggcgctgaaagctcctcgctttcattctagcaacatcattcatacaaacctttagcgggcacctacaactgcaaggcattgtgctaggtatctgtaaacagcgatttagatcgagatacacaaacatcaccaagtttctcttaaaaacacagaagaccacccttaagaaatgctcttagaaatagttcctaacctcagatgacttagcgaaagctccgtttaactggcagtctaaatttagggagcattaccgagcctatcttgggcagacaatcgtttaggagctgtcacataacctctagacttacgctccaattttctaaagaacaatttctctcataacaaaccaaatcaaccaccaggagcgggtccgtaaagacgatgtctgggcaagaacgaaatctaatcccggaagtgccttttcctcatcttagccgcaccctcgttacgtggctctccaaaactccaaagtcggagtaccctagacatggaacaacctccaaaaagtttcaggcctagccaaggttgggactaatacgccgcgaaataatcggggagatatgagaagtctgtggctgtgagactgtgcgcggttaacaccgctgccccttttgcccaacccctagaaagttccccaactctgactgccccccagtgcgagggccgctaccagttctagggtgagtccggcctccctgccccgccccggcgcctcagaccctctctacacgcccgccccacaaccccgcgtcgcccgcaaagttcaatgtgtaccggaggttagcggagggaggcagaatccggaaagagagactccgccagtggatagcggcggttggccataacctactccgacctccagatacgcgggaggtgggcggcgctgccctcagtcggtgggtcactcacccctcgcttcaggcaagcccctcagcgacgtctctccttgccgactgcggccatcttgtatatggaatgtcggggacctacgtcatcacgctgcgtcctgagacgccaccaagcgaccggaggggcggagagagtaggatgcctgtcaaccaatgggaagaaagcagagctctcaaaagaggaacgagccgccgctctcctccccgcccgccccgcgggtcagtggctgctgcttacagagggaggagccagccacagggcccatcccgtcggtcccgcccctcggggcgaaaaggcattctggagcaaccgaacctgctaacggaacttgggcgcgtaggcggggcccgggtcgagattcgtccaatcaaagctctggcgggggcgaacgcagccagttgcgacatcgtggttggcggcggctgagccggccgctcttgcccccgggagctgccagcccactggctggggaggaccccgaacggaacgccggctgggtggcggggcggggccgcgcccatgcgtccgaagcgtgggccaatgaacggcggcggctgcggcccgggggcggggtccggggcgggaggagaagcgttgggccgcggtcgcggggccgtctcaggctgccgtcccgcccctcccgtccggccgccgccgccgccaccgccgccaccgcctgggggttggttgaggcggacggcggggtccgggccggagtacgtcgttcccgctgcgctaggggaagcgggcaggtgagtgctggcggcggtctctgcgcccgcgcggcccgcgggggaaactcgcgccgcgtctccgagctctgcgaggccgtccctcgccctggccagcgcccctcggccgaagtccggcccgcgcccccgccagggtccccgccggccgctgtggccccggggcttgaaggggcaggtgtgcgctcgggggccagggcgaggagggcccggcggggtcggagggcgccggtcggcctctgcccgggcgccctgcggggcgagaggcgcgcgctcgccgctgccctgtcccctctggcgcccacgctcccgggccccgcgccacccggtctcgaggtggtgccaggtgcaggcagcgctctccccgagcttgccccgctgtccccggccctcgcgcctgctctcgggtggggcccgggcccctcgcgctagtcggctcggctctgcgcgcggccgggtcgcgctcccatttccttccttcctcccgtcaccccgctgctcggggaaggctgtgcggttttatgttcctctctgcgagttctcggtgcccaccagggtgcccggggaccagcccccgcctcctcccgcgccgtccagttaggaagacggacgtaggaaataggtcgtctttcttcccacgcgcccctggccgtgctccacacgcgcagtgccctactagggagaggcaattcggtgctttagagtttgtcattccggcgttaactcttcctcctcgtggctccagcccggcgatgcaactcttgtcttttcccggtctccacttgggaaaaggagctgacagtgacgcgcgcccctggctgcggggctcacccctgcccggccggtgttgggaggagggcatttcagtgttgcaaaggcattcgcgggttaggaccactcggaccgtgttattttgcttttctaaataaataaggtgatgtttcaaaagcaaaaatacttttaaagtatgctgacaaatcaattttgcttttaagaatcctcgaagagttaccccatcttcgtagcctgattgtggtgctgatgaggccactataaatgcgtttgtcagaactcagaaccggacactgaaaagtgtgaattttatcttatgtaaaatatacctctccctctcccgtttttcttcttgaaatgaccttgccagtatttcaaaactgaactaaccagtaataatctcggagaagtgtttattattttaagcgaatacatttaacccaagaatatagcaaaataaagcagtcttcctctccactgttaaaatttgccaagacttgcttgaaccttgctgtatgtactgtgtttatacgggct

SEQ ID NO: 1241196 - DNA, 4001 bp, Homo sapiens
cagtgagactcgtctccaaagaaaagaaagaaaaggtaaacaaaatattcagattttaacatgcaccaaagacctcactttcaaagcaacggtgaagtcaattaattattcagttggaaatcgtgtcactgacaaaggacgctagaaagcaaatactcttaatttactgatactataagtaaccaagaatggtggttcccacggaaataaagcatcacaggctgtccttgatctcaggacctctttctactgctgctctcacaagataccgtgtaacatttcactacagagtaatccaacagaagccctctaaagaatattgcaacttaagttttatttgtaaacaaaattccaaattccagtcaccaatctggcagagtagagtaggaggcctggaggcctcactgtggaacactttcatttgtttcttcgtataaatatcagctttatcagccccaaagattagaaattactggttcgaactgaacagtcctagcccagtgacgcaaatgacccaaggataaggttttcataggtttggcctgaacatacgcatttcctcctcctactcagtggttttaggtgagacagtctgagggtcttgaccggcacacccgttagggagagatgaagtaaaagagtttcacgctgcacttttacctgtctttaggatcctaattatcgttaaatggtttaatcaaatttttgtcctaaaaaagcataataggttagctgaccaatgattaaaacattatagatccggaacgaactagagaaggcatgcaaaattcagatgagaaagtttctaagtgatagctccagctacccctccaaatatcacaaaggtctagcagaattggaattaaaaaaaaaaagtcctcttgcacggtttatttaaaataaagccttaaccttaaaattcccttgaaggtgttacagcaaagtaggtattcaggctctgaccaacaaggggatgtagacaggctgtcacccaggaggggccgttagagctgggctccctggggatgcaagggggtcccacggggcagtgggcgaggcagatgcagaaagcacacccagctgcccccacaacgcagagaagcgtggggtggggaaagggaactaattccacactgcctccggaccccaaaggcgaggtgcgggggcgggggcgggggcgggggcggatatcccagtgagtgctgcaggaaatgatatccagactcggagggtggatctaggaagccgccagggcgagggcccggcgggggggagggggtgggagtgggaacgtaggatgtggctccaaggggcaggatgagggggcgggacgatcgaacgcggatgtcgagcctagggagggcaaggagggatgaaaagctagcggagggacgagggtgcaaggagcggctggagagagatgggctgcgggcctgggggcgctgccagagcgagaggaggcgaagcccacgagctgggtgggcaggagggcggcagggtctgtccgggcggggatgggcgggcgtggggatgcgcgggctggggcgcgggggtcgcagagccgcaggtccggccctgccggcgcgcacttaccccactcgaggaactcggccacgtacttgtcgcggcgcagggccgagtggctgcactcggtgtacaggcagacgagcacgtcgagcagcgtttccacgctcagggcgctctcgttgcgccagggcccgtccaggagcagctgctccagcttcttgagccgcaccttggccgacatggtgccgcgcggcccgctcccgacgcgccggcctctcaccgccggctcggccagtccgtcagggcgcgccctcgggggctcggcggctgcgagccccggcagcagcggcgcctcctcgccgccccgtccgcgtcgtcgcgccccggcctaggccgacatcttgggctccgtcccgacggcgcagagtctggggcgccgggccccgcgggtccatgggccgctctcctcccctcggcgccgccgccctcccagctcgggcggcccgcccccgccgccctcagccccgcccgcggccgcgccctccccgccgccgccgccgcagactaggagcggcgaggagcctagcgctgcgcaagcccggccggcgcccgagcccgaccccagccccgacccggcggcccagccccgcggcccgcagccaaccagggcgcggccagcaccagcgcagccaaccactacggggccggccgccgccgcgctgacctcagcgcgccgccccgccccgcgcccggctccctgctcccggcgggctcgggcctcgccgcttgccgtagggagccgggatgctgggaaggcagggccgggcctggggagcggcgcggggtgggggtggggggggcggggcggggcgagtgggccgctgagattgcggagcccgcgcatgcgcagagcgcgcctggtgggcgtgtgcgccttcgccctgcggacccggtgccttcagtattcggggtccgaccgcgcgcgtcgcggatcccggggccgaagacgaccccaagtatcggagaggcagagtcgcgatctcaggccgtcgagccccgtcccgcagtccgcgggcccatgttgcctgcggggcctcggacctgcccggccgaggtgggggtcgagggcggcccggcaggcgcagctctgatggcctcggcgggttgtgggctatttaaaacggcttgtcccagctcgaagcggtcctggaagactcgggccctacccctgactttaccgatgagagactgaggcccagacggtgtggggtcagggcccaggcttctgggggatgctgccaaggcgggagccagcgtccccagtgcccggtggattcgtgatggcttgcagagggtttcagtttccactgtccagccctccctgcagaccaatgcctaggtgtgacagtttggtaggaaaggggccggatatttgtctccaggctgggtttgcctagcgagtcgctgcatttactaagattgttggttaatttgggtggctgggggagggaggctgatggagataccccccaaccccaacaaacccttggcgtcaggagaggaggggcttttcctggagcttgcggaaggtcaccgaaatcgtgggggtatctgagagcttctggggcgcgcgggtgcaggggaaggggtcatgcttccgtggaagcggtggcctccaggtggagccgatgaaggggcagataggggtttgaagcaggacgttaagggagcctgaagcaaaactaatctctggagctaaaaataggagtgggcctggcgcggtggctcacacctgtaatcccagcactttaggaggccgaggtgggcggattgcctgagctcaggacttcgagaccagcctgggcaacacggtgaaaccccgtctctactaaaatacaaaaaactagccgggcgtggtggcgcgcgcctgtagtcccagctactcgagaggctaaggcaggagaattacttgaacccgggaggcgaaagtgcagtgagccaagatcgctccactgcactccagcatgggcaacagagcacgactccgtcttaataatagtaataataataagaagaagaagaagaagaagaggagtggctgcctatgccggagttgttgactggaacaagaggaggaaccttctgggctgctggtaatgttctatgcctggatttgggtagtagttacatgggagcacgcataagtaaacattcttcaaactgtcttcttaagatgagtgcatgtcactgtgtgtatgtatatataataccttcatttcttaaaggcaggtgagaacaatctggcgttagaggtgagagtactggttgcctttggggtatcaactggaaggaggcacaaggagaggcctctagggggctgggaacattctgtatcttcagcacagccgttttgtaacgttgggtctgtaaatgtgtataaattcatcaaactgtattctaaatatttgcatgtt

SEQ ID NO: 1241197 - DNA, 4001 bp, Homo sapiens
caccaactccacaggttgttaccgggacagccaagccctcagtcaactcccagcactgccctcaggcttctaaaccaagcaccgaccagacagagaaaaacgaagagggccagacggactgaggacatgtccgacatggcaggtggaacagccaacaggccactagggacagagcaacctaggcccaccgaggcagaggccagcagggagcagccccgcagtgctgctcaggcaagcagagtacagctcggggactggtccttcactacagcagcagtggccacaccttcgtggctgagcaataccacgaggctggctgaaaacgcagattcccagattctgatcagtagggctgggacggttggggacagactcaactctgacctaacctgtcaccttcacagctggacttgcagccacttcaaagtttcgggtttttaagcaaatcatcaacaatttccattcctcacacatcagataagctttgaaatactttatcggaaaaacagggagaagaggagcaaggtctgcagtcttgagtactgagtgggagctccaccttccactacaagtctcctggaggctgttcatgaacaattactgttatgttaatttcaggtatttggttttttttgttttttgagacggagtctcgctctgtcgcccaggctggagtgcaatggcacgatctcggctgagacctctgcctttctggttcaagcgattctcctgcctcagcctcccacatagctaggattatgattacaggcatgcgccatcacgcccagctaatttttgtatttttagtacagacggggtttcaccacgttggccagctagtctcgaactcgggacctcaggagatccacccgcctaggcctcctctcaaagtgctgggaggtgtgagctaccgcgcccagccaattgcaggtacttttgttacttggaacgaaacacactccttcttttccctgaaaacatgttccagtggcaagttgagggaaacttcctagccccttttccaagatacagcctactactcttcctagaaaaggggtgtaactcactttgtattctggatttccaccctaattataaaacacggtgacacttgaaaatagagtggttgtacgtagaaagttgataaaacgtaagttttgtgaacaggcaatgtttttctgtggctcgctttgagagaacggttatctgggtcccgccgtcccgtgcgtcccacacgaaggccacaggagaagcgaggcagcggagaccctctattccagcaagctgtcggagcctttgccacgacgatcctgtttgcggggcgagaagcgtctgaagacgcggagggaggcttgcgtctgacttctgcaagtgtctcggggactttccctagtcccacctcgcaccgccggaggagcccagggaagacggcgctggccgacccgcccggggtctgggcctcctcccacatccgcggccctctccgcggccgggctccgacagagggggctgcggcgcgcctggcgttccctccgctgcaactagagccgaggtacgggaaacgccgctgcgtaccccagccgggccctcgtgaagcggctcccgcgtggggccgcccgcaggcctcggcaaagccccagctccgcgctccgcaaggaacgcagacggcggcccgggcccctctgttccccgggccccctcagcagcggccaccccgcgggggaaccagcgcccaggagggcggcgagggcgccgcggcagccccagcggtggtcccgggcgccgcctccgccccggacccagcgccaggagccacagactccgcgcaccgcccccaggctcctccgcgccctgcagcacaaaagtgcacgccgccgtagacgccctagcggtccgccgggcccgctcacctgacccgcgaggccgcccgccgggtcctctgctcagccaccgccaccgccgctgccgccagcttcccgccgctgaggaaggagcgcccgacggcgcggggcggggcgagcgaccgccactcggcgtccacaaagggtcgacgctgcgctctccgcgcgctacgcccgctgattggccactcgcgggccgggggcggggcctcttgttcaaacccacgcgggcggggcatctgtggcgcgtcttcccgcgctgcggcgacggccgttggggctcgcgcgcgccctcggttgccccgcccccgcccctgcgcccggccccgccacgcccacgccccgccggctcccaggtctccccgcgcccagtccggccccgccccgccagctcccaggtctccgcgcgtctggccctgaactgaacgcgcctgcgcctggggcccacgtggggccctcgggcgggcgtggcggggcaaacagaggtttggactctctcgcttctgcctggctcaacttctccgccgaggcatccgtgccggggtcgggaggagccgggcacggcaattcccgggcggtctgggctccgaggtctatccaagcctctccagagaccggggttatctccaaaggcttcctaggtttacacgtaagaaatgtaacgtgaaagttcaaagcaggggacacgtgttttaaatctcttagtggaaaaggttttaaataggatgcgagaacctgcaatcattgacttaagtaataccctgagcgcctgcagcaggcccggcaggcgtggctgcagctgagagccaagtgctggaagttgggggggaatcctcagatcaatccgcaggtgcggatgcgccaaggtcggtggtaaatgctgaaatgctgtcgggaaacctgggagtgacgtgggggcgctgctcacataggtctctaggataaggagcgtcttaaagcaccaaaaggaagagtggacgagaattcaggagaggaatggctggggcaaagcccgaggcaggggcaggaggcaggagcacgtctcagtgcagtgagaaagaaccctgtgatctcgtgggaaagttttaagtgtgaggggtggagggacttttgggctattctgggagtgggatggagactactggcatggtcagcagagaaggaactggaatctgaattgtgcttgaaaagaatcactgttcttatttaaaaaaaaaaaaaagggggtctctttcgcccaggctggacaacagtggcgtgattatggctcactgtatcctcgaactcttgtgctcgagtgattctcacgcctcagcctcccaagtagctgggactacagaagtgtgccactacaccaagctaactttttttttttttttggtaattttgtagagacagggtattgtcttgttacacaggctggtctccaactcctggccttaagtgatcctcctaccttggcctcccaaagttctgggattacaggcatgaggcaccacaaccaccaagaatcactgttggtaatagatttggaggaggtggcaggaaggctggaagtagaaaatcccattaggttactgcccaggtaaaagaaaatgggacttgataaaggtgactacctgagaatttaaagtttatgcatgtcaaagtgaaaagacaaatggggaaaaaagtttttcctggctgtatcccacataaaggttaaattccttaatatacagatattctgcaaatgcaaatgaaatctagatcaccaaagaaaagtggtttggaaatagtggcacccacctgtaatcccagctactcaggaggctggggtgagagaatcccttgagcccaggagttggaggctgcagtgaactatgattgcaccactgcactccagcctgggcagcagagtgagaccccatctcttaaaaaaagaaaagaaaagtgggcgtagaatataaacacagttcagagcaaagaaaatacaaatgctcctatacaggcgaatagatgctcagccccaatcagaacaagagcagtggaaattaaagctatgctggagtgctgtttgccacgggtcaaattggcaaagatctaaaataatgtctggag

SEQ ID NO: 1241198 - DNA, 4001 bp, Homo sapiens
aatgagaacaggctctggaccagcatattcctcaatgacaaagaactggttccagacccagctccttcgagtccgcagcagagcaggccctgggtgttcccgggaccctgcccaggcccgggctggggctgccagacgccccatgcagccccagccacccagccaggccagcaggagcctcaccaggccccacatgtttggactccagccagggctctgttcactggccctgggtgctgaggctgggccaggccacgtggcccatgagctggctggggtggaggggcagatgcgttgaggctaccccatggatccacacctgcaggacaagcagctgctcaggctcaaggaaacccctagccctcctcccccgcaaaattagatgctgaagaccagacctccaaggaaccagacactccactgcccagaactcagactaagacagagagcagagaggctgatccttcctccacccaggctctgcatgtattcacctccagccctccaagctgataaatctctggtcagtcaactctgagtagagaactggggaggaacacaggagaggggatgctgggagggcttggaatcccaaatctggtctctgtcctcccaggttgggcacgtagccaggtattggaggaggcggggctaccagagaaagggcttaaaattacggagttgggattcatggaggtgtggccttaaggtgtctagggtcagcatgagatgacaaggagtgcagcctcaggcagggctgagagtctgtgaaagtccctccccacaagggggagccccactctccaggccctgtctccagcccacgctgccagtgcagtccttgaagggggactgggctcgtgagacaggagttgggagccagagctgaaggaagaggatacagggtgggggacagggggaggtgaccggggagagaggtccacccagaggctagagacagataatgactgacggctagactgactcagggactgtccggcagagaaatgactggatgagagacagaaacagaacagtggcaagagacagaatgagagagaccagggcagcagcctgggtgtctgaaggcagagaggagtcctaggggccaggcttggaaacgggtcaccgggggcagttccgggcaggcaggggcagacctcagcttcgggggtgtcaagccaggcctcgggaacttaattctgggagaaggagcagacaggaggggtggaggcagggaggggccacgggaagggagctagagaggagacccttcccactgctctcctttctcctaggggcgggggggaggacccctcaggtagctgtggcttctgcccctcctccctcagagcagacacacacctgacagtccctttgctcccgagggaagggggaaaccggaggaaggctggggaccagagagaaggcgggatgaggaggcgagaaggaaggggatagaggagtgggaaacaggatagcaggaaggggagaggagagggagggaaaggagagcaagaaagagaaaagagaaaggcaggaaaggggagaaaggtagagaaagaaaaaggcaaagagggagaggagatggaaaaaggacaagagggagagggaagggttggggagacagagggaagggataaggaaggcaaacaggcagagaaggaagggtgaagagaaatcgagagaagaaagagggagagaggtgcgaggggagaagggaaagaggcagagcgcgggagaagggagccggcagcgggctcccagccacggagcgcacccctccgaagacccccgcaggctgcgggccccctcctacccctccgcggattcccgacccctgctccggggcaggcgcccttacctggcactgccgaggggcccaggccggcgggaagcgcccccgcccgcccccgtcgccgggtcccgggggcacagccccgagccgattggagcgggcgccgcggctccgctgcaggtctgagcggccccggcgagaacaagggagcgagacggagggggcgggggaagaagactccgcctgcggaggagcgaggcggctccgcgccgcgcgggagaggagagcccagcctccgaccctccccggccagccgggcccgcgcggcgggggcgggggcggaggcggcgccgcgcgtccgccccctcggcgctcctgggctgcggggcgcatacagatgcggcgcccctcccggaccgggcccgcagcgcccggcagggcactcgggcgggaggacgtccaggccacggcgccaggccatttccgaagagctggcggggcgggtgcacccgggagcgcgaagctgccagtccccgcccgcagcggaaaacgggcgagcgcgcggtgaggtggggaattcggagcccactgcggagagacccggctccgggctcccggttcccggctggcttttgggactggtgtggatggaatcccagctgcaaggcggcggcgttttgagagcccatgcaaagcacggtagcaggtcagctgggggacacttaaggacggcagaagggtccagagagtccgaggcccgggcccagggagcgggtcgggaacagaggcacgacatcggcgggaggtcggaggcgggcagtggaacccttcttgggaagctcggttacaggggccaacagagcgaggagctgccgccccctggtggtagttgtgggaggcaccaaggtggcaggcaggtgaccaaacccctaatttaaccgtgcacaggaccaggaaccagaagaggacccaccctcctagccctgctggggtgccgccacggacacaggttgctccatgccttcccgaatgaggaaggtccacagctttgggttggtcagggccaaggcaggggataaaagacgtgggaagttcaataagcaggaagcagtcagcctaaaggaacacatggaatgagagcaactcctactccagatatcctcagatgtccacgctcagatatccacagtggcttcttaacctgcccaaagaaagccactcacacagtttaaaactaagtcagatttttatttttttttccatagaccacatcatttaataataaaaaaaataaaaataaaaattgaacaaaaggaaaaggtggatataaagtggaacctgtgggaaagaggcaagggctgcaggacagaagagactgggaactgcaggggccctgggactcaggaggagatgctgattcagctcataggtgacccagtcctggccccggctgttcccaagagaaggctgtaagtacccagggaggtggtaagcaggatggaggaaaaatcagaggactggggcacctggctgttccccatctctggccaaccacctccttgcctaacctagctcttgcctctcagacttaatgggaaatgagagggagggtcgggctaagtcccaagagataggttaagggggtgtgtttggggggaaaaggatggccacttttccatttggtatgtatgtagggataggtgatgtgaaagacccttggctccagggtggtggagactgtgcctatccctctgtggccataaccccctggggccgagtggctggtacctgcagctctagtgttttcccagctagcggcgcccaccccggtcccgcacaggtgtgctccgactccggcttctgctgtggcgcttggtgtccctgcgatccctttccctgcctcgttctcggtccctttccctatcccgatctcggtcccccctgtcccgctccctttctctctctctctccctgtccctctcccgactgtgctcccgacgtttctctcgctccagctgtcggttccgttcccgctcggcttccttctcccgctccttttgctcttcttcttcttgctcctttcgccgcttctcccgctccttggcccgttcggcccgctctgcctctttctgaacgatctgtagccaggtaggaaaggcagagaataggcagctcagtcctggtcacagcctccatttgtgcc

SEQ ID NO: 1241199 - DNA, 4001 bp, Homo sapiens
ctgaagtcaaaaggctatgaagtaagatataaccatgtcccatgacattcttttaacataacatgactcactttatttctttcatccctaaaaattcactttaaagaaaaagtggatcccggagcagtggctagaacctgtaatcccagctactcaggaggctgaggcagaagcatggcttgagcccaggagttccaggctgctgtgagctatgatcacatggctgcactccagcctgggagacagagtgaaaccctgtctcgaaaaagaaaaaaaaggaaaagtgaatcaattaccttgagcattcggatttcccgaagggcaattttctttatgacagggtcatcttctgattccagaaacttcttgatggccacaatctgacccgtgtccctgtttctacatttgaaaacaactccataggatccttctccaattttcccaattttttcatacttctccatcatagaggaataaatcttcttaaaatggatcttcagccgagaatggtggctcacgcctgtaatcccagcactttgggaggctgaggcgggcagatcacctgaggtcaggagttcgagaccagtctggccaacatactgaaactccgtctctactaaagatacaaaaaattagccgggtgtggtgatgggcgcccgtagtcccagcaactcaggagactgaggcaggagaatcgcgtgaacctgggaggcgcaggttgcagtgagccgagatcgcgccactgcactccagcccgggcgacagagcgagattccgtctcaaaaaaaaaaaaaaaaaaaaaaaaaaaagaaagaaagaaaagaaaagaaaggatcttcacatagtttgaaaacgtcgcttataaaatattggcaccaacggactgcactagagccccacccaacgatgagtgtttgtcacggtcctagaacagaacagcacatgttaaggaatgaagagtgtacccgtgtcggcaatggcaacgcgatcaggagtaacagcctagagttagctgcctccagtaacccgattttaatcgcccgttaaataccctgtaagttaaaatgtaacttgccatcctaaaacgagccgagctgtaagataagctatctttttaacgttatcgttcatccgatctaagacacctgagctggctggagtacggggagggctaagggcttccccggttctaatttcgggtctcatttccctgcggcaagaagacacctcccggctccccgcggaggcggcggcgaggcttggccgcaggagaccaacccgcgccccgcgccccacgcccccgggactgggaaaaccctcccgcgcccggacgtgcacctcagccgcgccgcgcagcatggagcggtgccacgtgttggccagggacggcccgcgcctccttgcccgcccgggactcacggcgccgcggcggtcagggacgggcctggctcccgcctcgccttcttccgcccagctcggctcggcgtggctcggcccgcgatccctatgggaaccggctcccgccccgggtctgcctgggcggggccgccgcgccccagcttcccacccccggcccggcccagcccggccgccctcccggctgcagggaaaggcctcggagggccgccctccgtccatgggagctgtcctgaccgcgggccgagtcctgctgccgggagagcagacctgctagatttgcaaacttccgcaggccgtgcaaagcgcagctgtaaccgcgtctgcggagcaagacgcctgcgctaggagcccctcctgagcggtccacatttccctgcaacagcagtccccacacctcagaaccgcggttattccctttggtcccttggaggcatcttctgtgtctgtgctgatcagtgctgcggcgtcagtgaatgaatgagagggagaaaggaaagaagaggaaggcgtgactgcagaaattgcttaaagtcagcactttcctctacagtagggaaggttccacggcagtcttctgctgtgggacttttctggtgtgggaggtggaagcttacagagtctgccttaattgtttttggttcctttcccccatctttctcccaacggactcctactgctcaaatctgagcacactggcgggaagcggatggacctggggaaattatgaaatcatgtcagttgccactgggcagagtgcctcacactttatcatccgtcccgttcccagtgccagcatcaatgcgggtacttgtcctggaagcagtacccgaggagagaaaattaacacagtgtctatgaaacaggggccaatcccgtgtcaagcagcatgctactaaatgtaaacccaggaagggttcagaaaggagcctggagctgaggagagagggctggtggctgccctggaaacccagtacaaggatggcctagaggtggtctgtgaacagaaattgtttgcaaatggcaaccattgatctgttttctgtctctatagttttgccttttccagaatgtcatgaaaatggaatcagaccgtatgtagccttttgaggatagaggatctcccccaccaccccaactccagtgagctttcagatgagattgtagccccagatgacaatgtaagttcaatcttgtgagagaccttgagccaggggcacccagctaagccatacttgggttcctgacctctagaaactgaaatatgtttgctattatgttttggggtaatttgttatgcaaccatatgtatctaacacagaagccttttattaataggaggttgagaaagttcactttcattcctagtttgcttagtgtttttgtttgctttttaaaattatgaatggatgttgaattttatcaaatgcatttcttcatctagaggtgatcatttccttttcctttcttttcttttttttttttaattgagagggagtctcgctctgtcacccaggctggagtgcagtagtgttatcactgctcactgtacccttgaactcctgggcctaagcaatcctcccacttctgccaggcctgagtagctagaattataggtgtgcaccacctaattgtttttatgtagtctgttgatacggtgaattatattgatttttagatgttgaaccaaccttttgttcctgggataaacccaacttatttatgattttatcattttaatgtattgctggatttgattagtaatattttattggaaatttttacattcatgttttgagagatattgatgtatagttttcttgtaatatctgctaattttggcatcaggataatgctgatctcagaaaatgagttgggaagtgtttatcttcccttttattttctagagatgtttacattaaattggtattattaattccttaaatgtttggaagaattttttttgtttttttttttgagacagtcttgctctgtcatccaggctggagtgcagtggtgtgatcttggctcactgcaacctctgcctcccaggctcaggcgatcctcttgcctcagcctccaaagtaggtgtgccaccacgcctggctaatttttgtgttttttgtagagacagggtttcaccatattgcctaggctggtctccaactactgagctcagataatctgcctgcctcaacctcccaaagtgctgggattacaggcatgagccactgcaccccgccttctaatataagcatttaatgccataatttttcctgtaagcaccactttaaatacatcacagaaatcttaatatgttgtatcatcattttcattcagttcaaaatatttttttttttttttttttttttgagatggagtctcactctgtcacccaggctagagtgcaatagtgtgatctcggctcactgcaacctccgcctcccaggttcaagcgattctcccacctcagcctcccaagtagctggaactacaggcatgcaccatcatgcccagctaatttttgtatttttagtacagacagggtttcatcatgttggccaggctggtcttgaactcctgac

SEQ ID NO: 1241200 - DNA, 4001 bp, Homo sapiens
cttttttttccaatccaacaatgacattttttggaggcctagatgtgccaactagtgtgctttggggatatagagctacagaggcaaggtctccatcccagaagaactcaatgaatttggggagctatcactgttaatgtagtattgataaagtgtagtgagagatttgaaaggagcattcacaaaagtaatcttcagaatcagaaaaagagtatctttctgcaagaaacagattttctttcaggtaaatgaaccctttgaaatgtaatgatcacctcctcccctgggaaagcctgaggaagtgaaaatgcccaacagcctctccctgtgtacagagagggtaagggtagggtgacccgggcagggggatggtcaaaacactgcaggtctcacccctgcccatgggagcactcccctgcggggctttggaagcatctcctctcaatagataatatcctgttggttaagaacattccaaacctaaatagagaagttgccctgttacccacccattccaatttatccaaagcttgctactttccatttaggttccttatctagaagtgaccccacacacttatccatgggcacaagatttgtagagtgatctggagaaaatggagaagcaagaataatagtaaatcccctggaagtttcattcatctgtctctcatcaagtagctcttcccttgtcacatagtagttatacaggtcagaacagagaggccataactgaaacaaagttgacctccaccatattcattacatgtcacctttcacattgcgatttggattttaccttcacagaagttctgtaaagtagtctctccattagcgaaaaacacactttcagcttgtaataaatacctttcccccctctgatatcatgttatttttagggttaactaataaacatttgaaaagtgatcaggccaggctcgatggatcatgcctgtaatcccaccactttaggaggccaaggtggaaggatcacttaaggccaggaactcgagaccagcctggccaacatagcaagatcccatctctaaaaaatgttaaaaaaaattagaaagtgatcatttcacttctttaagaaaaacgcttctttttagaaacgggacatgatgatgctcagcagtaaatacatatgaggtgtaatgagaatctgtgagcttcctagcagtttgaaaacaggtaaatgttaattctcttaatagactgagtataccaataggaaataccttagaagtttaaaaatcaacaatgccagcaaaattgaattgtcttacattcctatactatcaaattgtaatggtccttgaaaacccaggtctacaggtgggagagaaattatggggaagaaaaataaatatcccacagcatctctaaaagtgaatgccaccttacctggcacttttgtctctgctttctagttcattatataattagtgacttgtgcacagatatcccatttgtgtcactgaagtcaaaaggctatgaagtaagatataaccatgtcccatgacattcttttaacataacatgactcactttatttctttcatccctaaaaattcactttaaagaaaaagtggatcccggagcagtggctagaacctgtaatcccagctactcaggaggctgaggcagaagcatggcttgagcccaggagttccaggctgctgtgagctatgatcacatggctgcactccagcctgggagacagagtgaaaccctgtctcgaaaaagaaaaaaaaggaaaagtgaatcaattaccttgagcattcggatttcccgaagggcaattttctttatgacagggtcatcttctgattccagaaacttcttgatggccacaatctgacccgtgtccctgtttctacatttgaaaacaactccataggatccttctccaattttcccaattttttcatacttctccatcatagaggaataaatcttcttaaaatggatcttcagccgagaatggtggctcacgcctgtaatcccagcactttgggaggctgaggcgggcagatcacctgaggtcaggagttcgagaccagtctggccaacatactgaaactccgtctctactaaagatacaaaaaattagccgggtgtggtgatgggcgcccgtagtcccagcaactcaggagactgaggcaggagaatcgcgtgaacctgggaggcgcaggttgcagtgagccgagatcgcgccactgcactccagcccgggcgacagagcgagattccgtctcaaaaaaaaaaaaaaaaaaaaaaaaaaaagaaagaaagaaaagaaaagaaaggatcttcacatagtttgaaaacgtcgcttataaaatattggcaccaacggactgcactagagccccacccaacgatgagtgtttgtcacggtcctagaacagaacagcacatgttaaggaatgaagagtgtacccgtgtcggcaatggcaacgcgatcaggagtaacagcctagagttagctgcctccagtaacccgattttaatcgcccgttaaataccctgtaagttaaaatgtaacttgccatcctaaaacgagccgagctgtaagataagctatctttttaacgttatcgttcatccgatctaagacacctgagctggctggagtacggggagggctaagggcttccccggttctaatttcgggtctcatttccctgcggcaagaagacacctcccggctccccgcggaggcggcggcgaggcttggccgcaggagaccaacccgcgccccgcgccccacgcccccgggactgggaaaaccctcccgcgcccggacgtgcacctcagccgcgccgcgcagcatggagcggtgccacgtgttggccagggacggcccgcgcctccttgcccgcccgggactcacggcgccgcggcggtcagggacgggcctggctcccgcctcgccttcttccgcccagctcggctcggcgtggctcggcccgcgatccctatgggaaccggctcccgccccgggtctgcctgggcggggccgccgcgccccagcttcccacccccggcccggcccagcccggccgccctcccggctgcagggaaaggcctcggagggccgccctccgtccatgggagctgtcctgaccgcgggccgagtcctgctgccgggagagcagacctgctagatttgcaaacttccgcaggccgtgcaaagcgcagctgtaaccgcgtctgcggagcaagacgcctgcgctaggagcccctcctgagcggtccacatttccctgcaacagcagtccccacacctcagaaccgcggttattccctttggtcccttggaggcatcttctgtgtctgtgctgatcagtgctgcggcgtcagtgaatgaatgagagggagaaaggaaagaagaggaaggcgtgactgcagaaattgcttaaagtcagcactttcctctacagtagggaaggttccacggcagtcttctgctgtgggacttttctggtgtgggaggtggaagcttacagagtctgccttaattgtttttggttcctttcccccatctttctcccaacggactcctactgctcaaatctgagcacactggcgggaagcggatggacctggggaaattatgaaatcatgtcagttgccactgggcagagtgcctcacactttatcatccgtcccgttcccagtgccagcatcaatgcgggtacttgtcctggaagcagtacccgaggagagaaaattaacacagtgtctatgaaacaggggccaatcccgtgtcaagcagcatgctactaaatgtaaacccaggaagggttcagaaaggagcctggagctgaggagagagggctggtggctgccctggaaacccagtacaaggatggcctagaggtggtctgtgaacagaaattgtttgcaaatggcaaccattgatctgttttctgtctctatagttttgccttttccagaatgtcatgaaaatggaatcagaccgtatgtagcct

SEQ ID NO: 1241201 - DNA, 4001 bp, Homo sapiens
ccaagggcttgtgtattgaggaactgtgatatcaaaatagagatggagtagaggagatgaagtagttttgcccaccccttttctcaaaaaacatccccacatggcctagtagtttggtgggggtggtgtaggtgaaataacctgcctccaactttatgaatcactagactagagagattgagatagacttcgtatgctgatctaagcagttggaacttaatcctgcagcattttgacatggaagacttctacactccttgttgaaattttaaggaatcaaaagaaaaagaaaaacaaaaacaaaacagaacaaaacccatacccttttctcactccctagttgaaaccaattgaaagataaagaaatggagttttattattgtatatcaaatggagtatgcagcttaaagctgttgccacgtgggcttgccccttgttcaccccagaattagacaaatgtatccacccagtcacaggtggccatggacagtctggggctcctgtgtgccagagagtggaccagaaagcaccttctgcaggcaggcaggtagatcccaagaaagaaggaaagaaaaagttgagatactggtgttcagttccttccaaactcggggatcagataactcaatggggacaggtggagaaagaggccaggagtgaaggacagctgatgtccctccacatggcaacatagggattagcaattgtaagcacctaatgctctttctagctctgaagctatattctacaacggtcttggtactagaagatcacaggacggctaatttaggctacggacttttttttctttctttcttttatcttgagatagggttttgctctgtcgcccaggctggagggcagtggcgtgatatccgctcactgcaacctctgcctcttgggttcaagctatttgcgtggctcagcctcccgagtagctgggactacaggcgtgcactaccacgctcagctaatgtttgtatttttagtagagacggggtttcaccgtgttggctaggcttgtctccaactcctggcctcaagtgatccgcccgccttggcctcccaaagtgttgggattacaggcgcgagacaccacccggccctaggctatggatttctgttgctttggctctatctgaagtattataatcaactgcacccaaaggaaaggcttccagtaggttgtcaagccgggcagtaggaaatatgggttaggtgggggatcttcagctccttgcctgcatctgttttttctttaaagcaactttgatgattcatatttcaaatttgtgtggcccattcaccaggtttattaatcctaacagagctggacgtttctgcttccccaggccctgtgattctgaacgtcacgggaaaagagcagcattgccaggtggccctggggcatggtgacagcggtggtgtcgcccacaagccgcggcgtggcattcgtactcaaggtttccccaggccctgtgggcgcaggtagcgcccggccacccttcggggctggggtatcgcgcccactcatcgctgacactcaagctcttcggctcggtttcctcggtacaacgaggctcggccctctttggctgggcggctgggaggcttatgagaccccgcaggggacaggtgacagcccacagcaggtgcacagcgaatgtccgtctttccttcgtcggccaccgaccctgctccttcgtctctcgtgcccgtgctgggcccgtgcgagtcacctccccgacccgcagaacggttacggcgccagtcgcactgctaccaggctagggctgccctccggcccaggatcgggtccccgggaccgcttgcgtccctgccgcctcgctcctccaaaccccagcacgtccgactcaccggcttcatcgctggccgccccacgtcgagaccagtgccgcctccctctgcagcgccggcgactcaccggtgccccggccgagcccgcgccccgcagcttagctcactggttcgtccttctgtgaggtgggcgcggcgtcttccagcaaccaatcagatccgcttctggtttcttactccgcctttgggtggccgaagactcggcctctaatcgctgactggttcctagaagacctttgaaagacgcgcgggaggcgggccctgtgggacgttgattggctgggagggcgccctcctcccgccagttgggagagtgcagggggcggaggcggggcggaagagtcagaaggcggccctagcgcttgggggacgctggaaagctttgcttcttgatggcaggatgtcagcgtggtccatacggttgggaggtgatttttttttttttcttgagacggagttcgctcttgttgcccaggctggagtgcaatggcgcgatctcggctcaccgccacctccgcctcccggattcaagcgagtctccgcctcaccctcccgagtagctgggattacaaggatgtgccaccaagcctgactaatttttgtattttttgtagagacggggtttctccatgttggtcaggctggtctcgaacccgggttgggagtttttgtgtttgtgacggaagtcttactatgttgcccaggctggcctcgaactcctgtcctcaagcaatcctcccgccttagcctcccttgtagcggctacggtagggagtttttgtttctttaagttgtatttttattttttattttttaagggctcagggaagcactgtattggatcgtcacatgaaaaacatcacatagactttgtaattatatctagacatacaaatactagggaaaaaactaaaaatttagagtataaacatattttatatgcttgaagttttagtttatcgttccagaaactagacaagttacagtgtagatcaatattcctgtcccccaaatatgaattaaattatattgtgtgaaagggaaattataaaatgccaggtaagataggtctaagggccagtgtgtctacataattagctgtaatcttttaaaaatgtgagtatttctccgccttctccagtccccatttaactagccatgggaaaggaagtcgcctggagcagatctgagaaaaatatgcagaaatttcaacccctgattcatgttgtgaaagccaatgggtatagagctattagaaggaattccttagtaaagaaggtaccacagtttgatttagagactgtattagctagtcatggttgcccagagataaagaatgaataggatgtgtatatatggatatagaaacagatttattttaaggaattggctcctgtgcttgtggaagcttggagagtccaaaatctgatggggggaggccagtgcgctggagactcaggaaaggctgtacttcgagtccaaaagctgttgtagaacaaagaagagccaatattgcatgtaaagtctgaaggctgtctactggcagaattaccccttgcacagggcagggtcagccttttgttgtattcagctcgtcaactgattggatgaggcccatccatattatggatggcagtctgctttactcaacgtttcccaatttaatgcaaatctcatccaaaaacactttcacagaaacatccagaataatgtttgtccaaataactgggcaccatggcccagtcaagctgatgcacaaaattaaccatcctagacacccacagagattttccatactcgggaaatccttttagatctgtgctgttcaatatggtgaccatattggctgattatctcaggccaaattagaaaacaaaatcaaatcaaaggccaaattagaaaacaaaatttttgtgtgaactcaagggctacttgggaaatactgctctcttttaatatagatctgcttcctcagatgaaggccttagtagggttaaggaacagaccacacccaccacgtatttatagctattgttttgatatgtaggtttccatttcatattagaaacggccatggtactgtgtacaagagaatgtaggtgggtatgcatgtctagacgtag

SEQ ID NO: 1241202 - DNA, 4001 bp, Homo sapiens
ccatgtactccagcaccttctgctgcgtctccagaatgcgcctcttggccttgtctcggctcttgcgcacggcgatgttgttgcgctcccgcctcagccggtactcaaggctatctttgttcactgccttcttgcccttgtgtaaggggccagccggggagggcgccttcaggaggggactgcaggggggtgcggcagtggccaaaggggcctggaggggaaggcacggagagacggagaggtgagggctggccaggaggcagagcggaggcggggcgggaatctcggcagccagggcacacttgatgcgtcaaaggaatacaggactcagagccagctcctgtctctcaggtcaaaactatcatcgctctgcttctgggagatggtgacccagatgcacagggtcctctgcttgagaccaaaactccctttcatgttctcacactttctttctttctttttttgtaaagatggagccttgctatgttgtccaggctggtctccaacccctggccttaagcgaacctcctgctttggcctcccaaagcgctgggattacaggcatgagccacgacacccagccaatgctctcacactttctgagtacactttccctcaatctgccttgagtctcccgttctatgaccagtagacatttctcacagaagcaggcggcagagaaacaagaggagggggcatggtgagcagcagagaggctggcggtgggggcctgagatcaagtaggtcagcttgccacaggggctttgggtggggattcagggtgggaatgaattcacagagaaggaaagggaggtcatggtggggtgtgaacacagaggactgtgggttgggtccatttcacagagcgacaccaagcacaggctcagcagcatgagccggggcacagggtcctgtccacaccagcctctccagccccgggcaggagggaggagggctggcctgctcttaccttgagaacgcgcagaggctggccgggtgctgccagagttgggggcaggtgcatggctgtctgcccacagtgtgccacttggtactgcaggggattgtagctgcctcggctggcagctcggctgccctctggcccccggggctcctccttcaccgccacagccctggggtcgtagctccctgggctgctgtagatgccaggccccagcgccttcctgtctgggccgaaggtatgtggagggtaggcaaagggccgagggtcaggcggcaagtagtgggggaaggcaggggttccggggcccttgaggcctctggcctcaggcgctggcttcacggcaaagagatcggagagaagctgctcttccccagactcgatgtaggcggagaggtcaatggaggcctcatgctcacacatgtcccctagctccccgggcccagctcggccccctgagaactcgagtggctgctggccaccccggggctcacactcgtagtaggtcccgtgggacatggccggcccgccccctcggctccccgcccccacctgctcttgaggcaccccttggggtgctccggctgccctctctctacctcctcctgacctgggcctgccctctctcgatcttctgccctagacctgccctctgcagtctcctctgtcacccactcctgtgtggcctctctcccccctctgctctgcttccttttccttcctctgtagtcaatgcctctcttctcttcccttttttcccctctctccccttggggtgactcagggaggggcaggacacaccccagagggagagatgtaagccttagagaaaggcgactcctggcctattcagcagttggggacactccttggtcagggaccaagccagggttctggagatgcccgaagctgatgcttctgggaatgcctctccactccctgctgggaggccaggggactccaaatcctcgcagagggcaacaccccactctgagcaacctcctccctccgactttgaaaaagttctatgcagaatgaggttccaagttagagtgaagagagaaagccctcttccagtgcctaccctcagttgggtctcacctcctcccttgacacgccttcctctggctctcccctgctgctgggctccacctacccccaagagaaagtttcttttgtagccccacctcccagagcattctctgagtgtaggccagggtttgttttttgaggggtctagggagtagtgataggtcctaggaacaagctctacacgcgagcctgcgtggtgctccagagcatgctcatttgctaggtttttgcacaggagctgtgcaatagcccacatgttagtgcgtttccagccctagctacctctagcagcctggtacacttcctaactccctgggcttggccaaagcacctggtcaggacttgggccttgcaccgcaggcctaggcaggttgctgccctcggagtagacagccataatcctccggtggctccagcacttctctcttccagctgctctgtgctgcaagaggctcaggctggtgcttcgcccctcaccctgggcctgaggctctgcctctggtttcctgtgcctgggctgcagggcttaggagcttgctgcagctcgtttgctgtctttccttttgcatggccgctctctgatctccaatgcgtgtctcttgggtctacttcctcttgtgaggtttgagaagcctcttatgtcatcacctcttcctggggctctgttttagggtctccaggagaagcccatggctccctctctgcaattctttgttctgtgctggctctcctcttcccttttctctttcctttgggaactccccactacctcctttcagagacacctgctctggtactgcttttacctgttgaatttcatctccaaaagggattgtaggtccagttggggggggggggggaaggacacatagaaatgttactgactcttttatgaccagcaagtgctatgggtgccccagagggaccagaagtttttgtaagttgggccaaacaaggggtggttcactgtgagtgggccacagtaggacaagtgcagagaggatgtgtgtcgcattgaacattaaaattttaaaaatgcatattctgattagcatattccggttagcatattccttacatcctccctaccccaacacctaccccagatgctctctgtgcatgacttgagacatggccagatatgctttatctgaaagcacagtgacctggtgtggggagatctgcgtgtaacccagagacagatgtcaggaattagggagatttctccatttcaaagctgagctctcagtttggtggcagtgcttgtgttgaccaccaggtggcaatattggccccaatatttcggactcggagggctgctgtggtccggactcaggtggacagcagagggcagcctctcacagcgctggctctcggcaggctcctgcggggcatctggaaggaggaagaggaaacctggctgggatggggtcttgcagtgcagttccagggagaatgagcagcctgccagtactgggtccagggccttgtctccatgaggagaaattctgttccctcccctactttgaaataatgataatgaataggccttgtgctttctgataaattaatgctttttcaatccttgaaacctacactttttcatgctctttccctgtgggttatgcgggaaggtaggcaaggcagacagtatttttattcctactttataaacagggaaaacaaggctgagaggctgagctacccaaggtcatccaaggaggatgcctggttcgtctctggctgaaaggatgggaaggggttgctatgtgactcggagaaccttcctggccctcatttggccaccgtggggagggggaagtctgcatcagtagcttcagtgaactgggcacaggaggatgtgggaggtatgcaaacagagccgcaggaaatgagaaagtcagcagctttagccatggtgagataaatctctgccctggcctccccg

SEQ ID NO: 1241203 - DNA, 4001 bp, Homo sapiens
gtaaaagaataagaaaaaaatataaatccactggataagcatacaataaatgtatctaatcactgggatactatgtatctgctaaaagagacaaggttgaatggtaagtgctgacctgtaacaatacattttacgaaaaaagaaaaacatactatacaatagtatgaatgtattgtaactactttatatcagaatcaacccagagacattacatggatagtgtattctataatatacatgctaatatagtttttaataacctggtaaatctagattatttttatattatttccaaaatttctggaccagattatcccaataggtcccccatccagctctaaaattctttaatcctaagaattttttttttttttgagacagcatcttactctgtcacccaggctggcatgtagtagtgtgatcacagctcactgcagcctcgaccttctgggctcaagtgatcattccacctcagcctcccgagtagcagggaccaaaggcacatgccaccatgcctggctaattttttgatttttttgtagagacggggtcttgctatgttgcccaaggtgttctaaaactcctgggctcaagcgatcctcctgccttggcctcccaaagtgtgggattacaggcatgagtcaatgcacctggcctaatcctataaattttgtacaccactgatcttaatacacagtgttagtatttttttttttttttttttgagacagagtcttgctctgtcgcccaggctggagtgcagtggcgcgatctctgctcattgcaagctctgcctcctgggttcatgccattctcctgcctcagcctcccaagtagctgggactacaggcgcctgccaccacgcctggtaatttttttgtattttttagtagagacaaggtttcaccatgttagccaggatggtctcgatctcccgacctcgtgatctgcctgcctcggcctcctaaagtactgggattacaggcgtgagccaccgcgcccggccacacagtattagtactgcaagtccgcagtgtgtctcccctctatgtttcagagccttttatctatcgagcacaatatgaaatccaaaaaaaggtccagaatttttacatctatgttgtaaatttaaactttaaacattacacccttaattatcaatgataattcatgttgaatttatttatggaaatcacaaattataatgatctcttacctcaataataatataaggaccactatattttttttaaaaaactaagaaagataatagaactttttgaacattgaaagagatgaataactgcacactgtgccatatatggtccacttaatccaaaaatgttaagtgtgaatcaaattctattagagggcacttataaacagcaatgaagccccttggcagtgggtgggactgaaatttggagtcagaagacctgggaacaatgatcactcttttggctccagaatcccaagcaaattaaataacctgagactcaactgtctcctttgtaaaagataagcatggtaaaggaattatataatgcctgtaaaaggtgtctgacagaatgcctgagacaaagcaggttctcaattccttgcttaatagaaacaggtacatcactgttgcttttgttaaggttataaaggatatctcaacttatctactttgttcatctgaatttttgcaacactgcatacacaatcattcgatattttatttttaaaccatatattagaaggggcttcttgctcccaaaactctatttcttggcatagtcttttctaccataaatatgcaaaaaatgtgttatctcagaaactcagggagaaagcatacttacaaagcacacccccaaaactccgagttgctcttctctgagctcaacgctctttttaggcacatatgtctgcctcctatcatttcttcatgaggttcagggcaaagggcctagtcaagccgatgatctttggttgcccctacactttccccaaaccacctacaaataaacaaaacaagggggtaagacatacctacaactttaaacatttttaaataatgaaatatgaaaattaagtccctatgtacagactatggcataacacagaatagagaaaatgctcctagaatgattcaaaagcccaagagacctcactacaattcttcacatccaagtgcccagcccacatattgtcactggtgacttccatccatgcctgggcatccctggggcttgccagagagttcatgctccagtgtgaaccgcagcccaagtctagccaaaaagtactatgtatgagcatgtctaaaagttggtaactaagtcaggtaatacagttaacatgttactgctgaatgtggtgacccaattatacttccaagccagtctaacactcctaaaggaaatattttataagatgcccagttcttcccatactcagtgctacaattaaataaataagaataaaatgcctttggttgtagaaaagagctgtggacagaaatattttcaattaattgtgactgctttcaaagcaatctgtaagaatccacaggaagtgatccagagaactgggagttgtctacataaaaggtagatctgggaatacatctataaaccatttcaagaaaaaaaaaaggtattctgaaaaagttaatcaaaataaactgtcaagaaacagttcaaagagacccaggttatgcaatggcagacaagatacgctgagagaacataggcacagtgcacacttcactcttctaacaaaacagccaccatcacccatgaaatgagtcataggcacaaccaaatttatgtgtgccaatgtgaaactgccaaagttttaaccttatctctagtgctgtccagtacagcagtcactagacacatggctactgagctctagctcttgccaggtcaaactgacatgtgctatacatgtaaaatacacaagagattttgatgacttaaaatatttttttttttaatgtacagccaggcatggtggcgagtgcctgtaatcccagctactccggaggctgagacaggagaatcgcttgaacccaagaggtggaggttgcagtgagcccagaccgcgccactgcagtccagcctgggcgacagagccagactcctcaaaaaaaaaaaagtaaaaatctcaataagttttatatttactccattgaaaacatttttctatattgcgctaaataaactattatttaatttcaccagtttctttttacttttttaatgtgggtactacaaaatttaaattcacctgagtggctcacactgtatttgtattagacaacactaatctgcataattaataaaaaataaacaacaaatgctgagcacttgcagggtgccaggcactgtgctagatactttacataatactcaaatcaatgctgcaattaatggtaaagttttaccagacgcctacataacagattggctccatcaaaccaataaaagatgcagctgggattcaatgtcaggtatttttacgaaataattcaattaagggactgctaacagctaaggctggagcaaatcctatgatggcacgggaaagagaggtcactaataaagcgttcccgagagtagcacgctttctgtgactacaaaacaggtattaaaaaaaaaatcaaatttgcttgcaggacaggcaagcaaatgtcagacggtcctctggaggacctaccgaatgagtccaatctcctgtcccttaaagcttcacagatgctagcggtagagcaagctgctcccaaaggaaggacaatgtagtccagattcgctgggtaacctggccaggacctgaccgcggacacccctgccgagggagggaggcctcgggatgacaggcgcgccgtctcccctcacctctgcacacactccacccatccacggccccaccccagatcccgcgccgctctgaggtccccacccctgggacgaggggaagtgggactaaaacgtctacagtaagacggggaa

SEQ ID NO: 1241204 - DNA, 4001 bp, Homo sapiens
gacaggggtggaagtgagcccatgaacgcttgtgggactgcattccaggcagagggaacagctggtgccaccagggcagagggacagggcagagggatggagggcctcacatacccctgggagtcctgtggctagtcctggaaggggatgaagtccctaaagggcccagcactggctccatcactgcagggcccagcacaaaaagaaaacgcggtacccttattcaaaaactgagaaggagagctgagcaagatgccacatgcggggtccaagcaagggctctgtgggggtctccaagtcacatacctgtgaggccggccccagagctcctgagtggacatggggctgtgactcaggaggccagtcaagaagtgaggacaataacccaggacagggatgacagcagctgaggcccagtggagcagaggagaaggggaggctgccgggctgagtgcatcctgagggcagggccacaccacatgagggtgccaggcagaggagtgagtggctccttgtccctactttgcccagtgcccacgcccaaggtcttcagctttgaggctcttcaccagatctcagctcccttcggtgagcagcagggaaaaccaacacccagctccagctagcatgaatgcccaagtgaccacgtgccccatggtaaaccctcaccttgggcagggaggtgggaagatgtagaaaaatcctcaccaggagaaggcagctccaggcagccaggaccctctcactctgggggccctgcccttcctaagccacgcacccagctccagccagacaggcaggcactggaggccaaggggctggcacttcgatgaccctgcagccccagacagcaaagcctccaggaggcctctacagccccaccctccctagggctgctgggggagaccacagggtgctctatcgggcagggcctaccccaccattgcacctccggcccccagccagccctcctaggcctcaccctctgccatcacctgccgcggcccgccctgaggagtccacggtccctgtttaaggcgaaatgaagccgagccccagagcctggtggtgccgctgtgccagagccaggccacccactgccccggccgcccaccctgaaaaggcctgggagcccgcgacgctccaaaacggccttcggctgcctcggggctgggctggccatcgttgctaggaggaagaataataaacgccccaaacttgtcccctcagccgccccggccggaagggccacagtcagaggtgaggcggggaaaggtggctaggcccagggcagggaagggcagcgagccgggcggggcaggccggcggtggaaggagcgcacaggccgggagaggcagggacagcggggagacggcggcgaagggaaatgaggagagaggggaggaggaggaagacggagggagggaccgcgggaggagagaccaggccaggagggaggcggccgggcccggcgggggagggagcggcgccttctgaatcagcgctctccgggggcggccatggccgagccggtgccggggcggggacccgggtgcccaggcttgccgccccctccgcaggccgcgtagaaacggggcggctcctcccggcctggcgcagaccagggccgcctccgcggcggcggggacccgcctgaccaggtgcgccgggcggcccccaacccccgcgcctttgtccggcctcggccgggaccccgcgccccgtgagaccccacagccgtgcaggtgcgggcgatgggaggcccgggccgcggccagcgctgggccggcgcgtcctacctgctgttcgggctcggtctccggctcgccttagtccccggcttggtccccggcttggtccccggcttgttccccagctcggcccggctcggtccctgccctcgcgcccgcccgcccgcccggccgagcgctgggcggggccgccgcctaggacatgcccggcgaggcccgcacgctcgtggcagcccgggccgagcccacggcagagcggccgccggcggcctcgcgcgcgggtccctgacgtctgcgggaggctcagccccgcccccggaacgccccgccccgggcacgcccccgcccgccccgcccccgcccggccgcgccgcaccccgcgccgccccgccggaaaccaggttagggcgggtccgcggccgccaggtgagcccgccccggtagccccgcgcgtggtccggtcggcagaggcttggcgagccgccatcccgcccctgccccaggcccaccttcccccaccgcccaggccccgctggcctccccggctcatctcgcacccggcgcagaccccatgccctcccgtctcggcagcgccccccgcttcgcctcccggtccggccccagctcgacgggcggaaccgggtgcgcacagcagccccgcgccctggcccagggccagcgggttaacgcttaactacgctccaggagctgtaggctccagccgcgcctcgagtccccaacctttggccccggaagccaaaaagaggagcggacggtgaaggagtcagggtgagttccagaggccgctcccagattttccctcccgagcctggccagactgggcgtatgtccgacatctccacctctgaccccgggcgctctgggctgagctgggggcgatggtggtgggcatcgacgccgtcttacctggacgcccacagtggacctgacctggccgaggggtgggggtggggttgggaactacggaggcgctcggggttcctgggtaagttcccgcggactgctcgctccttgccgggtgctacaataggcgtatccggtgtccctggagccaagctaggggacgggatcaacgtgggggcggggcagcgtgcccgaagggcattgctgcattccaggtgttggggaacgcagtgagcgaaggcgtggaggtgagggagaatgtggaaggcgtgcgcccggccggggaaccctgggctttgtcctgtgggcagctggagcggctgggcgttcccggctgcgacaacgcccacctggccccgcacctgggcctgctcgcaatccagcggcgcctctccgcatctgccttcacggatctcagccccagcagagcccttgtgccggaccctggggcgggattgcgagttcagagggagtcaagaggcgcccttgagtatggcgggagccccaccccaagcacctggtgggaactcacttgcctagggagagagcagggcagtgagcactccgggctggctcccaggaaagaccctccggcaggagcttggattgcaaggttggggaggagggaggccaggggagggacctgcagccaggtgatccgggtgcctgtatttcttcccaaggataatgtgagttgatgctggctgagatctgctccgatgagggtttgaaagagagagctccgggtgtcaaagtcagtggatggcaaaacatgcctggagggagcaaccaggcatccaaccacaggccctgggctggagggcgggggggggggggggtggaagcagaggaaggagagagaaggaaatttgggaggaagagtgggcacgaactggctgcccaattgtgtgggtgggtaggtggcagggagggactggttgttctgggtctgcccctccggccccaccacacctgcttccaggtgagcttaggaatttcccaggcttcctcccagctggagccagacgtgtccctcagaggccccagccctgcccatcctttcctgccctacccagggcttctctaccttcttggcttggcctgctccttgttcacaccttggtaaatgacccttcacaaaagtcattttctctatttgtgcttttctttcttttgccaggacgcttgactttctcgacagggagggggaggcaagcctggtgcccagtgctctgcctgcactggtcagtgcgcgtggctgtcacttggctgggaagctaggccaggagagcagctgcagctgtggaggtcggcagttgagaggt

SEQ ID NO: 1241205 - DNA, 4001 bp, Homo sapiens
aagctattcacattgacgatcacatacattgtagtgcttgctgcaagggaggcatataaccagttgttttggctaaaatatgacaggaaggcattccttgggttctatataaaagtaacagtattcaacagtctaatggcaatcactgataggctgcttaaataaatgatatttccttcattcattgtgttggaagggcccagtggaaagggggaaatacaacaaaaaaccaaaacctaatactattccaatggactgagctggagaaatggaagctccttaagatccagatggcacttgactgtcattttataatggttttccttcaagtgaaactactacattgcctcccaatttctctccaagtgtcgaacggtccttaatatcatccaagccatttacttgccactcatgtttaatacctaaaaagaaaaaacattatcctattactttattataattaataaagaataatttctctgccccaaatattcaagtttgtacctgtaaatttctttttaatggcatctttagagctagcataaatcatcttgctttttaaaggtgcactttcaggagccctacagaaaaaaaaaaaattattgaatcccatttataagaaaaacaaaggtaagactgactatgataataataatccttgcattttaaaagtacttttttcttttgtttttacacaccagaatataaatactaggtcttctttcttagactcttttgtttcgtatgtggcatcgtacaaagcatatcggcaatcattcagaggtagcaacttcacaaaagatgtgtaggggtcctctacagtatcaccaatgtcacccaccaagatctgctttgcttcctctacaattatttgtcttttgtcatcgcttaaacagaagagaactgctttctttctctttttgatctcctcttgtgtagaagatttccttactttcatatcattaaaaactttgatgacttcatcattcactgtaactccagaagcctgaaaataaacacagaacagtaattcagaacacgtattttggttttaaccaaaattactgtttgcctagagaagactcactttagtctggacatcaaaaattgcaccgtaccatgtaagtcgtccaatcagatttgtcacattttaagaatcagtagacgatacagcgaaggagtctaactcatcctgcccattcatccttcttaaaggggtttggacgtggaagcgaaagggacaaatacaagttgtcccatccctgaaatgtttcctatttcactgggtgatgtcagagcttcaggagtggcagcaaaaataccttctgtattgtgtcaactcggctggccttaaaaaaacacttttggatttcagttaatgcttctactatttttttctttaaagtcatcctagccactgacgtttcctcataaggaaagagaatcaagtgtaaactccaaaccgcccacggcccacacacagctcacatgcagacactccaaaactaactgatcgagtgtaaaagcttttacggcgagaaagcattttaaaaagtgttttccctcttccttaatctccccgtaagggttttattacaggccgtccagaccctgacccacacagcgttcgcagcacgtaccaattttaaagcctcgcgtgttaagtaaaattaggaagcgaagggcaaaggcggcgcgagcggctgcagtccgcagaccctctcgcgcccccgcccgcccggccccgacccccaacctgcgccgacgcccgggccctccccgccccccaaaatccaaagagcagcagggcagggcctgacggccggagggcaggccggtcggctggagagcagcggagccgcagagcagaagcgcccaccttggaggccaaaatcaggttaaaatggcggcctcactcccggggccgtgcggggggcttttctcgcctcgccgcggcctcccggccagcgcgctcgtcttaccatagtgccctcggctgtggctgcggcggcagctcgggcttcggctctgtggcactgggaggagaaggaggggcgggcgagcgggtgggcagcggagagtgcggggcacgccgggagctgcagcccgagggaggtggcggggctcggcgggccgcaggcagcgggcggggcggtcacgtgggcacgcctggtccccagccggcgccacccgctcccaggccggcccttctgtctcgcggccccggctccccggctgtccgcgtcctcggcctgacctcagagcgcgagccctgcaggccggggggggcgacgcggtggtagcggagcccgggagcctggcagagccgcctccagcccccgagcatcacccgtcaagccggtgggagagagtgctgggctcccagaggggcgtttccaccgcctccgtagggccctgcgccaggggtgggtgcgtgtgaggggaactcctgcgaaggtgtctttccttatttacctgtggttttcccgaaagaggctggatttcgacattttgagtctttttggaaaacccccagttgtttagagataaatgagaataaatactacacgagattgctccagttgatagtacttagcaaaaacaaaatgatacgcagtgttggtaaatcacttttcaaaactctggttgaaataataattatgattaaaaaattacgtggtagcattccttagtaatatccttttacattttagacttcataggaaatggattgtactctctcttagagatttcatgaagctccagctatgacagctgatatcaaataagccgacgcagcctcttctagcaaagcccatataactgcgccaaggcagtttctctttttttaatcttaactcctccatacctcagggttcttcatgtgtaaaacaaactgttattaaattatcgttaaggccctttccagctttagatttcagtttctgagtatatcaatgttcagtaggaaatggtgtgtttttggtggtctcaggattgaggttaggcaggaaagtcatgagatggtgtttgccctagattgcgtgataagttctttcagcccaaatttactgtattttaaatggaacatgctaggcattgaaacagacctatttttctgtctatatcttgggtttgttttcttaattggaagatagacttcgtttagagacaaaaattgagaagggatttcccaatgtctaagcatgaatcccaagcaagtggataatactttatatctagctggtacattacaatttatggaacctttcactttatctgttgaacttccaagaagtcatggagaatgtctctccagagctctgatcatctgctatgtgtaggtattagcaaattcctgttcgcttcatcttgcggttaccttcccttcccaacctcagagatttgcagcagccccagcagagaccaggtctgatgacactggggcctaaagtgggtgtcagaaccttacccaccaaagctggggattccaaagatgctagtcaccccctagctcggactccaacccctttccatgcctcccattctctcttaccctccccaaacagagatggtaattcacatgttctaagattcttttcctgaagttatttttgtcttgcatatattttgttacattataataacttgtttatgtcttctgccaccctactgcgctgtaagctccttaaggatctgagtcctggttatctttgaatttctggaacctgacagatagtaggtgcttaataggtgctgaaataatacatttaagatgctttagtgctgtaaagagaatgaaaaggaagcttctgaaaattgtgaagcctttctacatgcccttgtgagcatggcactgagaatgtcagggccagtagcagcttcctgccttcacctctgtgagttataaccagaacttaccaccacttggtaaaggggcagcattgccaatcattgctgcatgaattttggtcactgtgtagtggagggggatctgagtg

SEQ ID NO: 1241206 - DNA, 4001 bp, Homo sapiens
atattagttggccttaagatagaatactttttaaaccaaatagatccaacaaatctggaaaatatcacacatgaatgctgtacaaaaaaaattctcaaatgaccagtgcagagattagtaatagctgtttttaccctagaagttgtttcacataacattttgcaaaatttccaaggaaaacaaggcaacgttctgtaatatgccacaatttttattgcaacgtggccatttttgtgagggtggggagtttgatctcaaaacaatgttccatttaaggctcttttatacagaaattgccatcatgactgatattcaaaatatctttagtgttgcaggactcacatggtaaacataaaactcctacacttattcagtagtgtacactcaatggaaaacaaaaaggcattaataacagctatttcttttaagaagatatgcaggtaacaggaatgaacactgaggtactaggataagttgatgacacagttaacaaaacttaattggcattccttttaggatattaaacttattacaaaaagtgcttttaatgcatagtgttatatccgtgctgccatatcactaaaataggcttgccaaggcaggtgaggtgtatgaatgctcaagcctcacagaactgcaatcaagtgccaactataaataatactgaaaaaagttgaccatctgaccagtggataatactttcaaggcattcaattagcttatcctttgcagtattctaagctattcacattgacgatcacatacattgtagtgcttgctgcaagggaggcatataaccagttgttttggctaaaatatgacaggaaggcattccttgggttctatataaaagtaacagtattcaacagtctaatggcaatcactgataggctgcttaaataaatgatatttccttcattcattgtgttggaagggcccagtggaaagggggaaatacaacaaaaaaccaaaacctaatactattccaatggactgagctggagaaatggaagctccttaagatccagatggcacttgactgtcattttataatggttttccttcaagtgaaactactacattgcctcccaatttctctccaagtgtcgaacggtccttaatatcatccaagccatttacttgccactcatgtttaatacctaaaaagaaaaaacattatcctattactttattataattaataaagaataatttctctgccccaaatattcaagtttgtacctgtaaatttctttttaatggcatctttagagctagcataaatcatcttgctttttaaaggtgcactttcaggagccctacagaaaaaaaaaaaattattgaatcccatttataagaaaaacaaaggtaagactgactatgataataataatccttgcattttaaaagtacttttttcttttgtttttacacaccagaatataaatactaggtcttctttcttagactcttttgtttcgtatgtggcatcgtacaaagcatatcggcaatcattcagaggtagcaacttcacaaaagatgtgtaggggtcctctacagtatcaccaatgtcacccaccaagatctgctttgcttcctctacaattatttgtcttttgtcatcgcttaaacagaagagaactgctttctttctctttttgatctcctcttgtgtagaagatttccttactttcatatcattaaaaactttgatgacttcatcattcactgtaactccagaagcctgaaaataaacacagaacagtaattcagaacacgtattttggttttaaccaaaattactgtttgcctagagaagactcactttagtctggacatcaaaaattgcaccgtaccatgtaagtcgtccaatcagatttgtcacattttaagaatcagtagacgatacagcgaaggagtctaactcatcctgcccattcatccttcttaaaggggtttggacgtggaagcgaaagggacaaatacaagttgtcccatccctgaaatgtttcctatttcactgggtgatgtcagagcttcaggagtggcagcaaaaataccttctgtattgtgtcaactcggctggccttaaaaaaacacttttggatttcagttaatgcttctactatttttttctttaaagtcatcctagccactgacgtttcctcataaggaaagagaatcaagtgtaaactccaaaccgcccacggcccacacacagctcacatgcagacactccaaaactaactgatcgagtgtaaaagcttttacggcgagaaagcattttaaaaagtgttttccctcttccttaatctccccgtaagggttttattacaggccgtccagaccctgacccacacagcgttcgcagcacgtaccaattttaaagcctcgcgtgttaagtaaaattaggaagcgaagggcaaaggcggcgcgagcggctgcagtccgcagaccctctcgcgcccccgcccgcccggccccgacccccaacctgcgccgacgcccgggccctccccgccccccaaaatccaaagagcagcagggcagggcctgacggccggagggcaggccggtcggctggagagcagcggagccgcagagcagaagcgcccaccttggaggccaaaatcaggttaaaatggcggcctcactcccggggccgtgcggggggcttttctcgcctcgccgcggcctcccggccagcgcgctcgtcttaccatagtgccctcggctgtggctgcggcggcagctcgggcttcggctctgtggcactgggaggagaaggaggggcgggcgagcgggtgggcagcggagagtgcggggcacgccgggagctgcagcccgagggaggtggcggggctcggcgggccgcaggcagcgggcggggcggtcacgtgggcacgcctggtccccagccggcgccacccgctcccaggccggcccttctgtctcgcggccccggctccccggctgtccgcgtcctcggcctgacctcagagcgcgagccctgcaggccggggggggcgacgcggtggtagcggagcccgggagcctggcagagccgcctccagcccccgagcatcacccgtcaagccggtgggagagagtgctgggctcccagaggggcgtttccaccgcctccgtagggccctgcgccaggggtgggtgcgtgtgaggggaactcctgcgaaggtgtctttccttatttacctgtggttttcccgaaagaggctggatttcgacattttgagtctttttggaaaacccccagttgtttagagataaatgagaataaatactacacgagattgctccagttgatagtacttagcaaaaacaaaatgatacgcagtgttggtaaatcacttttcaaaactctggttgaaataataattatgattaaaaaattacgtggtagcattccttagtaatatccttttacattttagacttcataggaaatggattgtactctctcttagagatttcatgaagctccagctatgacagctgatatcaaataagccgacgcagcctcttctagcaaagcccatataactgcgccaaggcagtttctctttttttaatcttaactcctccatacctcagggttcttcatgtgtaaaacaaactgttattaaattatcgttaaggccctttccagctttagatttcagtttctgagtatatcaatgttcagtaggaaatggtgtgtttttggtggtctcaggattgaggttaggcaggaaagtcatgagatggtgtttgccctagattgcgtgataagttctttcagcccaaatttactgtattttaaatggaacatgctaggcattgaaacagacctatttttctgtctatatcttgggtttgttttcttaattggaagatagacttcgtttagagacaaaaattgagaagggatttcccaatgtctaagcatgaatcccaagcaagtggataatactttatatctagctggtacattacaatttatg

SEQ ID NO: 1241207 - DNA, 4001 bp, Homo sapiens
atggaagctccttaagatccagatggcacttgactgtcattttataatggttttccttcaagtgaaactactacattgcctcccaatttctctccaagtgtcgaacggtccttaatatcatccaagccatttacttgccactcatgtttaatacctaaaaagaaaaaacattatcctattactttattataattaataaagaataatttctctgccccaaatattcaagtttgtacctgtaaatttctttttaatggcatctttagagctagcataaatcatcttgctttttaaaggtgcactttcaggagccctacagaaaaaaaaaaaattattgaatcccatttataagaaaaacaaaggtaagactgactatgataataataatccttgcattttaaaagtacttttttcttttgtttttacacaccagaatataaatactaggtcttctttcttagactcttttgtttcgtatgtggcatcgtacaaagcatatcggcaatcattcagaggtagcaacttcacaaaagatgtgtaggggtcctctacagtatcaccaatgtcacccaccaagatctgctttgcttcctctacaattatttgtcttttgtcatcgcttaaacagaagagaactgctttctttctctttttgatctcctcttgtgtagaagatttccttactttcatatcattaaaaactttgatgacttcatcattcactgtaactccagaagcctgaaaataaacacagaacagtaattcagaacacgtattttggttttaaccaaaattactgtttgcctagagaagactcactttagtctggacatcaaaaattgcaccgtaccatgtaagtcgtccaatcagatttgtcacattttaagaatcagtagacgatacagcgaaggagtctaactcatcctgcccattcatccttcttaaaggggtttggacgtggaagcgaaagggacaaatacaagttgtcccatccctgaaatgtttcctatttcactgggtgatgtcagagcttcaggagtggcagcaaaaataccttctgtattgtgtcaactcggctggccttaaaaaaacacttttggatttcagttaatgcttctactatttttttctttaaagtcatcctagccactgacgtttcctcataaggaaagagaatcaagtgtaaactccaaaccgcccacggcccacacacagctcacatgcagacactccaaaactaactgatcgagtgtaaaagcttttacggcgagaaagcattttaaaaagtgttttccctcttccttaatctccccgtaagggttttattacaggccgtccagaccctgacccacacagcgttcgcagcacgtaccaattttaaagcctcgcgtgttaagtaaaattaggaagcgaagggcaaaggcggcgcgagcggctgcagtccgcagaccctctcgcgcccccgcccgcccggccccgacccccaacctgcgccgacgcccgggccctccccgccccccaaaatccaaagagcagcagggcagggcctgacggccggagggcaggccggtcggctggagagcagcggagccgcagagcagaagcgcccaccttggaggccaaaatcaggttaaaatggcggcctcactcccggggccgtgcggggggcttttctcgcctcgccgcggcctcccggccagcgcgctcgtcttaccatagtgccctcggctgtggctgcggcggcagctcgggcttcggctctgtggcactgggaggagaaggaggggcgggcgagcgggtgggcagcggagagtgcggggcacgccgggagctgcagcccgagggaggtggcggggctcggcgggccgcaggcagcgggcggggcggtcacgtgggcacgcctggtccccagccggcgccacccgctcccaggccggcccttctgtctcgcggccccggctccccggctgtccgcgtcctcggcctgacctcagagcgcgagccctgcaggccggggggggcgacgcggtggtagcggagcccgggagcctggcagagccgcctccagcccccgagcatcacccgtcaagccggtgggagagagtgctgggctcccagaggggcgtttccaccgcctccgtagggccctgcgccaggggtgggtgcgtgtgaggggaactcctgcgaaggtgtctttccttatttacctgtggttttcccgaaagaggctggatttcgacattttgagtctttttggaaaacccccagttgtttagagataaatgagaataaatactacacgagattgctccagttgatagtacttagcaaaaacaaaatgatacgcagtgttggtaaatcacttttcaaaactctggttgaaataataattatgattaaaaaattacgtggtagcattccttagtaatatccttttacattttagacttcataggaaatggattgtactctctcttagagatttcatgaagctccagctatgacagctgatatcaaataagccgacgcagcctcttctagcaaagcccatataactgcgccaaggcagtttctctttttttaatcttaactcctccatacctcagggttcttcatgtgtaaaacaaactgttattaaattatcgttaaggccctttccagctttagatttcagtttctgagtatatcaatgttcagtaggaaatggtgtgtttttggtggtctcaggattgaggttaggcaggaaagtcatgagatggtgtttgccctagattgcgtgataagttctttcagcccaaatttactgtattttaaatggaacatgctaggcattgaaacagacctatttttctgtctatatcttgggtttgttttcttaattggaagatagacttcgtttagagacaaaaattgagaagggatttcccaatgtctaagcatgaatcccaagcaagtggataatactttatatctagctggtacattacaatttatggaacctttcactttatctgttgaacttccaagaagtcatggagaatgtctctccagagctctgatcatctgctatgtgtaggtattagcaaattcctgttcgcttcatcttgcggttaccttcccttcccaacctcagagatttgcagcagccccagcagagaccaggtctgatgacactggggcctaaagtgggtgtcagaaccttacccaccaaagctggggattccaaagatgctagtcaccccctagctcggactccaacccctttccatgcctcccattctctcttaccctccccaaacagagatggtaattcacatgttctaagattcttttcctgaagttatttttgtcttgcatatattttgttacattataataacttgtttatgtcttctgccaccctactgcgctgtaagctccttaaggatctgagtcctggttatctttgaatttctggaacctgacagatagtaggtgcttaataggtgctgaaataatacatttaagatgctttagtgctgtaaagagaatgaaaaggaagcttctgaaaattgtgaagcctttctacatgcccttgtgagcatggcactgagaatgtcagggccagtagcagcttcctgccttcacctctgtgagttataaccagaacttaccaccacttggtaaaggggcagcattgccaatcattgctgcatgaattttggtcactgtgtagtggagggggatctgagtgtcagataccacatgtattagcgttcgactgttgctataacaaattaccataaaattacttgtttaaaacaacacaaatttattatttatggtcttacagagtcagagaaacaagtctctctctctatatatatatatttaagagatagtctctggttctgttgcccacccaggttgctggagtgcaggatgtgatcatagctcactgcagcctcatactcctggcctcaagtgagcctcctgcctcagcctcccgagtagttgggatt

SEQ ID NO: 1241208 - DNA, 4001 bp, Homo sapiens
actggatttacatggtcttgtggcctcagcagtgcttagcccagacttccaaacgttctataattacatgggcttccactcttgtaaaaagtcttacctaaatggggtgatttggcaattattaaattttcaaaccaagtcttaaagctggcagagccaggatttgaacctatgtctgactgactccaaagtctgtctgttaaccactacaaacatgaggctcctgactaccctcttcccaatactaaagattgatatctaagatatctaattagttggcctatttaaaataaaaattaaagcacataaggcaattatcaactagttactattttccttagtggaggaaaattatgcttcattaagagaataacactaacattatagtcatttaaaaatcttgtgttaagactgcttttctcacatgggcaacaccttcctcattccaattacaaacttttgtgtaatgaacattagcaataaaatctgatgggtcaagaataaccaattgtgtaagattggtctttgttttccaatcttacccccacaaataaggaatttgtatttccaatcctcacccacatacaaggcaaggaattctatgctctattgctggtagggtgaggagcagtgtggacaggttaaaacttttgtcacttcctaaagatggcatatattttcagaaaccgacaagggcccgtgttctttaaggcaatcacatatatgtgaccaaaggctattttaaaactcgttttacgtagccttctttattcactaacatgttctctgcccctatgctcatgctgtcttctctgagatgctttttcttccctactatatacatttaactccatttatttttcaaaatgctcattctccaaaatccagctcatgtccctcttcaacagagtcccctctgacctcttcagaccatggctgttatccacttagaactgctgtttgatctttttgtaactattatcatctcaaagggattttggaggctgcagcctagaaaaactgttgtgggctagttacacggtttcaactcgttatttacaaggcttgtctaaacatgatacaatagcatctcctcaagagagaaattgaacctctaggctagaagaattgctcagcggttatctaacagaccattctccttgtctccaataggcaactgtcctaccctcggtgttacatatttctaaggtctcttccagctctaaaattatgattttacaattctatcgactaaatattacttcaaaaggtgtggaatgtatacagaaaccattaaattctcaaacggtaacagttcagttacaagttactctgaaagatctgaggctaagggctccattcaggtcagaatcacaactgttaacctcgcttactgtccagtctgtgcactgtagcacaggtgactaactcatccaggacacacagtaggcccgaatccgggacagaagcctactagagaagcactttctcccaacaccaagcccaagcccaagcccttcctggctgctttatcgcctagaaacaaagctgagtaaaacaccccaatgcggtaccaccccaagatgccccagcgacacggaccaaacggtgatgcagggcagtgacgcaggtgcagcgtccaccttgttttcctcccagagaaagtcggagttctaggcacccggggacaccgaatccccgacgtcctccggcccgcggccctccggctccggtgccccctgctgctcgtcgcgaccccactctggcggtatccgccccttcgtctctcacccctgggacacttaccatcccaataccaggccggtggtcacgatgaagcaggtaaagaccaccgcgatgtagaaaagcggcgagtattcataaagcgttaccagaaacaccgcagccatcagggtcttgctctgggtagagcccggctccagccgcggagcccagcccagcccggctgagccccgcccgcccggccagggtaaaagccactacagtgccccggagcggacaaactttgtaggtccgcacttgcctggggttctcatgagctagactttagggcagcctcgcggacagcgggagctggcgtgccaatcacggcgccccctgccggacacgccacgcccctcccgctcccgtcccgagctattggctacgcagacctgggatggggggggcccgactcgcaccgcccccgactcccaggattggtacccagcgggcgtcttaagcgctgtggcccagtggtcattgctgttccgccggcaaattctaagtagactttggggccaactctgtgccagccttaggcaatgtaggttttctgatgtcagagagaggcgcagtctgaaatctacgtgcatcgtttctaaatcctgaaaccctgcctattatatcttaggcaaatttgggagagggtggaggaggaggaggaggagggcgggcatcttggattctacaaaatgaaataaccataagcacagtgaaaacacaaaaaaaggagtctctaccacaagcaatttatacgagacttgtcagccttttcagattggacttaatcatagaggaaaatcagcattgcttatccaagattctcttagaaataaagcatccgcttcctcccacatccccctccttttctcctcttcttgtactcctcaaattagaattagccaaacatttgaaactgtatttgtttccactttaagaataatttttaaaaaactttttaaatcacacagaagctttttaaaaattactgaaagtagctaaatggtcactcccttgtctcaaccctgtgagtcagctccatcaaggtggcctccctgaaagtctttcataacagttcattgacacctcgttggtttgcatttactcctaaagccacatctagccacatcagagaatggggatatgtagtcttattattcgtgagcagcaacacaccctggtacaaatcaagagttttgttactgaggaggaaagagaatggacattgggatagttaactagtagcctctgtcacactcctaaatcaccagtaaaattcgtgttgagaaagatgaactaagtttgtcctatggcctcacatattccttggcaaatgagcacgtagtctctggagcagcactgtttgagaagcttgcttctacaacacaatttttaattactatatatctgatttgtgaaaatatatactttaatcagccctcaactgttggagaatttttcattgctataaataacactgcaatgaacatccctacagctaaagtatttccttaggataaattactagaggtggaactatggttttaaaaaatgtacattttaaagattttgtaaaaacactgctctccagaaatgtaccaatttgtattcccagtttttcatccacagttttgccatcatttgatattgtcacttaacaaaaatattggccaatctgaaaggctcccttctccagcaagccttcctggatgcttccaaacccttggggagatgcctctcccaaagcacccagtatgtaactgtatgggagccctcttatttctggtgtgagcacctgctcactagtgtatttagcctgctaggaacccagctctctgagcacaggaatgacacataattgatgtttgtgccaccggtacctagtatatgtcgggtagtcatattactgaattaataaataaatgaaataagcttttctccatgagattacttggaagcacaaagtatctatattagagttttttaaaaaaaagtttgactctcagatgaacaggaagaatgactgttctttattatctataactgatctagtttagcttgaaaccccaccctagacccagcatggtggctcatgcctgtaatgccagcactttggaagaccaaggccagcactttgggagaccaaggcagggagatggcttgagcccaggaattgagaccagcgtcagcgacatagtgggaccctgtctctacaaaaa

SEQ ID NO: 1241209 - DNA, 4001 bp, Homo sapiens
catagcacaccacagcccagaactcctaggctcaagtgatcctcccgcttcagcctcctgagtagctggtactataggtgcatgccaccatgcccagctaatttttattttgcttttttgtagagatgaggtctatgtttcccaggctggtctcgaactcctggcctcaagcgatcctctggcctcagcctcccaaagtgctgggactatcagctgtcctgatagaatcttttctataatgcttctgctcagtaggtatcaagctatgttttaaaaactcctgatggaaggctatcttctaatgcagcagttcatttttggaaacctaataatacaaaattccttatattgaattgaaatctgcctccttgtagcttcttcccactagtcctactttttttagagacaagggtctcactatgttgcccaggctggtcttgaacttctggcctcaagcaatcctcctgcctcagcctcctgagtagctgggatcacaggtgagagacattgtgcctggctagtcctaattatctcaatgctgcgcccccacccccaccaactcttttggccctttattcagatgctagagcctctaccttcttacgctagaaactaacactttcactgagcaaagtaggagggggacaatcttagtaataagaataaaagaaagatataaatagcttttacaagtcttgcaaatataaagataattcttcaaagatgtttctttgttcccatagcatcccatacttctcataaaactttgtatcacacaattattgtgaactcttgcttaatatctgtctttcctggcagacggtgagctctgtaaggacagggactgtgtttgccttatttagcaccagctaggtacaatgtaaatgtgtagtaagagctcaaaaaatatgttaacattaactgcttccaaccagcaagtactaagtatgtggctgtcacactaactgataaaaaccaaagatggaatttaaataggctttcccagagaaagctctcatgtgctcactctctcaaagagttgctgggccctctatgaaaccaaaattcacctccccctttcactcaagtcacctgggtaggtgtagaggtcagtgtaactgcaggcttcagtgggggccctgtggccccagggtttccagcaggagctgaacccttaactggctggaggaccagctgctttactggtcggctgggctggacaatgcgctgaacagcagcctggttcccagggaccttggcggccaacactgtattaccagagacaatggaaacacctggtcgaaggggtgtgccggttagcactttggtaaaagtgacttttccaccattggctgtgcctgccaccaggggctgagctgtgctggtgataccttgggcctgaatttgtgccacatgggcaccagtgactgaggagcttggtggggccttaaggataacaatcttaggggctgactgaggtggctgccctccagcactactggaggagacagctgtggcagagacacccatgaaaggattcccttggctcaggatctcctggctcttggagacttgcaaaagtcctgatgttggcgtcgatgtctgtaagacaggttgggctggctgctcctggctggcaggctgagtggtataatcatgcaaggttatggattctggagctggagctgtggattctttggaaagttctgtgggagctgtttcctctggtggagggaccagttcacttgctgatgaattccccacatcaccacctccaccatcctggttcatctgatccaaggagtccagagagcttggcagtccaagggcttcctcaatggggtcttgtgtgacctggttaaagctgtcatcagtcagagagtccaggccaaataaatttgggtcatcgaacagatccatgatggggtctgccatcttgggaaagtaatggagggtacttctccaaggtctagggagggaaggggagggggggtactggctctcccctcccctcccctattaagaaaaaaatgtacacaatgtaagaggactactcttcaagtatagaggcaagaaacaagtgcatgtcagattgtcctgaccttcatggagcaagatggctacgtcttcagaggaagatggtggaactcctgttgtaggaatacaaatacaaatgaaaaataggcaaagttggcgatctcagagaaaattttcccttcttacgtactgttcttaatatcaaatagcatgaatataagagggaaatgtgaggaaatctgaggacggacatacagcagaaagacactcatatttctgcttcaaaactaaaactaaaagagaaaaacaataacaacctcctcttgggcacttacacctacaaactttaaagactctgtcaagagcatttggctgtctttctccgtttcttttaacaattattattctttggtaaagataaaatttaatattcatttaccttctattttcagtttttaagttagtagaactcaaaaatatgccaccagaattacagtgactctatagataaaggtttctggatatattctattgtataaatttttcttgtgttttatatatttttacttactattggcaaaaataaccacctttaaccaaggcttatagtacaatctcaccaaagtgatcatacaattttacccaggaagttttgcaacctttattctagttaacatattaatctataatgggatttttgttctgaagtcccctctcaagaaaactttctcatatttaagataaaaaaggtcaattgcaagggattcaacattgtttccaatttatattcccaacttcctcttaccatctcttacatatattttacattccagtccaactagactacacaattcccttaatgtgattcctacctgtgtgactttgcttatgatgctgtgctttctgcctggaacacgtcctctccatcccaatgccaataatctctcgcagctaaaatcctaccaaccctcaaaggtcttctactccattaagtgagccctgaacctctgacgctttaacaactgagcaacttgtgatgacttgatccctccacctcctttaaatacccacaccattgtttataccttaaaacacttatatttaatattttattataatgacctaagtctgtaatatatcctctgaaggcccaaatggttcctttgcgcaaattgtaaaaagttgcccacttctcaagatgcctggaaaactgccatactaaatatataaaaatttgttatgaatgtatgcaatgtacaccctccacaactctgtaccatggcccagctcctctttctctgggagaaagttcttggatggtggggactatgttttatttatctgtggatcccctaagaaccagcaggacatagcacatatagtagctaatcaaaaaacagttaatgaattatacttgctcgcattatctggagtaaaccattcgatcctcacagaaactaaatggtatcctttgattctaacatgagatggtaaaaagcttcctatcttgaaaacatgtcttatgaatggctgaaagtaggttcacaaaatccatgtctagggttttaagttcatgaaactagtggaaaaaagaaaagctatcaaagacagggaagtatatcaccataaaacccaaatatatgaaaaagaaatatctgttctttgtatatgatgacagtatttgacaatacaggaaagtcttgcttggtaagaccatttctcctaacttttggaagacaccagataagaaatttgtcagaggcacagtcctgactgaaggagacttttccatataacccccatgctatgttttttccttcccaacccatctcacttatccttataaaacaatataatatgggttaatatatcagatactccaaaacagacaaagagaacaaacacgtgagtcaaaattacaaagtatacatggtatctccaacaatgttaaacaagatcgtcct

SEQ ID NO: 1241210 - DNA, 4001 bp, Homo sapiens
taacaatacagttacctgtagaaaaatactttattatatatgccagtatagcccttcacttcatctccttcttaaaggtgaaactactgcttccccttgagacaagtacaaactgatgttcttctgcagctttaccacctttaatacagttcttgatttttttggaaatctagagtcccaactctctcattcttatttgacattattcctcacccttgcccatttctataataaactgtctgtcctatgataaagtattttgttttaattctaccctatatttttccatctcaatctctccatacctttcaacaaagcagtgattctcaaccaggggatggagactaaggcccttaagaagggcttctgggaaccgagggtggagataaatgtgcagttcttaaaggtgtattcaatattataattttatatttatcaagtgaaaaaactacatctcattgtttaggctatttatatttattaacactggacaaagccttcttggccagtgaagatctgtaaaagacacgtgaggagtagagggcagagaaagaaacattcctggcttggcagagttaccagtatctttgggatgggataagatttcctatagcctctcaaaaggagtttatcatcatttactgtttatgatggatgagaaacactgcaagagattagttctgtcgtctaatagataaaattatgtaaaatgagctacagatatctattgcccacttatagatttctccgtagtgacaacctcttagaagacaatgaacgaatgcagtattgagccatgctgacctctttctgtaatgtgcacttttagaaagtaccactcatgaccacttaacctctagctgctcaaaggttcagaaaagaataaactattttatttacttcaaagaacaaatcttgttgttggaaactgtatcctttcaagaagatcagttgcagatagacataaatacatgttactgaaacataagatgggtagaagcagcttaatttaaatgagaaataccttgaaaataaaataatccaaagggctaaaatgaaaatcaccaacataattttaaaagagaagtattttaaaactgtaccatgaagacattcgtgagacacgaagggtctcaaatcttatacagaaatgaaaaataaacatccaaagtgaatgcaatcacaatttagggtcagcaaaggatcaggatggaaagacataggaccaaattggagccactcagatttcctaagtagatcaagatcctaggccattttctctgtcttcaccattctcactgccaaatgtgtggctactctgtttctgttttccaattactgaaagagaaagcactcacacctcaatcaagggtatggtcatttgggggaatataaggctggtaaagtaagaccttgtgaataaatcggaaaagcaaaataggcaactacgacagctaaagacatgtattttcagggggtaaagaagaaactagagagattctgcactcatgaaaaaagggaaagggcgaggtgaggaagtgaggggttgatggagaggaaaacgcgactggggtgggggtgggggggacccgggtacattacctgctcatactgccggggttggtgccagtaaggtccatacagcagaggcggaagatttctggtaactggagaccccaaaatggaaatgaggtacatgcacttgaggtaaggagctagcgggggtgccctccagggtggggatggccaagacgggaagatgcggggggtggggggtgtggatgcccgggataggagcaatgttagggcggaagctgcaggccgagaggcccgacaagccctgaaggagaaaacgagctgtgcctcaccccagtggaggagagaggtggctttacctgcagtggctgtggggggccggttcgcccctctccctgtctctccagcaccagttccccctcctcctgcgcaacctaacctgatgctcctgcccgccccgcgccatcattggctgaagcgcactgccactcaccaaaggcgaaaagacgcaaaacagcgcaaagggtgggactataaggagctcccttccccctcccccgcaggttaggttgagagcgcacggagaggcctatccggtttctagggccgaggcgaagcctgcagcttgcttgaaaaaagggggctggccagaggaacagtctcatagtacgcgaaaccagtcctggagattaaattccctaccatctactctgaattcttcaccctgaagagtataaacttgggagggagggttccgcgctaggccagctccgcctccctctgaatccccggccttctagcagccctgtcaacccctctcctgtagtgactacaccgtatcccactacctaataaaaggggccaaatcttcttccctccatcgtgggagtcagcccagctggaatatggggccttttaaagcactctttctgccacaacacataaggttgccgtgcatttttgacactgtgacccttcaataccaatacggctttttagacagtaattcctggggccctctaacaattcccgacccttagcccgctcaaaacaaacactcctcaccctctaaactcggtttcctgttctcccatctcttgaaactcagcccatttgaccttttaatcagtgtccactttgcgatgtcacttgaaatcactctaattcccagtgagactagacaaccccagaatgatggtgtgcaagcttaaatccaccaaagtaaacttgttttttccttttttgagacagagtctgactctgtcgcccaggctggagtgtagtggcgcaatcttggctcactgcaacctccgcctcgcgtgttcaagcgattctcttgcctcagcctcccgaatagctgggattacaggcgcctgccaccacacctagctaatttttgtatttttagtagagacagggtttcactatgttggctaggctggtctcgaactcctgacctcaagtgacccacccaccccagcctcccaaagtgctgggattacaggcgtgagccatcacgcccagccaggacactgttattaaaaagagcagtttagtccgggtgcagtggtggctcatgcctgcaatcccagcacttagagaggccgaggtgggcagatcgcttgtatccaggagttcaagaccagcttgggcattacatagtaacacctagtctcttaaaaaaaaaaaaaaaaaaagaaagaaagaaaaaagaaagatgccgggcgcagtggctcacacctgtaatcccagcactttgggagagcgaggcgggcagaccacaaggtcaagagatctagaccatcctggtcaacatggtgaaaccccgtctctactaaaaatacaaaaattactgggcgtagtggcattcgcctgtagtcccggctacttgggaagctgaggcagaatcgcttgaacctgggaggcagaggttgcagtgagccaagatcaccccactgcactccagcctggtgacacagcgagactctgtcttaaaaaaaaagccaaaaaaagccaggtgcagtggctcacacctgtaatctcagcatttgggaggccaaggtgggcagatcacttgaggccaggagtttgagaccagcttggccaacatagcgaaaccccatctctactaaaaatacaaaaactagctgggagtggtggcactcacctgtagtcccagctactggggagggtgaggcacgaggattgcttgaacccagcaggtggagggtgcagtgagccaagatcatgccaaggcactccagcctgggcaacacagtgaaacaatgtctcaaaaaagaaaaaaaaagggcggcttatctcctgaccattagtttcctctgaaagtatcctcaacattgaaatcctattttcttatactctgaggacacaaattaggaaaatcaacttgctttagatgtcttattttttaaagatcctagcattaccactgtcgctaaaaacac

SEQ ID NO: 1241211 - DNA, 4001 bp, Homo sapiens
aatgagtggtagaggtttaaattctgtcctatctgcaactaaaacataggaaatataattgagcaaacagaggttggaatctcttggatggtttggattttaactgtggtgtctagtggaagagaatagtttctgggaaggtggggagtagaaatttctctgaccctcaagtcagagatttggatgagcactagagcctggaaaaaacagccccagctcagccatgaatgaattccaagtacacacccagcgtggtgtgtctcttgctgccagagaaacccctactagtgtctcctaaggccctttcctgggtgacctccacaactagcccctattggtgggaccgtgggtgcaggagccatgatcaagatgttttgcttgtgttcctttgggacagccagggctggagagcctgctgggtgtgggttgttactggcagagcctttcagggagaaagagcaaagcggggaggccagagccaggcaggcaaaggccatttttacaggtctgtggacaactacaactacagagaagccacccccaccagcccctggggagcctactggattcagagtgttcaagacagcctgaagccaggcacctcggcccagcaggtaagatgcaggcctcttccgctgcatgtgcagctcagaggaagctggggaagtccccacagcaggacagcagggaaagcaagcaatctttgatatcttcttttgcaagctgtccccaggctcagcagccgcagtgctggctcttggctttatgccgaacttactcctgcagctgcccaagaactggctgtgaagtgtccactggagcctcctacccctcatccccagcaccccttcttacctcggtatcccctttattcatagggctgttcacagggagcgcagtgactgggaagaagaagagagtgctggggtcactcctctgctccaagtggaggccagtcctttctgaccgggctcactggggcccgttcacccaatgccacccctcaaaactgcccccaccaaaaagagaggctagggctgattttgtttcccttccctggttgctgcccacagtggggtggtccccagaggctgcactgagaggtcctccccctccccctttggaaactcttgctctggagcgggtgtgctttggagcggggagcgccatcaaacaaggccaagagctgcacagtgggacgggtgggagacagacgaaggggagagagaccccagaggtggggggggcgggggaagagatggaggaaggggattgtgagggatgatatggagaagtagaagtcaagggcagaaaggcggggagcgtgagatgaaaggggaagaggggtggagggttgcgagcagccatgctcccacctccccgcagtgaccttggccggccaccgcgcaaccggcactggccctgatgcaaccgaggcgccaagcccagacaaggggtgggcacaagggggagttgccccggggggttgggagtcaggcccaagtgtcttgtgggtcccaggcggaggccacactgcagggtcaggcgggaggcggaggcgctgtccgcggtgctgaaaactcgccgcgcccgaagggaagtgtggaggggtgcggggcgccgcgcggtgcccggacctcaaggtgggcaggggcgcccggaaccctctcccgcgagctccccgcgctcgctcaccttgcccggcgcagagcagaagagccaggacagcggcggagcgcatggcggacccgggcgccgagcagctggcggtgtggggccgggcacctaggcaccgggcgaggggcggctggactggcggccggggtcgggctgcggtggcaccggcgcggggctgggggcgcagtgcctcggcgtgcgtccgtctgtcggtcgatcctcccgcaagctcccctgcacggggctcgagcactgcagtggcaggagcggtggcagcagcagcgccctcgcgccccgcttatataccccgaccccggaaatgacgtcagcggtgccgcccccttcccctttccccactccccaggtgtccagtccccgctcgcccccacctctaacctcacccctcgctacctctggcctccgccgcttggagctggtgggtcttggccgcgaggcgggtatctggtttccaagaggtggcgtgggaggcggggggctgtggctgatcctccacccctcgacgattccaccgatttgccttgtgtccctgggcaagtcactcggatctctggaccttgccttcttccatgtgtactgaggtccctggcagcgctagcaccccgtgctatttttcctaagtgccctctgcctggggtatgctcccccggtctcacaggctggaggcatgcccatcactcatggctctctccaatatctaggaggctctagaggggcctttgatcccctgtctgagtgaggcttctctctctctggcaagctagttttgtgccttcacactttgttgttgaatgtgtatttatttgaataatgtttagtcatcattactttcacagtgctgagcgccacacaatctggcacagaggaaacgcacttgacaggtaactgatgaatgtatccattaaaggttcaagccatgggtgagtgaatcctgggctctgcatacacacgggaaccaggggctcactttcaccaggaagcttaagccactgttggacacctcttgttaggtagagggaggagtgggggccagttcttattacatccgccaaaataggagtccttgcaacacctacccattagccctagtgcaaccccttagcatcaccttcttgccactggcagcccatctgaatttgagaacagctctcacctcttcctgagcattctcaaaacctggatattttgtgtaaaaggtcagtttcctggttggcttcccttatttctggggcccctgatgctccagctctttgggctccagctctgggggccgtgttggaagctctttgccacctgaccccactgtcacagggaacctgggatctgggtgacggtttgtcattggctggcatcgtccagagcccctccttcctgcccacccctctccatctgcggctgctgttttctactaatacttcctttcccacacctgtgctcacgcctgtccctaaatgagaacctggtgggagctcaaaggagactgaaatggccacattcatgaatttacatatttgctttgctaagcacctactatgtgcttagaacatcctagaacagtacacagttgagggtacagcattaaacagaacagacagaagccctacattctagatggtgaagacagacaatgaataagaagtaacacccacagtttgtcagcacggaaggggacggctgtgctgagacagggtggggttatacttaaatagggtgggtcagctgggcgcagtggtttacacctgtaatcccagcagtttgggaggctgaggcgggcagatcacctgaggtcaggagttcgagaccagcctgaccaacatggtgaaaccccatctctactaaaaatacaaaattagctgggcatggtggcgcatgcctgtaatcccagctacttggaaggctgaggcaggggaatcgcttgaacccaagaggtggaggcagagtgcagtgagccaagatcatgccactgcactccagcctgggcaacaagagtgaaactctgtctcaaacaaacaaacaaacaacaacaacaacaacagaaatgggaaataggatgctggtttccaggggctgagggggaggaggaaacagttagtgtttcatgggtacagagtttgggcagatgaaaaagttctggaaatggatagtgatgatggctgcacagcaacataattggacttaatgccactgaattatgcccctaaaaatggttaagatggtaaatgttatgttagggatattttatcacaataaaaaaaaatcactctcagtgtcttgtggggatgttgactgcaagaaggtggctggtt

SEQ ID NO: 1241212 - DNA, 4001 bp, Homo sapiens
tgaggagtccagtggagtaggcccaaattttgtgaaggaaaaatattagccaccaatcattgaatacatagtatgtgctagagacctgactgtgttattgctaatccccaaatctctacaatgaacgtgctatctcttcactttaaaaatgtgaaaacaaccacaaagatgttaaaaatcacaactaataagagattgtgcaggaatcaagatgtggcagtatgagttctaaaaccaatattctttttactattcctagctgcctttctttttttttctttaggcagagtttcagtcttgttgcccaggctggaacgcaatggcgtgatctcagctcacctcaacctccgcctcctgggttcaagcaattctcctgcctcagcctcccaaatagctgggatcacaggcatgtgccaccatgcctggctaattttttgtgtttttagtacagacaggctttctccatgttggtcaggctggtgtcgaactcccaacctcaggtgatctgcccgcctcggcctcccaaagtgttttgattacaggcatgagccaccgcgccaggacttctttttttgagacagagtctcgctctgttgcccaggccagagtgcagtggcatgatctcagctcattgcaacctccgtctcccgggttcaagtgattctcctgcctcagcctccctgagtagctgggactacaggcacacaccatcatgcccacctaatttttttttttttttttgagaatggagtctccctctgtcaccaaggctggagtgcattggtgcaatcttggctcactacaacctccgcctcctgggttcaagcgattcacctgtctcagcctcccccagtagctgggactacaggcgcgtgccaccacaaccagctaattttttttttttttttgtatttttagtagagacaaggtttcaccatgttgtccaggctggtctcgaactcttgacctcaggtgatccacccacctcggcctcccaaagtgctgggattacaggcgtgagccaccgcgcccggccaatttttatatttttagtagagacggggtttcaccatattggccaggctgatctcaaactcctgacctcatgatccacccacgtcggcctcccaaagtgttgcgagtacaggcgtgagcccccgcgccgggctaagaaggcagtctttcttcttcaccttagatccctcttgcccagcacaaagtattatagaacaaggttttgaaaatggctgaagacagcaggaaactcgtcttcaagcctgaacagtgggagtcagcacgatcgccacgccctcaactcaagtcccctcccagatcttgagttcttccctctgagagtgggggaggacggcggacgggaacaaggcgccccgacatggtgtgccttttggcaccggcgatgagccttgctccgccatcggccgccggggttttccagtcagcctgtctcctgattctcttcccctgcccggcgcagcggtccggccgaatctcgccggggtctcctcttcccctgcaccagccagcgcctcctggctggccagtcccaccctggctcacccttcccgaagagcctgccgagaccactcatcgcgagctcgcctctcccgcctccgcccctcagcgtcctccagacttccgccttgctcctgggagggtgatgtctcatcacacagggaccagccttgcccaatccgtcctcagggcgccgccgcgacatcaagaggcgcaaacgagaccaccggtgtcacgtgacccaagccaccagccccagaccgacgcgctcctcttaaagctgccacatcattttctattaagtaaaaagacagttctatctccacctgagtacgtgcttgttctccggaaggaaatgtgcagtgtgatggcacctcagtgtatggggtcagtgggaaaacttcatgctctttacagagctcaggaaagtggggtggtataggttcaagcacttggggttgccctaagtttagatggcaaacctgatgcagtctaatgtctcacattctggtctctgcacctcaggacaaccaaccccatttcacaggctagaaaaatagaaactccccacactgtgggtaaaatctcttctgtcacacacagatgaactttaataaattacaaatgcacctgaaaatgccttcttgatttcctttcagtttaggcctcaaatgggctctcctcaaggctggacctcaaaggcccagtttgggccttcgcaaatgtctctaacccttgacttagagtttgaagattcattccattctggatgtgaatgcaggtaacacctagaaagataagaagtcacatttcattaagctttcagggttctccattattactctgacctttgtgagtgccacctatagggcaaactatccaacctgtatgtatctacctaatccctcctagggaccccaaatggctgttcctcatcactcagtacccagtttgctgacgtctacaatattccgcctctcatcatcaaagaagatcatctgggagaaaggaattccagtcttctgctgcaacctattcaagacagggcaggagtaaccaagctagtatcttggtttcccaggcctctctgatactttctcaccctgctcctcccttatctccgcatacctctcaaagtgtgtgatcttgctgcctggatagatttcccgatgaacaaagtacctgaagaggtcaaagagctccagtagctggttggccccttctatctcacttgtcctgcaaaacggtgtaaaagatgggattagcaaagtgaagggccagggctacgttaacttattaagcaaagttagtaagtataaccagggaaatcaacttgctgtttttccgggatggacaggcatcctcagcctctgtttaactccattgccttcctatttgacacaattggtgctgggccaatgttttagcttttgttttgagacagggtctagctctgttgcccagactggagtgcagcgacccaatcacggctcactgtggtcacgacctcctgggctcaagtgatcctcccacctcagcctcccaagtagctgggactacaggtgcacgccactacaattttttttttttttttggtagagatagggtctccctctattgcctaggctggtctcaaattcctgggctcaagtgatcctcccacctaggcctcccaaaatgctaagattacaggtgtgagtcactgtgtctggccccacttttttttttttttttttttttgagacattgtctcactctgtcacccaggctgaagtgcagtggctccatctcagctcactgcaacctccgcctcccgggttcaagcgattctcctgcctcagcctcccgagtagctaggattacaggtgcgtgccaccacgccctgctaatttttgtatttttagtagagacggggtttcaccatgttgatcaggctggtcttgaactcccgatctcgtgatccacccgcctcggcctcccaaagtgctgggattacagacgtgagccaccgcgcccgcctgctggccccactttttaatagttaaaaggcacaggagagcgttcaagggaaaaaatatgtaaatacttggaaacttgcaccgcccctatttttgtagaccaggggtttcactgtctcttgcatgcacccttcagcattacactgtcagttgtcagtcgctcttcttaccttgaagcagccgcaccgggcaccccaaggctctgcaatcgttttaggacctcaggcacctctgggtacagtcggacgtcttggccccgcctatctcgtacagttccatcactggagagggcaagagtgcgctcagccctggctgggtcctatctcgcccccagtcttccctgtccctacctcacctgctcttatggaacggagggtctacgtgcgtgtcgacccagaaaggccagagagtgtaatctgcgagaggaaggagagggaaggttcagcctgg

SEQ ID NO: 1241213 - DNA, 4001 bp, Homo sapiens
aaaacactgcttgcacccgggaagactttttctcatgtgacccttcttgatcacaccctaatcccttaggagtaaccactatctcgacttaacagtaattgtatacgttccttacagttttaccacccaggtacatccttgaataatatattttggtttgcctctttttgaattatactttatgtgttctttcatcaacactatttgtaagacttttcaggctgctgtgtaattctagtttggtttcacggctataattcagggtttctctacctccacactattgacattgggagtgatactttgttgtggtggctgtcccatgtattgctggatgtttagcggcatcccttgcatcacccattagcagtcagtagtacttccccttttgacacccaaaaaatgtctctggatattgccaaatgtctcctaagagccaaaaatcactcctggtagagaactactgctctaattcattcacttccattcctcattcattaatggtgttccattctaatgaatgtatcagttacttttccaatctactacaaaaataatgctgttatgaacacttatttataaaagtcttcagaagcatatacacatgcatttttctagaatgggaatcactgggtcatgtctgtattttataaggctcacccgctttttcaaagtagttgtactacaggagaattcatactgttatacatgctactcaaaagcctaagtattacccataagatactaagacataaggaactacagagactttctccctccttcccaaccaatgcacaaattccatttctgtaattttcccccatcctccagctcctcaccttcttttctaccctaattacaactgtccttcaagtcttagatgatgtccaccttttctcaggggagaacagcactatcccctattgccctcccctttccctaaacttgaatagcatttctgaactgagctactcattttttgttagtcacatactccccaaaactgtaagctgttaggcagcaccaaaggtgccttttaatttcttctctgaaacaaataatccagctggacgtggtggctcatgccagtaatcccagcactttcggaggccaaggcgggaggatcacttgatcccaggaatttgagaccagcctgggcaacagcagcaccctgtctcaaagagaggagaaataatccctttctggcctagcaaagtaatctaactacacatatataaatgttcaacaaggatgccttgaatgaatgagaatagacaagctttgcaaactcctgaacctgaaagtaactgagattcagaaggcggtaacaggcaggaaacctaaattctagtcctggctctcatccatgcaactagaatgtgaacttgggcaagtgatttcccctctctgggcatcggtttcttcatctgcaaaagtgttagaacagatgaccacagaggtcccctccagcgctagaattcggtaagaaaattgtacttcatcaaatcgagcttgaggatgagaccggaagtgggggtgggggagtccctcggttgtcgacgggggttgtggtggtggtggggttcctctgttgctccttggagctcaagagaacggccactacaactgaggtcagccgccagggcgggtaccagaggtgcagaccgccacaggccatccctggtgtgcctaaataccgctactgggtcaccgggaccggcagtgcggccgagtccgccccacgtacggcctctctgggaaggccagccttggatatgagacacctcgggggccgcccgcgggccaagggagcgcccagtcgctcacccggttgggatattccttctccacacagtcgccacacatcgcgacgcagtcaacagggaatgtcctccaacgcttccgggaagacgaaacctcgcgagaactgagatacggttgccgcatgcgcccaagtactcgactcctgggtattccgtctcgggaaccgagccgaagtctccgccccttagcaactgttgtcaaggcagggcacagtctccttggcaccgtgcgtgggcaaagggtggggcttcagaaacctttggagacagacgaagaaatcttgtgcgctaacagatgtgacgggaagggaaagggatcttgggctgagcgaagttctcacagacaccttcctgagcttaggctgacaagaaaggcaaatcacgacacacaagaaagggaattatttctcgctaccgcatatacaaatctgaaatgttaatgaatacatttctgtaccatttcttaaggcaatgagagtgaataagagaccagatctcagcaggtgaataaacagtaaccgaagtgtttgggaagagacactcagagtgctgcagaaaatctcctaaaaaaacacttaaaatattagtaataattggtcattccagagtcctctggaggacatagcaacgaggaacgtatttctatctctctcaggtgtcacagaagcacctcagtggcgggcaagcactatgtaaatagaaaaatggccaggtcatcagccatcccattactgggtatatacccaaaggattataaatcatgctgctataaagacacatgcacatgtatgtttattgtggcactattcagaataccaaagacttggaaccaatgcaaatgtccatcaatgatagactggattaagaaaatgtggcacatatataccatggaatactatgcagccataaaaaaggatgagttcatgtcctttgtagggacacggatgaagctggaaaccgtcattctgagcaaactatcgcaaggacagaaaaccaaacaccgcatgttctcactcataggtgggaattgaacaatgagaacacttggacacagggtggggaacaccacacaccggggcctgtcgtggggtggggggaggggggagggatagcattaggagatatacttaatgtaaatgacgagttaatgtgtgcagcacaccaacatggcatatctatacataggtaacaaatctgcacgttgtgcacatgtaccctagaacttaaagtatattaaaaataaatagatttcaaaaattatctaattgaattgactgcagatattttgatttcagatttgcacatccatttataaatgacctattggttcacagattaaaaaaccaataaacatatgtgcttccaagaaaagaaagaaagaaagaaaaatggccaggtcagttgttcctgcatcatttcccaatcctgtgggtctcaaaatgcttgtgcttgttgccccgcctcatcctttctctctgtattgaaagcatcttatttattcgcaacgacctaattaacttgcagacgaatctccgaagtttgtctctgtttctgaacaatgcgtctttatcacactcctctaccccaatgggaacatcaacatcctccctcagccctgctttattgctgtcatgtcagggaagaaagattggggagcctgggagactctgggatccagattccttaaagaagagattaataaccatttcaaagcacaccagtttaaatgggtttgctaatatgggaattatttttccacggaagcactgaagttgtaacctttagtatttcaacttctagtaagtatctgcaactgttattaaaaatcataggtgtgctaagaaacactgcaagaactagagccatcagagtttaccttattcttagaataattataatacctcccatttgtatgacattttcaacctttcaaaagtgtcctcatttcagtttctaattttatgctattacaatcctatgtggttggtaagaaaaatatgtctcctcttttcagataaggaaaccacagaagtgagtggttaaaggtcttgtctatggtaacaaagctactcagtagtcagccagggctaggactctgttgctatccttatctcaatttctttctaatacagtagcactagccacttatggctataaagcactttaaatatggcaagt

SEQ ID NO: 1241214 - DNA, 4001 bp, Homo sapiens; identical to SEQ ID NO: 1241213

SEQ ID NO: 1241215 - DNA, 4001 bp, Homo sapiens
tgctcctggtgccctccccaagcaacctcaagttctggctgttacttgagcagaggcctttcttttcccttcccccagctctatccatctgccaggcccccctcaaatctcttcatttccaagttttgcttgacttttccaagaggagagggctgcttcttagtatgtccctactcatcctttcctttcttgtcttgtatcctggtgcagcctggtaatggggcctcttcatggttgtgtgtcatgactccctaaccattatgcctccatgcatcccctgttcctcctggaacctagcaccatgccttacatggaaaagctgtcattgacagcccggtgagagccctgagggtggagtgactggggcagggcctgaggcaagaggtgggaggaggtaggaggccaggggctcagccggaccaggagactggaaacaggcaaggataaggcaggtgggggactgagttgtttgggtcacctctgcaggccagagagaccaggcaacatacacactgcagaaggtgggctgggaggattggggccagagctgggggagggatgagaacagaagcaggaccaggattcagcagagtcctcctatttccttccaccaccagggaatcttactgccccacttcagcttgtgctgtttcctggcaaggcaggctctcacatgcctggacgcctgggtgcgttggtgatgggaaggagcagggtgagggaggggccccaggagaggcccaggatgagcctcatcttgtccctccccattcttgtcttaccctctgcaaatgtgataggcacaggacaggagtaggcacctcgcctactgctgcttaacctttcagcttctccaggcccccaatcctgcttgctcccagcttggtaagtagatctgtgcacgtccctttacaccccaccatccagttttgcccagatgtgctagaatggggctggacaaagaaggaggggccagactagaggagtggtggtagagatagtgacagcctggggtgatgactttatgcctgtttaccactgagctctgggaaggaggccaggagtggggcaggtcaactgactgggagcaggggatctgggttccaagaaggagttgtgtttgaggtggggtctgggtcctcgtggaagtcaggactcccaggcagaaaagaggcaggctgcagggaagtaaggaggaggcatggcaccttctcatcgggcatcacaggtggggttttgccccacccctgaacgccctctgtggcgccttccacccacctgtaggcccagaaggatgtcggtctgctaccgtcccccagggaacgagacactgctgagctggaagacttcgcgggccacaggcacagccttcctgctgctggcggcgctgctggggctgcctggcaacggcttcgtggtgtggagcttggcgggctggcggcctgcacgggggcgaccgctggcggccacgcttgtgctgcacctggcgctggccgacggcgcggtgctgctgctcacgccgctctttgtggccttcctgacccggcaggcctggccgctgggccaggcgggctgcaaggcggtgtactacgtgtgcgcgctcagcatgtacgccagcgtgctgctcaccggcctgctcagcctgcagcgctgcctcgcagtcacccgccccttcctggcgcctcggctgcgcagcccggccctggcccgccgcctgctgctggcggtctggctggccgccctgttgctcgccgtcccggccgccgtctaccgccacctgtggagggaccgcgtatgccagctgtgccacccgtcgccggtccacgccgccgcccacctgagcctggagactctgaccgctttcgtgcttcctttcgggctgatgctcggctgctacagcgtgacgctggcacggctgcggggcgcccgctggggctccgggcggcacggggcgcgggtgggccggctggtgagcgccatcgtgcttgccttcggcttgctctgggccccctaccacgcagtcaaccttctgcaggcggtcgcagcgctggctccaccggaaggggccttggcgaagctgggcggagccggccaggcggcgcgagcgggaactacggccttggccttcttcagttctagcgtcaacccggtgctctacgtcttcaccgctggagatctgctgccccgggcaggtccccgtttcctcacgcggctcttcgaaggctctggggaggcccgagggggcggccgctctagggaagggaccatggagctccgaactacccctcagctgaaagtggtggggcagggccgcggcaatggagacccggggggtgggatggagaaggacggtccggaatgggacctttgacagcagaccctacaacctgctgcccttccctgtccctttccaccccccacccaccctccagaggtcagtgttctgggacatttggggacccttctttgactagagtttggatctggctgggtaggattactatacacttggggcaggcccaggctcctccaaactgagggattatgagggtggtgatggtccctgttaaggactattgtgtgcttgcaagttggcatgtacccatgtgccagcattgcttacttgttgccaatagctgttattgtgaaatacactgggaagccattagatgatgacttaagtgtgcttcccctggtggttcttcatgcctgagttgtactgaagccacctagttccctgctgggtcaagccaggctgggcagtgccagccttcagtggcatcttgacctgccctcctcagcccaggtgccctggttccacaggccaacccatagaaccactctggaaataaaggagaaaatggaaggagaggtatgggagcttggatgaggggtaggaatgggatccattctctgaggcttataaaagcctctgaggaggaaatggctctgaaggggaaaatgaatctgtggggtttgaaaaggaagttttcctgcctgtcttgtatttggtccagtgagtatgagacaggcacacaaggagtggacagtggtgtaggggccctgggagtctgagacttaccttgccccctgaccatctgatcctccctgcaaaggccacctgacgtgaaaaggagccaggagcaagcactcagtcagggaagtttggaggttggccattggggtatgaggaatggcaggaatatttagaggacaggaataatttttcagagaagtgccacatattctttttctctttgccaagtctgggctccttctaagatgctgctagctattcctagcccgttccccaatacttctctgcccccaccttttggaatccttatctaggtctaaaaacggttctagatcctgacccctttgattgggggatgtagaatgggattcttttcaggggacatccacaagtacacatctgtggtcactaaggtgaccagctcatcccagttggcctggaactttcccagtttaagcactgaaaactccttgtcccagccctgccggtttcccaacaaactgagatggttggccgctcaagtggctaccctgaccatcaccccaggctctactttagcgactgctcacacctccctgcttcccagacagaagtcaaaacagcaaaagaaacccagtccccagggtcatgctagggctaccaaaactgggatgaactagcacctgtgaactagaacagcagggagtatgcttagagtgcctggtcctgggtgtggggaagaaaggccatcaaggtagatgcgggtggggaacagcttgagagaggaggcaaggacaacccagtttctgtctgaaggggcctctggttgaccctggagtttctgtccccaaacacaggcctcacgggattctttctgtcctcatgcactgggcagaggttccttaacttcctttgttgcacattgccattctctcacatcccgtgcggtcaggaagcccttcctgaactctgacttcagttcttg

SEQ ID NO: 1241216 - DNA, 4001 bp, Homo sapiens
ttacttaaacaacaaatatttgcttactgcctacaatacgccaggcatgggggaatgaagtgattgaatgagacggaccaggaccgttttcatggaacttactttccaaaggggaggcagataataaacaaatgaccacgatcagttcagatcatgattaagtgtgtgtggaaaataaaacagggtcttgtgttagtgtgatcccctgagaaggtgtcgtttaggctgagatttgaatgatgaaaagccagaaatagggtaggtcagtagtatgtgccctaattatgataatgaggttggtgagttcaaaaaacagaaaacaaaacaaaacaaacaagcaaacaaaaaaaccagtgtgctggaatgaaatagacagaaaaggactagtgcgtgagtaggtgatcagacaactagaacctaataggccaagataagaagttggaccgagggcagtggctcacgcctgtaatcccagcacttcaggaggccaaggcgggcggatcacgaggtcaggagatcgagaccatcctggctaacacagtgaaacctcatctctactaaaaaaatacaaaaaatcagccgggcgtggtggcgggcgcctgtagtcccagctactcaggaggctgaggcaggagaatggcgtgaacccgggaggcggaacttgcagtgagcccagatcgcgccactgcactccagcctgggtgacagagcgagactccgtctcaaaaacaaaacaaaacaaaacaaaacaaaacaaaataaaaaaatgaagtttggacttctaagtattagcttggtgcaaaagtaacagattttgccattacttttaacagccaaaattgccattacttttgcaccaacctaatacaatggggagtgagcaatgagctctggatagggcagtgaaattatctgatttaggtttttagaaagtcatttccacagagaagtattcctggatcccccaggttgggttacgactcaccactagatatgtggtacaccctataattctgctatcatgatattcaccagtggagtgtatttgcttgtttaatgtctatattccctgctaaactggaaattcgactagggtaggaactatgtctcgttctctttcaaaccttccacacataggaggctttgcataaaatgaggtaaatggaggaatagctcttaccacctgttctataattgtctaagggttttccccccaacaggagattctgagggcaggatcacatctgattcatggtcagcctgactcatacggggcacatatttaggaaccaaaaacataactgacttcaagaaactcaagggctggtaaagacagaccagtcatcagcgtcacaggacagggtagggtgagggcacagtggctaagttacttatcccctctgagcctcgattccccatctgcaaaatggggttgacattacttcatgggaccactgtgaggttcaaatgagatgatccacttaaagtgcttggagcagtactcagcaaactgagcactaggcgaaagccagctttcattacaagcagaatgttctgactgagggcagttcagagaggagtttctggacgagatgagcatgcaaggcttggtacccagtgaactctgttagtactaatttatagtgacaataattacaatttggatgtcggatctgctgacactcatttgcgtatatcgtcccgttcatctgtcactgcacatgtgaaaaaacggaggctcggcaaaactgtctcccgagcagctcgcagaggctgcgaggggcctgcgggctaggctggggtaagacagaggacctccatttaacctcatgtaatccggggagctcctgagcttctggtccaacctgcggcctaagcagtaacattcacagccaccccaccccgggaaaggaaccgatctcacgcaccttccataaggtccacagatatccgtagaaggagacgcgaagccccgcccaccccaccggaaacgcatttgcgtcacgtccgccccgcccgctgccacttgtggctctgccgctctagcccccggcggagccagctgctgctcttcggtgctggccccggtgccggccccgttgcccagggaacaggctcccggcagcccccgcggcccggagtccatcccgcctcctccggcccggcggggccgacgagtccggaggggctgccgcgggaggtgagtccggcgacgccgcaagcggccccgacgcccccgacgcccccgacgcctggccccgagcccctcctcggcctcccccgggccactcttcccttgcctcagccccgcagggtctccatgcccgtccgccccgtctccctcgcccgcggtctcgcccgcgcggagtggcggacactaaatgccacaacacacggagcgcctggctcgccgcccgcagaatccggcggtccgcagcggggaacaggggccgcccgcccctcctcaggcctccgctgcgcgtcccgcgccctcggcccccggccccaccctgcatcccggctgccggtctggccgcgggctctgctccttcgccttaagattgacgtcgtgttctgtcccccactcgcagcccgcgtcccttacatccgcccaccggcgcctggccccaggccttgacactcatccagttggtgttcagtgttcgatgagtggataagtgaatgactcctttcccaatcctatttgaaggcatgggaggcagaataggtagtaagtgttaaaggatggggtgtcctggagtcagagccgggcaggtcccagcggccccttcctagctctgtgctggggcaagtgccctacctcactccgctccagtttcatcaccagtggaatggagatgagaatagtttctacctctggcttggtaagaggattaaatgggtcagtgcatgtaaagttaagcacggtgcctgccgctgtacatttcagtaaaggggagcccctgctgtcatctgtgctagcctgcgttctcgccctctagtcccttctgatatgtctctgacttctcatgactttagtttctccttctctacctccatttctcttccctgcacttttttcttcctctcttattgggattcaggaattttattctgttctgtgacttatgttccatgtgttggcagaatgtgggataccagcctgggtgcatccttttctcatctattggagtgaccagttgcacttgtggactgcctccttgcagccaaggtcttgtagacagagttctgggaaatctcaaaacgcaaatcccaggcataggtagaatctgggaatgaagccactgtagctccttgtgatcaccagcgattcctggtcttttaggctgcaggactttgtgttttctcacacccagctataatgtaccttgataaacctctgaccttatttttgttgttgttgttgttaacctgacttacgtcccatattggtggttatttggccatcgtgtgccagcactgtgccaggctggctctagggatgctgtggtgaaccagacagacccttcctgaggtcactgcctcagaaagatcatggtctggcccatgaactttaaaagggagaactaagtgcaggtgtaggggacacacaaattgaattttcaggactgccttggaaaaccagtggtggggaagatggaatgaggataaccctcttctgaaggagtgactaggaagtagcttttgttaggcatcagctatattatacccacgtgtctttttcaatagaagactggcatctactggatttttttttccaattttttcttaaagaagttacacttaagtttggggagaatttcatttcatattagccgctgtaggagttgaaaaaaatggctactggaacttagtgggaagaaaaggaaggaaacaggcatcaggcagaggcagttgattgaacttgggaagatgaggaatagatcaggaaagggttataatgaaaagctttggtgtcaagcacgaagagatttctagat

SEQ ID NO: 1241217 - DNA, 4001 bp, Homo sapiens
aaagaaagtgaatcaataaatatataagtttatataaggggacaaaattcaaaatcctagcaagtgctccaaagcatttagctcttactactctttttgcacttctgacattagtctaattatttgtctcctcaacctcgagttgtttttttcatctttgcaacctcagcccccaacaattaacatgaggcattcaatagagtaataaattccaacaaatctctgacctgctgagtctctgacagctctagtagcttagcagtcacagaaatacctgaacagcttgaaggtcaagattctgcatttccaaacaccacggtcaccttaagatctaacctccacgtctggtcccctgcaggaaacagatatttgatctaccccttattctaagttgaaacgtcagggacaaatccaccatccaaattaagggttgatctaatccacaaacaatctttgtgaagatttgtccttatgattaaaaaggagatccagggttacaagaaaaggatctgaaatgctgctttcagatctctccttttatagacacttggcaacattcctggaagctcaagttccctttaaaatgtgtcacgtgtataacatgtgtgcctggacagaagtgtgaggtaaaagcccaaccagaggcttaaatacaataaagtgataaggtcacagaaagaaaaccttgagtaatccccgttagaattataaatacattactagcttttctccgaagtcattttcttttggcctgcatattcagggataccattctgggagaatgtctgggtatcttaacagtggaaaaaccctgtctacctaaatgtctaatattcatcttcccttccacattcattccatttctccaacttggctgaaaattcgtgtcaaagatcctgaaccccaattccatacaatttcctatgttttagaccagtttggctctattttcacctttcaaaggggagatgagcttagagaactttctccgatcccctgctgcaattagttcacagtaacagtgcccacctacccattcgcaccagcccacgttgcatctgtgccaggcagcatgtgcaccctccaggcatccaccagcctgccagctcagcagggcaaaactgggcagaccctagtactgtgctgtgactggcataccaccagccttccagggcaaacgcccaggcaatgcatactgccaggacttgagcaataacagggagcctagctccagcctgtgacctgggccgggatcagagctcccccgaacccacccactaaccacttaactccttacttggcactgcccaccttctccccagaaacactacccccgacaccaagcctggcaagctggccactcaggggaaacaaccagcaacgagggtgacggcaggtctctggaaaaggcagcacacctgtgccctggagccagaacagggtaccacccccgacctcaaaccggaagcccaggaccctcgcccagttactagttctggcgcccactcacctgcccattgcttggccctcagctcccagccgggctggactccaagctctctccccgcccagccggctggcggttgcgcccagggctagaccagggcccacctgcccctcacacaagcctcctccccacacgcagccccctcctcacccgcgattccctctcccacgcccctcacagcaaaccaaagccctgctcccaccatttggctctccgtcctccgaaagtcccggtttgcccctcttgcctactcgctcctcttcctctctcccctacttccacctcctttccccacgctcctcgcccaatccctctcccgccgtcatccctgctcccctcctcccggaccgagccctccctttctcacctagggccggggtcgcagctccacgaccggcctgtgggtcaggtggcgcatgcgcgagcacggccccgcggcaccatgacaacctcgtcgtcgctgggtgtctcgctatccccacagcctcccgcccatttctcctccccacgcctccgcgacggctttcgccagccacgtgacccgactcggatgacccggcaccatggagaccgcacgctgttctcctagaagggcccttggaaatgcgccctttccccgcccccgccggaagaccaggccggcgcggggcggggccagcgctcagaggcctacgctctgtccgcggccggcgggcgtctctatggttggttcctcaggcctcgccgccattttgtacgggggccttgagcaatgagcggcttgggcaaggtttccaggcggggttcagaggagccgggggtggggccggcttggagtcgatacagagagaggagcgactctcgcactgtcttggtgcgtgccgccgtgccgccgtgccgccgttgggggtgggggccggggcgagtcgtgtccggcctgtgcgcgtgccgggagcgacagtgcccggcgtgggagagcgggcgtgcgggcggcctcagcctggagtcgccgtgacaggggtgccagacctccccgcgtgctcctcgcattttctctacgcctgtcgccctgtttgttttttgttcccgtccaccctcgagaccgtgcttcacgaggtcgaggcgcgatgagttattttaagtagatgatttcatgacctttgatgtttgactgactttgtcatgtgctatgggttttatatggatgctgtttcttggtgaaggttcacggtgaacacacgtgtgtaacagctaaagaaaaaaagggcttgggatcagttgacgttctgatgccttgaatcagtgaaggttacttagaaaaagaattatttcgctagtgaaaaagaggacatgggcgagtttaaagagttgacgggtcgaggcagattcaagagctgagctgtccagtaagatggtcactaacgactggataagtttctcagttgtactagccacatttcaggagctcagtgacctctttattggacagtgcagattatatatagcccattcccagcatcgcagaaagttatattggacagtgctgatttagatagtggggaattgttttatactggtcatccaggcctttgtaagtgctgctaggtcgtggttaatcacgttagtcctctagacacaggtaattctaatgtattactgggtatgggtgtacttgttagtagtcagctttaccaacaagtaatatgcctacaccatgtaaggcttttgttttggggacagagtgaaagcaatagttaacaattaccaagtaattaggagccgggccgctttatatgcatccttttatgattccttacaagtttatgacgcaggtggtatttttttccagttgtgtggcgtttttgcccattaggactcaactaaaaacccatggctttggccaggcacagtggctgacgcctgtaatcccagcactttgggaggccgaggcgggcggatcacctgaggtcaggagttcaagatcagcctgggcaacacggtgaaaccccgtctctactaaaaatacaaaattagctgggcgtggtggcacatgcctgtaatcctcgggaggctgaggcaggataatcgcttgaacctgggaggcggaggatgcggtgagccgagatcgtgccattgcactccagcctgggcaacaaatctccgtctcaccaaaacaaacaaacgaaaaccgtggcttttatccatgaagctattaatatattgccttcttttgaagtggaataaaacaatctgccttcagataacttaaaatctgatatgggaaataagacgcgctgtaataaataatatgaaagagaatgggataagtaccagaagattgtgaacaaaacctaattaataaaataaagggagaaaaaaaaactttgtttttttttggttgttggagtaggaagagatcagtaggtaaatctttaaggatagctaaaagttggatttgcagtaatggaagtgggtgagagtacgacgcacacaaagcaaaaaaagaatcaatgaa

SEQ ID NO: 1241218 - DNA, 4001 bp, Homo sapiens
ggtaggagccctgcccctggagaagctttggcgtcaccagcccctggtagaatcccagcggcggaggagtgagaaaagaaaacaaagagctccagctcccagggccgtcggggagaggcgccagagagccccgcccccacctcacgtctcggggtggggaggtgttgctgagtcctgagcccccacgggccggggcccagtcccttaacgcacctgctcggccaaggtcaccggcgcaggaggaggcgcggcacggaacccagacccggagcgcggccggcccctccctcctcctcctcctcctcctcgccgcgaggggccccacccccgcgaggggggcgagagggaaagcggaggtagcggggagggaggacgccgcgagagggcgcagagggacacgcaccagataccgcgggcgtcgggccagtcgcgggccatgcccgaggccagcagcaggggcgacacgggcttgtcgaagaggaagtggtcgtcgatgagctgctgctgctccgcctccgtcatgctcttgagcgcgtagtatcggcccgccaggtcgccgtccaggctggacagggctgcgaggggtgcgctcaggacgctcggctcccgcgcccgcccctccagcccgcagcgcggacccgcccgcccccgtgccccacctcgggggacgtcagagggccccacccgcccggatctgcgggcgtccagtcctcacggcccgggcgacggtcccaggcggtgaccccgcgccaggacccgccctccctgggccccaggccgctgtgggcgcggggctgggcctccgtccctcggtccctccgggaaactgaacccgggcgcgcgcagataagagcgcgacggcggctgccgctcccgggcgacgtaaacaaaagcgggcggggaccgcgccgggagggggacgcggccgccgccgcccctcggcccgcccggcccctaccttccaccgcgagcttctcgatggcgcggcgctccccgcggctgcagtgcggggggaggcagaagccacggatgctgcggcccgtgcgcacccgcgagctcagcacgtagttggggtccaggtcgtcgccgccctgggaggcgagacgggagtgagcgcccgaagaccccggccccgcccgcccggcccgcccgcagccccgcacctgcaggttgtcggggttgaggtcggtcttgtgctcatcgctgggcttgtagccgccgtgccggtcctcgatgatggggtcgaagagatccttgaacacttcgtaggactcctcgtcgcccgccacgcagcccacggtcatgatgtacgggtggcctgggggagggggcgcgggacggggacagtgacgtcactgccgggcccgagcgcgctgctgaggaccctgcggctgcgcggggggagggggggccgggaccccggccccgaggggtcgcgtacccgggttgtccacgcctgtctggatgacgtcgtccagcgtgaagccgctcggcgtgctcttggcgcgcagctccgcgtacagctcgggggtcagcaccttggccatgtggttgttgtgggcgctcaggtcggggaactcgtcctcggccgggaagcgcagcttcagtgcgttgtggctgttggagaagggcatggcggcggcgggctgcggggagacgcggggtcagaggggaccggcacgccggggttcccgggctcccgcgtaccactcaggcccccgccgccgggccccccggcgccccccgggacgcggccaaggtcagcggggtccgcagcgcgcgcggggagcgccatcatcgccggggacccccggccggtccggcgcgcgctccaggcgacgcgccccctttgcacgcagcgcccctagcccgggcgcggacgcccccggcccccgggcccactcaccgggcggccgggcgggggcgggggcgctccgtccgtcggcagctcccggagcgacgcaggcgaacagcggccgctccgcgctcccgcggctcttaaggggcacaacgcgggccgcccattggcggctatttatagcccattcattccattggcccgcgccgcggggtggtgccgccgctttgtccgccgcccgcagcccccaacaccctggccgcccacccgagctgtcccctcgctgggaccccgcgcagcctgcccagtcccccgcccaagacctcgaggccgaaacctcaggtccttggatatctggatcccctcgcacgcccttgcctctgggcgggaaactgaggcggagagcctccgggcactcgaggacgcttgggttcatccgcatcctcgagcctgcccgcctagtccagccagcccccgcggcggcggcgaggggccgggcgaaagctttcggggcttccgcagcaggtacggcccccgccccacccccggccagtgcgagctggcccggagccgccgaccttcctcaaggtgcccgcaggcgtttcctgggcgatcctggtgcaaagcgaaggcgcgcgggaagcgcagtctggctgcggcccagcccgggggcacccgcggtgccctgaccttggacaagtcctgggtctcggggggctgcgagccagaaaccacggggacgctgtggccttaagaggccgctggcaagtgcagcctcggagtttccagaccccaaccctgggccctcttcgcaggggacaagtttacccgacccccaaaggcagtccccggagacttcaggcaaagatgggaggaaacgctaataaacaataagcataagtgcgattaaaaaaaaaaactgatctcacgaataaccagaatcatgcaaattaagcagtgactccacctgcccctacccccaacactcccagatcgaccccagccattgctggctttgagctggaatgcgggaagacaggcgtccacacgctgcctgcaacttaaattgctgcatgctttttgcaagataatttggcagaatctattaacgttaacaatgttcgaactccgtgacccagcaatctccccttctaggaatgcagcccttagaaaggatgtctcagttctctccactaatggaccaagagatctgtggagggaaaaacaaacataactggatacaacccgatgccccatcaggcgggagtggccaagggtagggaggcatctgcttgctgtggaatattatgcagctgttaagagggggaagtggaggatgtggggttaatatccatcagggaccctcatctgttgctctgtgaataaagcaaagaaggggggaactcttatctgtgggtatatttgatacaaatccctccagcagtggcacaatgagcacctaacaggtgccagccgctggggatacagcaggcagcgaggtacacagcgcctgctgctggaagaagactggccatgagccagcagcccaacaaaccagatgacatcagatcggtgctgctggggccagggggacacagagcagtggcgttccaggtataagggaccccgaataggtgcctcagagcagaaggcaccagagccaaggcccaaaggcaggggaagcctgttcgcctctgcctatgtgagcatcggtgtgggggccttttctcctgtctcatccccatggtcactgcagaggagacacatgcctctttgctccttggcatgcttcgtcctgttccaagccagcattttttagacttaataaaaccaacccatgtaaaaaggcaaacggcccctctgggctggccagacagcaggtgtcccttaagcctggaattcctgcactctgtgccccgtgcagcctcttcgcccagttttagaaatttctgcagctgcccacctgctaccccacaaaacctgaagggcttaagtttctgtttctggaagggatagctgcagcccctggaggcagacttggggggagggagagacttgggggccacactcaggacttcctctgtcttcagcaactgcagcttctcagaaggccaaccctcccctctctcaccctcctggctga

SEQ ID NO: 1241219 - DNA, 4001 bp, Homo sapiens
tcctctatcatcagggaaggagtgtgcagttctgatttagctcctcagtggagtaaagggaatttagaggaagggggatttctgcagaaattgtcagttacacaagtaagttcctcttggttccccgtttcatcaaaagtgaaaaactgttcacaggagtgcccatgtcccctgtttccctatgcatcactagagccaagaggggactccgccagcaaggcaccctctgctctgtcccgcagatcacagtccccgactttcaccccattgtttgtgcaatgtgcagaactggagcccaaagcagcgggctcaggatcactctccaggcccggcgggcccatagactccttccttggctgggaagaggggctttcgtgaaagcagagcttgacaagccccagtactgtcatggtcaagatcaccaacactactactgctgtgctcacaaatatgaagaccacggcagaggaggagtcgaaagcctgaggagtggcagaggaagtcgtagaattaaacttggaaatcacgctccctgatggggtgatagtggcctttgactcggcttgaagggacatttgaagggtagacatcgtgctctgtgatccccatcgaggaatctcaggaatagatgttactgaattgtcttgttcagggacaagtggtgtctctcccagcttctcgtcgaccctgattggccatgttctctgcggcacggggctggttgcagtggccggcgggcgcctggtgggcaccccggtccccccaagggtcggctgtccttccccactggtcacacaagagcggccgtccttccccagctcgaagcccgtagcacattcgcaggcaaagcctcccaagtcgtctaggcagttagggagctctgcgcatttgccagcacggaggtacctcccggggcagggacacaacacatcgcccgagagtttgtcccagcgagcgccgatttcgtccgcgatgcaagtaactgagatcgggagctgtccccggcagagcgcactcacctcggtcccaggtggactgaagtccagagcggcgctgtgcagctggaagggcgcgcgatagctcaagttagaggcggccccggggcgcggcgcaggacacaagacctcaaactggtacttgcacaggtagccgttggcgcgcaggtggcatcgcatctccttccagcctgcgggctcgaccccaccggtggcctggagtaccgcgcatctccgcgcggtgcaggagcgttggggctcctccacccactgcagcgtgtcgctttcgagaccgccggggtcggaggacagccaggagaaaccccgcaaaggctcgttctccagggtgcagtgggaacgcctgcgctccagtgcgacccagaacagcaggtctttggagccccctccgggccctgggcctgcccgcaggagcgcgagcacagcgcgcagctcggcgcccgcacgcacggtgctgagcgccccacctcgcaggatgcaggcctcctcggccgcctgccgcttcatggtagcgtggtgcaggctgtagcaggcccccgaggccgagcagccagcacggtcggcagtggggtgttcgccgccgcccggcccgggccagagcgcctgccagaggaggcacagggcgaacgccggcctcattctctgaggccccgcacgcagagctgctcccaacttggatctgtcccgctcgaggacgcagagctgtgtctggagcgcggtcaccgccctctacagctggcttccccaacccggttccccctcccttcccctccgccctcgctcccgacggaccccccaactgccaagaatccccccgcgggcccagcggccaacagtttcccttaggccgcgacaggaaatgtgtgcggagcgctgccaggcccggtgcagccctgagttattctggggtcaggaacacagctggcgccgggtacaggggacgcagtcgactagaaggtcaaacaccctgcttagagcaagaggagaaattcgccactgggatgaagtgtgtggtttttctccgttcagggagtttcatcaggaccgcagaacccataacacgtaagcgaacataggcaggaaggacttgagaaaggaactggcttatgattataagaccacgcccgtctattgtgtttctgtccggagctgtggagttagcgtcagaataattcgtagacggctccagtgtttggggggcctgtgcctgtgggggaaaaatatgttgtgaaacaacttagcaactgcttttgccaccagaggcagcactatttaaccgcatatctctctatgggtctttgcttctctattatgtcaagagatttcaggagtcctaactactaaagaatttggagttgtttgggtattttaaatgggaaattctgcttcttccatcagcacttgctttagaaatttatttttcacttccacgtgtttctctttgagttagaccatattgattcattacagaaaggaaatgtatttctaggactaaatgaaaaataatgaccatagatcttaacagttaggttgttagctttccttgccactgtattggttcaaaaattcttcaagtttataggttatacataaatgagttcgtggccttataaatattcgagaacaactgccctatgtgtgattttagccttgaactattttagtatcattttctcctatgattgagtggcagcatttataatagtaagttgtaaacatctcctttaaggaaaattagagttccttaagaaattaaaatgtttattccattataatgaatattgtatactgtcaaaaaatatcttgtaatttgaaagatgggtgagccaatttctttagaattccagtgggtgttttgttttaatataaacatttcaactcagtgggaagtggcaaggaattaaagatgaataaagaagtaaaggttaaaaactgtactgttatgaaaggatttcttgttagcaacttagacaattcagtatcagtttagaaaacgtacattctatcttggttcataatggccaaatacgttgccatcagaaatacatagagagtttcagctaagccctcttagagatgtctgatgcttttaaatatctttaatcagaatgaaagttgccattccatggataatgcatataagctcactttgttttactgcattcaggttgatgaggggtgggagggaaggtttcaggatcacatctgtatgcttccatcttatttttaccataactctcattcttctttcctcctggaaattccatgtatcttaacaaacaacagtaagcctatgagtcatcatcatacttaccttgcttttgctgagtatggagctttgcactaggatttctctcctgccctatttcccaatttaaagaacattccttagtccttccttcagatgtctgagaatcaccttaaacgtggctttgcgtttaaattaggtaacttagtgtcttataagaaagaaacatgaaaatccagaaatcaaattgaatggtttttaaaaaatacttagtcacttgggccagctctctatagaccattgcaatcttatgactgtgtttgtaaatgtgtccatgtagtgcaatatttttaataaaatctttttcaaacttaagtagtcaatggaaatttcttagatagctttaaaaatcgtttgggatgagatgaggtgtctacagtaagaaagaatgaatagctggaaagcttaagtaaatacatgatctcactccctgacattctgtctaggggagtgggattatagcagagaacacattggccataacgactatatgagagtactgaccatgaccatgaccatatcatggaatgacacaagagttagaaaaaattagctcaaagtaggacgtaaatagttttgtaattagtttgaaatagacagtttatctgaccaaattagaaatggaggaaagtttctattttttaataatatttattaagataataatatagaaccatttt

SEQ ID NO: 1241220 - DNA, 4001 bp, Homo sapiens
actgatgtttgcctaaaagtgaggacagttcactgggagctgagggagaggagcctactcagtgaactcctacccaacctccaggacccatctcaaattgtccctattctgtaaagccttctcccaccgttctggttgtaacctaatgttcatattgcggggcatctcttcacaacaatcaatcttctctaaaccaggagctaatcctagaggaatgcaggaacttgttgcacgaagcattggttagtatgtgcttattaaacactcaatggttgcctaagacagacaggtacacacactcacaccctcacagtccagcagaagacactaatgcccacccccaaacaggatgtcagttcttctcaggcaacaggatccaggcacttggcttattatcaaaagagatcactttcaacatcccagcccaagcctcctcctttaacacaaatcacagccagaagagatcagagcggcccagagcaaactcagtttccagtgtccaccccaggaggctccccagtccttttgaggtcacctctgccggcactgtccttgcccaacctaggggtggggcagaccctgggctcccaggaaacattcaatcaggtgtaatgtttaaacttgactgctcggccatcccccagcgctggggctccctaccctataacagtaaagtcgctgccctggctgggggagggcacccacagccccatcgcctctctgcccaggcctcccagctcgctcctagccactcctaaccttgaaccctctagaaacccaagccagcaggggaagcagctacagaaacttcacctgcacaggtcaatgtgggtgaagaagggccggaagtggtgttctgtctagttctgcaaagcccatatatgaaaaaaaagaagctggagatacagttccatgaagaacacctgtctgttgggtggataggttgtggaggggaaattatgggtgacttttttccttcaaatatttttgtgctttctaagtttccacattgaataaattcttttgaaagagaaacacacttcatgtgtggcaccgccatacccagccgctctccaccactggagtttctctttcacctcttctcagctacctcccaggtagaagccttggtcccagtgtcctgtgcccaggcagggtcggagttgggggccagcgtgggggaagggtggggctctcgccctctccccagttagagtcctgatcctgcaggggaggggcagctccctaagcaaagtggccgctggagttgggtgcttgcctgaccccaccgatccgatccgcacccctggccccgctttccccaactcaccccctgaagcgccgcccaccattcaattccccttgcctcgaaggtacttaggaagtgcgcgaactcacacacacacacacacacacacacacacacacacacagagtcgcactgtctcctcccctccctaacctgggccaccgcccccaagagcccacgtacaaacttctccaaactcgcagcggtgactggagggggtggtgacgtccccctaatgaaaatgcgagccctcgccccacaacacacacacgtgtggcgccccaccccctgggcaactgtaaacctggccgcggctggccgccctggggcttgggggcgggtatccaaccccagcctcccacctcgaggcaagtgacaggaacaacgagcggccggcgagcgggggcggcgcgggggagttgccaagtgtcggagcggcgccccgggccccccgagcgcccagccatcccggggcgagcctgggctgcgttaccttgcaggttctgcactcggatgtcgctaatctgcccgatgagctcctcgcgttggaaccagtcccactcgtgtgcagccatgaagcgcgggcgggagagcccgggccagcgcggcgcgggcggcgggcgcggagagcctggctggcgggcgcgcgagcggcacgcacccggcgagggcgccgcggagctggagtcgcggcgggcgcgggcggggcgcgggcgcgggcggggcggggcggggcggggaggggcgggcggcgcggtcggggccgcccccgccgcgggctggcgcgagcgagcgcggggcggcgggtgcggggcggcgggctcgctctcactcccccgtgcgggggcgggggccctgaggagcgaggggcgaggggcgaggggcggggcggggcggggcaggggcgggaggctgggtcaggccagcttgtgttttttttctttccggggtgtttgtaggttggattgtttggttacaaaccggctgtgatgaggcgcgggtcccggcccccagattgtgatgtctcagggggcggtgggccgggtgacgcaactgggggtgggcccgtgggtcccagtacctggtccaggaggcagcgtctccctcccgtccgggataagacaccccctccgcgggtcccctgtccactctggagaggcagcccccacttggagggaccaggacccgagccctgcccatccccgaatcctgggagccctgcgtggggagtgtcgagggcctgggtcggggggcaaactagtgtggaggtaaagttgtgggagtctccaaagtgcgggggggctgtgaaagaagggccttcttcgttggtttagatactaggagccttttccggtccagtaatgtgactccagcttctaggaaggaacaagaagcaggccaactcctaggagctggggtacgctgtggggtctctggccactgagtctccaagtgaccctctgtggggtcactggaaattagtgaaaatgccaggacagaacttcctgtggagactactgaaaatgccaggacaggccttccggtcccctccctccccacctccactgttgaactctagagaattccaggatcttatcctgtttggtgcccaccatgtggtttacactccttaaaagtgagaccctacagttaccgaatttgcccaaggttgaggaatgacttaggagcaggaagtcccagccccctgctcccagctcagtgcttgggccctttctgtgacaactaaggccacaaagaaaatggctttaaatattcagtgttccaagagggggaaaaaaatggacagggctcactgggcatttaaacacatgggcctgtgtgcatcgctgctctgttcacagcaatgaatcccggaaacccggctgctcactaattacccagtaactatggaggtcccccgaaggacagacctgtgcccttgaggcagggccctgaaggagggtgagtctaccctccagtcatccattggggcaggggctatcgtgtggcccttaaacaaggaaaggagatttctaaagtggactccagaaaggagaaagtcaatttgggttaaggaactgtgaatgcgggtggagggcagcagaggtctctaaagactgaccttggagctgagcccagaaggaggagaggaacccccacagggacagcagtttgggcggggaaaggtgggatcagtggagacagaagtggaggccccattaggggctccttggtgcttgggcttgaggcaggagcttccttgctgctgccttgattcttaatcttgtggtcatttcacactccaaggagcaggatctctttctgcgtcctgtggagccagggtggtagtagcagccaggctaattttgccccatctgctagccatctccctgttcttacacttcaatttattttccataattgctgtggggtgaagttgtgctgaaaaccattttctttacaaagcagagagctaagagaatcagccttcttctccatcatgagagaggttgcagggaatctgtctttaagcaatgtgccctgtggatgttagctacagggttgggccatttttcatgatgcaaagatgtctgatcctgggaatggacagccacatcatttggggaacactacccagtcagcaacagctccctggcagggagggactatgatcaccatcgattgagcacca

SEQ ID NO: 1241221 - DNA, 4001 bp, Homo sapiens
ctggctttctccttcaactgtgaagggaatgaaggactgtcagtcctcgaaatgggctctggacagttggaggtgatcagggagggacagggtgagtagcttcatgttatagccaagtcctaagaaaaattcagggcaatgaggacctgaaggagaagcttaggagaatgggaagtggaaagggagaagagaggtgttgtcacctttagtaacatgatatcgtggtgaagagtagaagtgttatattttggatgacggaattgctttataacctcaagcttctgccatgtgtcttcttcctctgttatgttatgggctccaagggtgactgttatagacctgttgtgaggaagaaggaaggaaaaggagcgacagtgatggcttggggtttcttctgaggtgagctcattctgagaaaagaggactaaactctgtcactgggtcgccggactctacccatctcccttttcatgggccacttgtggcatttgagggctcaggcttaactcatgaaagagctttctcaggaaacagacacaatttctacgacccctggaattgctggggactgaacaggccagggaggactcaggggacagggttcacacttcctaattcagggaaccctgcatgagggccagcccctgaagcaggagatatcagttaaacgggaaagtgggggtctcatgtagaccctgttctctgcctcccataaaatgatgggttcaggaccctgagaactagaggccagtgttcttgaaaaggccatagaggaagtggccctgagactgggtggggccctgaaaagtgagccgtgtgtcttgagttgggtaggggtgaggggtgctactgcaacaagagggaccttggacaggacctccttttcctccgaaggggagcttagctcacagtgactgaggctcaaggaactattcaaacacagactaaagtctttcagcccaagtcttccctctcctgaaagttgacaagacccaggaccccctcttcagtccccagtgcaggtgtattcctggatgctactctggttgttcatctcccatttggagataaatagaccctgttgtctcaccttcctgcacaatgagcagccgtcagcacaaagttccgtcttataaggaaaccaccacaaaattttgagggaccgttggaagttacaatttccaggtaggccatgtaggggcgggaatgtggcttgcattctgtgcccccgatgatctcccctggaacagagcaccccagggtttgaacacggccatagatactctctccaatgaatggacaaattgggttaaagctgagctaggcttccctggaatctcattctcaccctgtgttccgcccatcttccctctcctgtctcctgtatttcgtatctttccccacccataacctcccaggtgaaatctcattcttgcctctgctccattctgatgttttcatctcagacttctcccactcccaccttgccctggcccaccctcctctgtctctgtgtaggacccactgtccaggttcctgttttagatttctccatagctcttgagcatggtcacagagtgagaaagtcacaaagtaatgggtagccctgatgctcagaagattaagaggacatgtctgttttcctggggataccccttttccttccacttgctctgggcttttctacaattgaggtgaaattccttgttcctgggggctgtcctaggctgtagagaatggcagtgggtgggggtgggggtggggtggcacacatcccaagtggaaatttccctctgggactcttgaagagagatcttggaaccctgtttaggagtcagctattttcagactaaacatctttgtttcaggagctgatactgcagatttcagagggaagaaccctgatactcaccagcttcagctctggagcacaagagaaagagcagcagggggagaggaagaagcagcatcttcccagagaggctgcctgagcaaatgctggttttcctttccagtcttgggttttataactcccagaaggcaagagaggggcaaggctggtaaccacaggaactgcatggtcacgttttcttctctcactctgaattggctgtttctgatcagaagttcccctagaatcacccagtgtttttctagaaaggaacttgagccctgaactcccaagtgctggcttctcagatgtaccctcaactatggtgacttttctggagttgggggcaggaaatggagggaccatgtttttctttcccaattagggcagcttgtgaaaggcccactgaacgttcagtgcaaagacttttatggctatgttccatagtcagaaatgcatattgcagagtcccagtgcatgcacatatgtatgtgtgagtatgtaagcacaaattaaaggtttcaggaaacaatctttatcttaaccatgtgcagtgttttctgttagtttccattccactccactccactccattccactacacgtcaaaacttgagcaacaaccccatttaaatgataattccttgtaatttgaaaaacattgacctggatctctctcctcctctgaaccacatgtttttgacagaagagagatccaaggagggtagatgtgggaaaagaacagaccctaggacagaactttatgcaaagagcaattgggattggaattagcattttctgagagtctaggtgtatcatatattgtcacaactcttagatatattattactttcacggcaaccctatcaatatgtattaccattatgatcattatcatgtcatgatagtcaattttttaaatcagctatcatagcttatggttcagaaatagattttcctgatatcaaatcaaggtccctttctgctctagcactagagagaaatagaggaatagagtcctgccaatgtgcaggggaagtaaagatgtagaagggtgtttgctccagagaggttggggtttcctactgttgcattaagaatcaagctttccacaacaacctggggacacaccattactgtcactttacaattgtagaattgatactcagacccattaacatgacaaagatcacacaccttataatatcagaagtgggtttcaagcacatagcttttattttccctggacttacagaaagcagtccacatggtggactgtcatttctcttggagatttataaggcatttagttcaaagacggggatgagtagtgtataagtgcctttcccaaatcatctcactatgcccttggtctcaggttgggcttgtgaccagagtgatccactccttagtatatattggccaggtcctctgttgcttttaacttaatttcccaagttctacctacagctctaactctctctagaataagacatttaaacacatccgtaatgtcttttcaaatctggtcttcttaagtgtccttgtaccactttcttcactctctcgggggttgccagagaatattcagaatgcccagttaaatttgtatttcagatgaacaacaaatcattttttagttaagtatgtccaaatattgaatgggacacactaatactaaaaaattgttgtttatctaaaatttgaatttaactggaatcctgtattttttatttgccaaagttggcaactcttctctgggcatttcaccattaacagaacagaagagaatccggagctggagaactcttgtcttgtggtcttacatcagttagaccaaaaaatcagaggcttaaacaaatcaaagctgtttgctttcactgatataattagaaattgagaggcaggtagtctggggctagtaagacagctccacagcatcaagattcagatccaccaagacttaagttttgctccacctgcctggctgagggtgaggaaatggaataggtatagccccagtcaggggaccaatttcagaaacgaggactgcgctatctgctcacatttccttctttgctttgtcatatgtatacctgtgtattttaag

SEQ ID NO: 1241222 - DNA, 4001 bp, Homo sapiens
ggggctggaacccaggggacagcggctggagtatgccagcccgggggggtcaagccaggccagggctggggctggacctttgctgagtgggagagtagatctagcggatgtggtcctcctgattgcccgtggccctgcagctgtgaaatcagtgtgagtcaaagcacacctttgagtgcagggcatagcatgggacaaagcccagctgtggtgtggaaatggaaagaagctcggggaggaaaggaaaatgcatcatttagaggagagggaagggccccaaactgggctaggggtcagggttcctcaccagacagggccagttaattcggtcgaagcgctggtagtactgggtggcatagaggaagaggaaggcaagtgtgatgaagaactccagtagcgccgcggccatgtaggcagagatggaggccgtgaagcagatgaagatgatgagggtcagggcctgcaggaccgagcatgtggaacatgccaagaaggggacacaggcaggggccagggctttgccttcccctccttggaagctcccctaggctggcacctactacctgtccttggaggggaggaaggactctggcacatctccctatcccctggtgtcaggagccaccgttgcagggcatttgccggtcaagggcagtctccggcctcccactctgctcacccagcaaccccagcagtctggccaagccatatggctcccaggagcactatcccacagtaattcataggtacagtgtgaatgccagcccctggagttgtgcccacagagacccgactccacagggaccaagaggagccccctgcctcataatgctttccccacccccagatgcctgaaagccccctgacaaggaccagagcctttgattccatgccaagagagaaggcagatgctgcccagtggtttctgggagcccctttagctctgatgacctagggtggcatacgtgcagaggccttaactctacactgtggtcttgctaagtaaccaggggaagatcctttcctgagaagagatgtttctgggcagcagaccacagataaagtgcagttgcaggaagtctgccctttttgatagttagacttcttggacgtgctgagaagtggccatgttagaggctgtcattgcccctgtcccatccctatgtctcaagcttcctcaatgtcccaaaaagtcaccctgtctaactgcagtccttcctgctgcaactgaaacctgctgtaaatgtctccgggtggagaggcagcaagaaggcagagtaggagacgaagaaggggcagctgcgggcaggagaggtgtccagagggcttggggaaggaggctactgaagggtgagctgggggctggcataaggctggccaggagccgggggtcagggagatggaggcaccaggttgggaggcagctgttaccagctcggtttccagcaggatgcccttgtgggaggtgaggaaggccttgtccaccgcgaagccctggagctctgcaactaccccctcctcagggtgccggtcccggcgatctcgagcactgagcatcttcgtagggcccaccaacacagccccctactgccaaaagcccagcaagagaaacagaaatctggcaggatggggaaacagacaggagcaagaaggcacttcgagaaacctgaaagtgaagcaggaggcttgcccacagggccccgggagagaaggcaggcgctgggggccttgcccagatgggccctcacccagctgcccagagtgcctctgctgctgcctgcaccagccccctagagacccatggggaggggcagagaggaaggaggctctaatccctccccttgcttagagcccaacccagcctggaatagagaaggaaggggagaggaggaggtccgaaaagaaactgggaggagctgggatgtgagtagaggaacaggggcaggactgggagcccccagggacctaagcctgaagacatttgtgtcccccttctctaaccttaaccctcttgtttggccggtcctttctcccatttccttttagggagggtgtgagctggagcccagcccaggcagcacccccaggaccaagctgcagcagccaggactggaggacaaaggcggattgttgggggacaagggggcgctctgtgcctgctgcaatgcctcaatgggcctctgtctctccagcatgccgggagcgcggcctagcccccaccctggtgtttgggatgggccagggagacagagatgggagaggacgggagggtgcagcggaaactctggagggcggagagagctggcagggtggacagaggtgagggccaatggtggaaaggagaagggacaggctgggagaccgcgagatgttcaggcaccacggatgccaaatacagattaggccatttttaaataaagatatttatttggataaatctctatacattcaataacagcttcctcctcagaatcatccatgtcaaaagactagtaactacactagaatgcacccaaagtagatgctcactgagtgatgagtaaacaaacaaataaaaccaggggctctttcttctccagcaagggggaaatatctagaaagtgcctgtgctgggccagggtagcaggggatgggaaaagaggaagagacaggagtggtggcctccagaaatgggcagaactttgaaaacctttcctgagagaaaatgacaggacaccagcttccggcggccctaagcagcagctgctcttttcaaaatgtgcagaagtgcaggctttccccaaagccccccatcctgtcccgggatcctgctgctccagacagcacttcacaggggccaagcatctgggcatcctggcccttcatggcaagtggttgtacacctggctccaggtttcccaaaaagggaccagcctccagcaggtccggctagcccatcacacggggccgcacacacacacaagctaaggaaacacggtacagcctgcgctccaggcagtagcccttgtgggtgcccttctcgccatggcatggccgccggtagaagacagtctggttgtggtagagcagctccgagttgccccgggggtccatgtgggagcctgtctgtaggctgacgcagtgcgggcacaggcaacgggcgtggtacaggtcctgggggagccggttcaagtctctgtccaacctgtgggggcggcacttgtcaggccttggaaagatgggccggaaacagagagggtggggtggcatgggagtgccagaagaaggaaatggtccgtctggggccttggcctcttgtctcagttctgaacccacttgctgtgtaactttgaacaagtcacctccctcctttattaaattttccccactgtaaatgagggtagcaggtgacagagtgctttccaactggtcctgggaccgtgagggaggcaggggagggtgagcaggctcctgccttagcctccattgaccagcactgcttctatctgactcagcatgaggtttcttattgtaatgattacactttaggtgtttttgtttgttttttgattttttgtttttgtttttttgagacggagtacccaagctggagtgcagtggcacgatcttggctcaactgcaacctctacctcctgggttcgagcgattctcctgatgcccgccaccatacccagctaattttcatatttttagtagagatggggtttcatgatgttggccatggttggccaggctggtcttgaactcctgaccttaggtaatccacccacctcgacctcccaaagtgctgggattacaggcatgagccaccgggccggactttaggtggtgtttctattattattatagcattattgcaaaagtaaaaaccactctgacatccaagtattaaagagtataaagagtgaaagttaatagtctctccctaccagccccactccccagaagaagctatcctcaactatttcctgcacattcttccagacgctgtgcaagcttat

SEQ ID NO: 1241223 - DNA, 4001 bp, Homo sapiens
gaaaaagcctaccccaccactctaagaatccccatcatcccagaaaaaaggaatacccatcaagcagaatgacttaaagctacatctacagatggaatggaaccacacactttctttctttctttttttttgttttttttttgagacggagtctccgcccaggatggagtgcagtggcgccatcgcggctcactgcaacctctgcctcctgggttcaagtgattctcctccgcctcagcctcccgagtagctgggattacaggcgcccaccaccatgcccggctaatttttttgtatttttagtagagacggggtttcaccatgttggccaggctggtctcgaactcctgacctcgtgatcctcccgcctcggcctcccaaagtgctgggattacaggagtgagccaccgcgcccggccatggaaccacacattttcatcagaggcctactaaggttgagctagtctgtatcccaaattatcttaggtattgttcttccatcaaagcagggctgaagatgctcttcaaattactgctcctactgacaagcattctgaggtagcagttatttccgacacagttaatagcctacataagtattcctgattacaataagcagtcaggtcctaaaataattgtaaacataatcacactgcttagcaaaaaggaatggatttgtgatatgcttccactttcgagacttttttgcacaagacgctgctgctgtttaatcattctgcccctccgtatgtttcatagaaatccttgttactggcatgatgaaacctgacttaaaatctacgtaagagtgaacgcggtcattcaaattaaaagcaacattccagaaggcactggaatatggggaaaagagaagcaagtatgagataaatttttaatgaatgatttccagaaggctctcaaggcttttaattttgtgctaaagcaacagaaattcttatctctgtagaactatgtcacagggaacttacgactttttccttagagggaccagtaaggctgtgcttccaccctgcaatagtgatgatgatgtgtgtaacagaaataaatactgccccagaaaagcttaaggtttctgagcatctcaaaatcaaatgaaaactccctctactaaatcaagcaatcctgaatataagggtggcttggaaagctgcctgttgaaactccagcggtcaaagtatgatttgggggggaaacgcgcacatgcaatcaacaaagtaatcaattgaacttgcatcaaagttcaccaggaaacaacaatctggaaaaagagaaaaaaagtgatttgatttgaagagcaccgaacaagtgctgaaaagtagagttggaaattcaccctaagtaggttacattttggccacagttctgtggaaaccctaaaagaaagtcaatctgtattaacaaaaattcggaaaacttcattcacactacggccgtcccaccgcgctgtcgacatcctccccgggaatgcagggccgcgggccggcagaggtcggtgcgaacgcagcgcggaaccgcgggcgcccgcctggaccgcggccgccccatccagtaggggaggagtagcggtgcgcgcggcctgtgccgaggcaacgcgggcgcgtccacctggcgactgcgcgccccggctcctccagtacccgcggcccccagacccctcgccgcgcggcccgtgccagccgggccgcatccccgacgcgcaaagccccggcggccgtggcggcccggaccgcgggcccggggcgaaaagaggctgtgttgccgcctcgccctcctttccccagccccagctactcacgtgccaaatggcgaagaagatgagcgcggcagtgagcagcagcgccagcatgtagcagaaggccgcgaacgtgaacgccatggctggggaggaggagcggggagcggcgccgttgccagcggagaaaggcggcgcagggccctctgggtaaaaccattcacttcccccggccacagccgcgaccgccaccgctaccgccgcggcgccagccctctcagcgcgcctgcgcaccagcccagccgccccggcgccctctgatggccggagtctgcgttgcactgacattgtccgcacagttgttgattgatttttccttccttcttgcgtttattctttcaacaaatatttattgaatgaatgcctagtttgttacaggtaccgcgcttctcgcttcagatacaaagatgaataagatagtacctgcactgaaagaacttagtatagtgccggaaatgaacacctaaataaataattacgttattataaccccgtaaacggatgtgtgtgggatgctctgaaaggtcaaagaaggacagccagcccgccctggagcatttaggcaggattcctgctgtaggtgtttcctaagttggccttagatgatgataagttctccaggcaaaaagaaggtagaactggcagtccaaggaaacagttcagaatgaggaaacgcaacagagatggaaaaaagaaaagaaaaataaagcttcgtgtctcaggtgaaaccagcagcaattctgtattaatggaacctaagtgcaagacagtggtgagacttagaaatgaattagcaagggatcagatcatagagggccttataatgcttcattacggagctcagacttcttatcccataagcccaaattttttgctcaccacacacaactagaaagatttttttcattgcaacccagtggaatatcatacagacatcaagttatgaagaggtggaaatctagttatagaggcaaagaaatatagatatgaccaaaacaaaaatttcacaaaactgtactaatgatccataagtactttcccttctctcttttgctacttgtttttaatgctggtcttaacacacaaaattgattcaaaattgatttaactttccattacaaccatttttaaaagaaaaaaactctattaactgattgctgctgatggaagagaaaatcattgaaggcttttgagcaaaagaagaccatgtttagatttgcattaaagatcgttcacctagcaaattgcgtagaatagtttagaagcagggtctgtccagtgctgtgcaatagaaccttctgtgatggtgaaaattttcgatacctaaacattgcccaatacagtagccactagccacatgtggccattgggcacttgtaaattgtctagcatgactgaggaactgaactttaaatttcacatcactttaagtaaaatgtggctagtgtattggacagtacaacctgtaccaccaggattatgtggcacctgtgtgcaaattatcaagttacttttggccaggcacagcagctcatgcctgtaatcctaacactttgggaggccaagacaggaggatcacttgagctcaggaattcaagaccagcctggacaaggtaatgagatcttgagaggtgacagcgtgctggcagtcctcacagccctccctcactctcggcgcctcctctgcctgggctgccactttggcggcacttgaggagcccttcagcccaccgctgcactatgggagcccctttctgggctggccaaggccagagccagctccctcagcttgcagggaggtgtagaggaagaggcgcgaggggtaaccgggactgcgcagggtgcttgcgggccagctggagttccgggttggcgtgggattggcgggaccctcactcggagcagccggccgcccctgccggccccgggtgatgaggggcttagcacccgggccagtggctgcagagggtgtactgggtcccccagcagtgccagcccaccggcgctgcactcgatttctcaccgggccttagctgccttcccgcggggcagggctcgggacctgcagcccgccatgcctgagcctcccaccccctccatgggctcctgtgcagcccaagcctccccagcgagcgccaccccctgctccatggcgcccagtcccatcgaccacccaagggctgaggag

SEQ ID NO: 1241224 - DNA, 4001 bp, Homo sapiens
gtggggttaatttgcccaaacaacattctacaactcccgaaggacagaaaacagaaaagtgaatcccttcagaatacagcatttttatcttaattgaacctgattatttctgctccagatctgtccagtgagatttatcaagcagcggatgcatttttagaaagcactgttaatattctcaagttttacactgtcaacctaacaaagaatcagtttttactataaatgatgctaggaagagacaagctcttggcaacaagtaacaagataacataatacaacatgttaatttgtgaatttactgtcgatactaaattgagattaatgttattaaatgctatttttcaaacatgggaagttgtagttatccaaacctttttaaaacatatattaattttaaaaaccttttttttccaaggcagaggaatactttctggccatactgtccaactgagtaccttgcctgtgacaagcaccctcctctgtgccctttgtggtgacaggtaccttacattccatggaagagaaggaaggatgcaggcgcaatgcccatttcttagctctgaagcagtctagagagctgagaggttaaaatccttacccctaaacagcctcatacctatcatcaaacagccttaatccttcctcccattttccgctgagatgggggcggcatcggaatccggtgccaagaccgaccgcctttagttgcgaacactgacttttgttaagtagagcgggagaaatacagccatgagggatacttaaccctcattcctactttcaaggaaaacaaacggtagctcttaggaaagcgttgccttttacactggaaaatacaccaaaccacacacccatacccggacctctacacgtggtacaaactttttaaactctctagcgtgtagagtgagaccgcgagtgcttctgattataggggttacacctagaaacatagctagcgagtcaaacaaggtgggacagcgacgttcgcctccctctctctcggctacggcaacctgaagtcgggtctgggcggcttctcctccacccccaaacgcagcagagcccaggactggtgcgctcctcggtgaggctcaaggagtcctccttcctcgacctcctgctgccggcgctcagcgggcccggggtctggggctgtgggtgggcctggaggaggccttcttcctagtgctcttggagaacgtccccccactggaccccaggggccccctaccatgggagaaacaggtgagcaggagcagatcggctgcaggggttaacgcgggcgcgccacgcggcggctcaaccttcgcgccttcctcctcaggcggtagggctgaagcccaaggggctggatctgagtcccgcttgtacccgctggtgctcagcccctgcgaccgcctggacgcaccccagctcccccactcaccggctccctcgctgcccgcgggccccggcagcagcagcagacacacacctgcgaagagagaagcgtgagggctggctccagcctccacccagcggagcaaggggccggggtcgtgaggggcgcgcacccaccgaggccgagagccgggatccaggctgcggacatggtgactgataggctgctcacacctgggagagagggagaatgcgggcaaggccagggtgcgggaggccccgcgcgtcacctcctcagagccccgcacccttcggatccccgggcgcggcgcagaggagagaggacacagacgacccgctgctccaggccagcgcccctctaggtctgggaggcgcctcggcggcaaatcgagcgaagcccaggatcggtgtgcaaccccgcaccgcggggaggcgggggcgccaaaacgacgacagacaggctgggagcgacaaagaaacagggacagaggcgtcagggatccctcgcacccgcgcccgccgcccggggctccgcacctgctcgagatccacccggctgcgcccgagtgcggaaggcaaggcccccgcggccgctataaaggctgggccgtgcgcatgagcactgtgcggggggcgcgggaggaagcgcgggagccggtcccccggggcccggcggcgacttccagctccgccttcgccccctgccggccccggggtgaggccggcgcggaggcgcctcctccagcagcgcaggctcggccacctggacgcggcgccagtccctagaggggcacgaaggtccccgtgccggcgtctcaacgagtgtggagggccggcggccccgacggcggcagcagcggcctcgccagccctgctctgccgggaccagggctgctgaggcagcggcggccgctacccgccccacccagcgaggcctggagcttctgagagctgtcaggtccacgcggcctgagaaccgaacttctcaacttggtgctctcgtggaaagagttcctacttctgaaataaaaccaccctaggtttggtaaacgcatgccgcgtttttgttagaaaccctgtcaactgactgctagctcgttggaccttagggattcggccttgcgccttcgtttctgctggagtcctactttccccagtggttcaatttgtgctcctgcctagagccacgcgtgtgagacagccctgaccccagcagccggtacctttgcttctttctcacctcaggaagaatttatgcctgattgcctttcgaaattcccagacttggtgtcttgtgactgcacagaatctcagatttgataatgtgttctccttctccccgcaccatcctgctaacgttttacaaatggaaatggagaaggagcagaattcttgaggagtgttagtgacaggcgacctgcatggcagcggaagaaccagacccaggcccagacgctaacctttctggtacaatataaactttttcaaatagccttatttagttacaatttacatgccataaaatccatccgttttgagtgtacagttcaatgatgtttagtaaattttcagagctgtacaaccatcaccacaagccaatttcagaacaggttcatcctccccaaaatgatctcctcgccattgtcagtcagtctcttctcccactcctagtcctaggcaatcactaacctatttcctgtctctatagatttttcttagtggtcgtttcttatagatgggattatacattgtgcggcttccttcactgcacagaatgtttttgaggttcatccatgaggcattatagaacagtacttcctttctttttattgttgaaaagtattcccatgccattttatactgagaaacaaatacaccaccatcacctggaagtcaactagtgtagtagtcttaattacaactatcttcctgattggaatgacttagtatttgtatcaggcaactaaggagtgttgatttcattccctttactacctgaatgtcttctggagggaaagagaccaaataacatttgagggctgggaggtttttgatgtttattttcatggctgctttcaagatttactcccttccctggtatagagaattacccttttcttagaaatccagtaatctagccactgcccctgatattttccatgggagaaatttcaagcctcaggacaattaaagctgtcttttccattattgtttattgagtgtcctcaatcagggttggataacctcccctaattaggctggacaaattgtcatgatgctatataattaggaagagtctgtacgctggaaaaaacctgccacttcacagctcagcaggcaggtcccaaatggccaaaggggtagatgctattcagagcccccacagggcactggcagccctcctgtgatgtaatttcagtgagtgatttggcagagtcaaaactatgcagctatttccatgacagaccctgagtctgtaaccattaaaaaataaaggaaatacctcactgaatttcatggttgtttactgagattcatcttaattattttgttttgaaacatttaagagaagttactctgtctttactattttt

SEQ ID NO: 1241225 - DNA, 4001 bp, Homo sapiens
tcctcagaaggctgaggcaggagaatcactggaacctgggaggcagaggttgcagtgagctgggatcctgccactgcactccagcctgggtgacagagcagagactctgtctcaaaaaaaaaaaaaaaaaaaaaaaaagttagctccagccatacagacagtgagcggtccatcttggcagcttttgctgtggaggatggggcacagggacatgctctgtagagcatgctctgtaaagggcactatcttcttttttttttttttttttttttgagatatcgagtttcgctcttgttgcccaggctggagtgcagtggcgcgatctcagctcactgcaacctcccccttccagtttcaagcgattctcctgcctcagcctcccaagcagccatgagaaccaccctgttacagaagtctatgatctgctttaagttaaattttgtgtatcttgtgagatgaggatcatagggtggaacagctgcccttagatcagggtgtccaatcttttggcttccccaggccacagtggaagaattgtcttgggtcacatataaaaaaacactaatattaatgatagctgatgagctaaaaaaaaaaaaaaaatcacaaaaaaaaaatctcataatgggccaagcatggtgattcatgcctgtaatcccagcactttgggaggaaggggcaggtggatcacgagatcaggagttcgagaccagcctggccaatatggtgaaaccccgtctctactaaaaatacaaaaattagccaggcatggtggcacaagcctgtaatcccagaggttgcagtgagctgagatcgtgccattgtactccatcctgggcaacaagagcgaaactccatctcagggaaaaaaaaaaaagtgaaaagactacaaaatggaagaaaatatttgcaagtcatttatcagataagggacttatacagaataaacaaaataatggccaggcagggttgcttatgccggtaatcccagcactttgggaggctgaggcaggtggattgcttgagcccagaagttccagaccagcctgggcaacatagtgagacctcgtctctacaaaaaaatacaaaaatcagccgagtggtggcgcattcctgcagtcccagctatttgggaggcagaggcaggaggatcaattcagccagggaggttgaggctacagtgagccgtgatcgtgccactgcactgcagcctgggcacagcggaagaccctgtctcaaaaaataaaaataactcttaccacagtattcaagagacaaactgctcaattaaaaaccgggcaaagggtctgaataggcatttctctaaagaagatatacaaatgaccaataaacatatgaaaggatattcaacatcattaatcattagggaaatacaagtcaaaacctggagatcccactttacttacacccactagaatgtctataaacaaaaagacaatgacaagtactgtccaggatctggagaaactggaactctcatttataaataaccccgggaaggcctgttttcccatgagtagaacagactctgaacgcccctcccacttttgaccctaatggaccctgaaggaccacacgcattccggcgtgccctggggttcctctaggaggggaggggagaagcgtcgcgagacctgagaaattgtctttgggcaagtcgtgctagggctctcacggctctcatcgtgcctccgcggcccggtttccggccactagtagcctggagaagggcttacccaaggcacaggccatggcagcgcccaccaggcctccacccgacaccaccacgtcatacacggtgtctgttgaggcgccggaccacctgcgccaggacaccagcgggccgctgtggggagctgcacgcacagccccgcatcggctgacaagccgggccgccatggtgcagacctgcgccgtcgcactcagaactcccgcaggcccacctacgtagtgcgtccggagcagagcactccaatcccgtcccgcttccgcggcgtcctcagaaccggaaataaaatgcgcggagaaaataggccaatcggaaaacgaaccttgcctcctcgggcgggatggatcggaggctgccctggaagccaaccagacgccaaagctagaaaggggtggaccctggccccgcatagctctcgctgccaccgctgctgccactatcgctgtcactgtcgctgctgcctctgtccagctgaaatgaccgtggggaggcctgagggagcccccggaggcgcggaggggagccgtcaggtgaggagagaaaagagactgcccccgggaaaggaatcccggagaggaaactgttgggcgttgccttggagacagacagcaggggcgtgtcacggaggggcgtgggattaaaatgagcgtttagggaccaggaggcggactctgacttacagacctgaacctctcggactttatacgaggctcttgataggcaatgtcactcagttttcgcttatcctcttagtactctatgaccagtagtacaattgtcgtctcatttttgtagaagagaaaactgaggcacaaagagattaagaaaattgctccccaaatttggccgggcgtggtggttcacgcctgtaatcctagcactttgggaggccgaggcgggtggatcacctgaggtcaggagttcgagaccagcctggccaacatggtgaaactccgtctaaaaatttaaaaaaaaaaaaaaaattggccaggcgcgctggctcacgcctgtaatcccagcactttgggaggccaaggaaagcggatcatgaggtcaagagatcgagaccaggctggtttccatggcaaaaccccgtctctactaaaaatacaaaaattggccgggtgcggtggcttactcctgtaatgcagcactttgggacctgaggtcaggagttcaagaccagcctgaccaacatggagaaaccctgtctctactaaaaaaaatacaaaattagctggacgtggtggcacatgcctgtaatcccagctactcgggaggctgaggcaagagaattgcttgaacctgggaggtggaggttgcagtgagccgagattgtgccattgcactccagcctgggcaacaagagcaaaactctctcaaaaacaaaaacaaacaaacaaaaaaatacaaaaaattatctgggcatggtggtgcgcgcctgtagtcctagctactcgggaggctgaggcaggagaatcacttgaacccgggaggtggaggttgcagtgagccaagattgcaccactgcactctagcctggcgacagagcgagactccgtctcaaaaaaaaaaaaaaattagccaggtgtggtggcgcgtgcctccagtgatccaccagccaaggcctcccaaagtgctgggattacaggcgtgagccagtgcacctggtggaccccaaactattaaaggcaaaaagtagattggcagttgcttagggctggtggggtggggtgtggagggttaggggaaatagggagtgaccactaaagcgtgtggcatttcttttaagggcgatgaaggtgttctaaaattgtgatggtagttgcacaactctgtgtatatactaaaaccactgaattgtacactttaaatgagtgaatatattgtatagaaattatgtcttaataaagttgtctttaaaagaaaagaaaaaacgtgcccaagatcacacactgtagcagagccagggctagggtgcatacatatctctgactcttaccctggattttagtaagcctggctcctcatcaatcaagtgtcaattcaaaattcctccacaatgaaaaataaaaatcagcccaggactgagaaagtataactcagactgtcataggcatagataatgccaacggcaagagcatcaggaaacagtgtttctctcagggccataacataggtgcaaaattactaacaccccttcttccaaaaggcttactgatcaattacttacccaccctactttattctt

SEQ ID NO: 1241226 - DNA, 4001 bp, Homo sapiens
gcgatctcagctcactgcaacctcccccttccagtttcaagcgattctcctgcctcagcctcccaagcagccatgagaaccaccctgttacagaagtctatgatctgctttaagttaaattttgtgtatcttgtgagatgaggatcatagggtggaacagctgcccttagatcagggtgtccaatcttttggcttccccaggccacagtggaagaattgtcttgggtcacatataaaaaaacactaatattaatgatagctgatgagctaaaaaaaaaaaaaaaatcacaaaaaaaaaatctcataatgggccaagcatggtgattcatgcctgtaatcccagcactttgggaggaaggggcaggtggatcacgagatcaggagttcgagaccagcctggccaatatggtgaaaccccgtctctactaaaaatacaaaaattagccaggcatggtggcacaagcctgtaatcccagaggttgcagtgagctgagatcgtgccattgtactccatcctgggcaacaagagcgaaactccatctcagggaaaaaaaaaaaagtgaaaagactacaaaatggaagaaaatatttgcaagtcatttatcagataagggacttatacagaataaacaaaataatggccaggcagggttgcttatgccggtaatcccagcactttgggaggctgaggcaggtggattgcttgagcccagaagttccagaccagcctgggcaacatagtgagacctcgtctctacaaaaaaatacaaaaatcagccgagtggtggcgcattcctgcagtcccagctatttgggaggcagaggcaggaggatcaattcagccagggaggttgaggctacagtgagccgtgatcgtgccactgcactgcagcctgggcacagcggaagaccctgtctcaaaaaataaaaataactcttaccacagtattcaagagacaaactgctcaattaaaaaccgggcaaagggtctgaataggcatttctctaaagaagatatacaaatgaccaataaacatatgaaaggatattcaacatcattaatcattagggaaatacaagtcaaaacctggagatcccactttacttacacccactagaatgtctataaacaaaaagacaatgacaagtactgtccaggatctggagaaactggaactctcatttataaataaccccgggaaggcctgttttcccatgagtagaacagactctgaacgcccctcccacttttgaccctaatggaccctgaaggaccacacgcattccggcgtgccctggggttcctctaggaggggaggggagaagcgtcgcgagacctgagaaattgtctttgggcaagtcgtgctagggctctcacggctctcatcgtgcctccgcggcccggtttccggccactagtagcctggagaagggcttacccaaggcacaggccatggcagcgcccaccaggcctccacccgacaccaccacgtcatacacggtgtctgttgaggcgccggaccacctgcgccaggacaccagcgggccgctgtggggagctgcacgcacagccccgcatcggctgacaagccgggccgccatggtgcagacctgcgccgtcgcactcagaactcccgcaggcccacctacgtagtgcgtccggagcagagcactccaatcccgtcccgcttccgcggcgtcctcagaaccggaaataaaatgcgcggagaaaataggccaatcggaaaacgaaccttgcctcctcgggcgggatggatcggaggctgccctggaagccaaccagacgccaaagctagaaaggggtggaccctggccccgcatagctctcgctgccaccgctgctgccactatcgctgtcactgtcgctgctgcctctgtccagctgaaatgaccgtggggaggcctgagggagcccccggaggcgcggaggggagccgtcaggtgaggagagaaaagagactgcccccgggaaaggaatcccggagaggaaactgttgggcgttgccttggagacagacagcaggggcgtgtcacggaggggcgtgggattaaaatgagcgtttagggaccaggaggcggactctgacttacagacctgaacctctcggactttatacgaggctcttgataggcaatgtcactcagttttcgcttatcctcttagtactctatgaccagtagtacaattgtcgtctcatttttgtagaagagaaaactgaggcacaaagagattaagaaaattgctccccaaatttggccgggcgtggtggttcacgcctgtaatcctagcactttgggaggccgaggcgggtggatcacctgaggtcaggagttcgagaccagcctggccaacatggtgaaactccgtctaaaaatttaaaaaaaaaaaaaaaattggccaggcgcgctggctcacgcctgtaatcccagcactttgggaggccaaggaaagcggatcatgaggtcaagagatcgagaccaggctggtttccatggcaaaaccccgtctctactaaaaatacaaaaattggccgggtgcggtggcttactcctgtaatgcagcactttgggacctgaggtcaggagttcaagaccagcctgaccaacatggagaaaccctgtctctactaaaaaaaatacaaaattagctggacgtggtggcacatgcctgtaatcccagctactcgggaggctgaggcaagagaattgcttgaacctgggaggtggaggttgcagtgagccgagattgtgccattgcactccagcctgggcaacaagagcaaaactctctcaaaaacaaaaacaaacaaacaaaaaaatacaaaaaattatctgggcatggtggtgcgcgcctgtagtcctagctactcgggaggctgaggcaggagaatcacttgaacccgggaggtggaggttgcagtgagccaagattgcaccactgcactctagcctggcgacagagcgagactccgtctcaaaaaaaaaaaaaaattagccaggtgtggtggcgcgtgcctccagtgatccaccagccaaggcctcccaaagtgctgggattacaggcgtgagccagtgcacctggtggaccccaaactattaaaggcaaaaagtagattggcagttgcttagggctggtggggtggggtgtggagggttaggggaaatagggagtgaccactaaagcgtgtggcatttcttttaagggcgatgaaggtgttctaaaattgtgatggtagttgcacaactctgtgtatatactaaaaccactgaattgtacactttaaatgagtgaatatattgtatagaaattatgtcttaataaagttgtctttaaaagaaaagaaaaaacgtgcccaagatcacacactgtagcagagccagggctagggtgcatacatatctctgactcttaccctggattttagtaagcctggctcctcatcaatcaagtgtcaattcaaaattcctccacaatgaaaaataaaaatcagcccaggactgagaaagtataactcagactgtcataggcatagataatgccaacggcaagagcatcaggaaacagtgtttctctcagggccataacataggtgcaaaattactaacaccccttcttccaaaaggcttactgatcaattacttacccaccctactttattcttctcaccttttgaataagtattgccgttgggcggggcccaatggctcacgcctgtaatcccagcactttgggaggccaaggcaggcggatcatttgagctcaggagttggagaccagcctgggaagcatggtgaaaccccatctgtacaaaaaatacaaaaactagccaggtgtgatggtgtgtgctgtagtcccagctactcgggaggctgaggtgggaggatcatcacctgagctcaggaggttcaggctgcagtgaggcatgattgcaccactgcactccagaacctgggtgacagagcaagaacctgtctcaaaa

SEQ ID NO: 1241227 - DNA, 4001 bp, Homo sapiens
aaagatggacaataacaagtgttggcaaggatgtggagaaattgaaaatcatatcttgctggtgggaatgtaaaatgatgcagccactttggaaaacatctggcacatcctaaaaagttgaagagttaccatatgacctagcaattccacgtctaggtatattccctacctgagagaaatgaaaacatacttccacacaaagcgtgtacataaatgttcatagcagcattattcataatagtcaaaaattgaaacaacccaaatgttcatcaattgataaaatatatccaaacaatggaattatatccatcaaaaggaatgaagtattgatatatgttacaatgtgaatgaaccttaaaaacattctaagtggaagaatccagtcacaaaaaacccacgttgtattagtgtgttaatatgaaatgtgcagaataagcaaatttacgggtagaagtagattagtggtttaccaggccagcattaagaggcaggaagaaatgggaagtgactactattagttatgatgcttttttgggggcaatgaaaatgttctaaaattgtggtgatggctccataactaagaatatactaatatacgaatatattagtatactaatatcgaatttgctaaaaacaacaatttttttttttttttttttttttggagagacagaggtcttgctggtttggaactcctgacctaaagcgatcctcctgtcttggcttcccctaacactgggattacaggtgtgagccatcgtgcttggcccagatacttcaaatgggtgaatcttttggagattcctaaaatccacatttgatgaatgtggatttttcaaaactgtgtaaaatatccattacctttctaagatcacttctttcctttagtctgcttaaatggaaaagctggtaatttcatctgcgccaacattcatacaaaataaaaatatagtctgtatttaaaagcagcttttgttcatatgctttaattatttcatttactaacacatcaaggcttgctgaagcaaaataactggcccgtaatcaaaaagcaaataagagtcatctggatttcaactctggttgtcttaagccagcctcagcctgcatttcatgacatccttagggaactcagtgtggatatggatgaaaccatataaacacggaagctgttttcaacgtgctttagaaattataacacagcaatcattctggctacaatgtggcaggcaccgtactcaacactttattcacaaggtgttattagttcatcacaactctaagtattaagctaattcacaaactagaaagatgaaacagaaagataccaggaattcgtgcagttaaatggaatacatctagtcccaatgatccacagtatcgtcaaaacatagctaagttgggggcgaggaagcaagcttagtaatcatccaaacttggcttaaagtgtggttctgactgaattctctgagcttcaatttacttaactgtgaatcaagggtagtaacaatgaccgcgttcgacgatgggaaagacgccacgctcacaagcagacagatcctagtacacctgaaatccaaccgggagtgggggacagcggcggggaagtgggggtgtggaaaagactggtggaagagcttttaggaaagctctcaccccgtcgctagctccttcctagcccgagtgccagcccttaacttcacattttacagattccctcccaggtcttgatcctgccaaggaggagggtcccaccccttgcggaagatcctcctcactccactcaccaacatggggactccatagccgagagtcttgttcttgcgaaaagcacgcatcaccgcgggtgcaaacatgagtgaactcttccatcggctcagaactccaagcgggcctagcgcagactcccaaatctcagcagctcacgctctcaccaagacgagtacgtccttaactcacttccttttccttggttatttggtgctcggtccttagtgaatggtttccgctaggcaaaagcaatcgagccatcgtaacatacttgtgcgtccgcccagaaatgtgggcgtcagcgtttttggttccgtaacgtcggcgtgcaattgggatttagagatttgaatcggtttacgatcaccaccaaattgatctggaaaccagtacttcccacgttctgggtcctaactaacgtctgcttagaacactcccttaggcacatagccactcgataaaatcagctaaggaaaaaagtattttgaggccgggcgcggtggcctgggtgggtggcctgtaatcccagcactttgggaggccgaggccggtagatcacctgaggtcaggagttctagatcagcctggtcaacatggtaaaaccccgtctctattaaaaaaaaaaaatacaaaaattagccgggcgtggtggcaggcgcctgtaatcccagctactggggggccgaggcaggagaatcgcttgaacccgggaggcggaggttgcaatgagcagagatcgcgccatcgcactccagcctggggaacaagagcgagacttcgtctcaaaaagaaaaaagaaaaaaaagtattttgaagctggtactccagtctttatggctatttgtgggatgaggaatttgccagtttaatggagacttttaaaaataaatcgcttttgaaagattaggttgaaatgtaatcagtgtagtgtctcatcagtcattactgaacttttaatgctaatgattttactgtgagataacctgtaatctttagtcatttatgaatgtctatttaccaatgattcagcaaccatacaggccacctttcagcgtgtctttgaaagggttctaggaacacagataaaaatatatgatccttaccttaaagacactggcgatttcatgggcacagaaacaaacatgtgtgaagtactgggatagcttaggaagccgatcccccacgtgtcccatttaccagagtgaatcagagtgcaggtgatgcggaatattatcttccatgctattcctgaaatatttccatctgtccctgcctctctgttaccactgaaatgttcctttttttaattccttatcatcttttcacctattaaagtagcctcttaagtggtctccagaagagaagctccagatctactgcaggctactccagtgaaacttatccttttggctaagatcaagtgtagtatctgttcttaacagtttaatatttgacacattctctatccaaggaaaatatgttaaatgggtttttgaagcaaggagatggaataggagtttgctccaccactctacacatcaacctgtatttcaatacctccagaaacccaggaacggtgcatctctcccatcttatttacttccttttgatatttcaaaattcatgcagaccaggcatggtggctcatgcctgtaatacctgcagtttgggaggctgaggcaggaggatcatttgagcccaggagttcgagaccagcctgagcaacaaagcaagaccccatctttacaaataataataataataataaattagccaggcatggtggggtctcagctacttgggaagctgaggtgggaagatcacttgagcccaggaggtccaggctacagtgagccgtgatcatgccactgcactgcagcctgggtgacacagctagaccctgtttcaaaaataaataaataaatctcacgtggcatccaggttagttaagcgtatcacatctcctactttccctaagatcctagaagccaaaggcgctgctctaaaactctagcgttttcctacatcttcactacataaaacatcagcctactggatactactccatcaaaacccggcacctaagtagtagctaataatgggttaaatcgtatacatatattcaaaataatgctagagtcgataatcttacacttttcagataaggcatctatccaatttaaggcactctatgtctttagtatcttgtttgttcaatcactcaaataagc

SEQ ID NO: 1241228 - DNA, 4001 bp, Homo sapiens
agctgcagaccttcacggtgagtgttacagttgttaaagatggtgtgtgtccggagtttgttccttcagatgttcaaatgtgtccggagtttcttccttctggtgggttcgtggtgtcgctggcttcaggagtgaagctgcagaccttgccatgagtgttacagctcttaaaggcggcacggacccaaatagtgagcagcagcaagatttattgcgaagagcgaaagaacaaagcttccacagtgcggaaggggaccccagcgggttgcccaacttctatttattgactattgtttcaggtactatgttgagaggtactttatctttctttgttcaatgttttatttccacaacatcacttcaagacagcaattttaagtccccattacagagataaggaaaccaagactcagagttgaactatgttgcccatgataacagcatcatcaacagctaagacagttcaaagatgtgtatgattcttcaaacctcacagaagactaagagaagataataaaatcattaaaataggagatgtactcattcttcacattctgacgtgtagtcatttaaagaggcaaagaaatggttgtacttctcacagcaaattgtgaagtgtggcatggcagtactaatagaacataaaaaccatttagctaaacttatattacctcacagctacacatctaatcttttaagggtgatgtcactagatacattcactcccatatagtaacaatgtcactccctgagtcactaagtcagacctttcacagcagttctcggtaaattttcatcagctttcacgatgtttagaaaataatctgcacacatattaccaagcacgaataagtgtttccgttttatttaacacttaagcagaacatttttgactatacatctatataatgcacagtactaaaaaagtgcaaaatattcatcataaacatgaggaaagtgaataccacaatggttgcatcaactcaactaggcaattttgctcgttaacaaaaacacagctttttctgaaagttttttggacgttaacagctgttcaacatcatcttccatctaattccttctgaactgcttcaggttgcctagcacatatgcagctggtgttaagaaggtcgtaaaaaacaccacaagtccaacagccatttcctggaagagaagatgacacgcgctgctgagtatggcttcctaggccagtgacttgctgcctaacaaaaagtgcttaaaaaaaacattttgagcacctagaccgttgtcctagaaacaggcgcctagtgaaatctaaaatgctgaaaatcgattcatggatcacctgatttttttttttaattcatttttcatctaaggggtctccggttccaaccttcgcactctggaacttcgatgtggcccaggatttccaccattttatcgaaaacgctagatcttcgcagtgccgaggacgtccgaggatggtaaatcattcctccgcgaaaccacagccccgcccccgagccaggtgccggtaaagggtaacaacgaaggaggcccaatccccgcgcgttcctcagggtcccgggctttccgcccctgtgcccgacgacggcatcctcaccgcgaccctctcccaggaacctcccccaaaggcgaccaagccacaggaacctcccccaacggcgaccaagccacaagagcctcccacgcgaggcctgcacgccgtgtcctcccttctccccacccgtcggggcgccccgccagggccacgcgcttcccgcccaccatgatggctgggcctcaactcaccgcggcagacaggggccgctggcgcgggggccccgagtgggcgaagcggggagcgggctgcaggccgagcagggccaagcggcggtagtggcggcgggcaggacagcgcccacgcaggagaggcatatcgcgtcaggtgagacaaagccaggcgtggacagcacaggtgaggtgaggccaagtaacgcaagctccagtgctcgtgaggcagctggtttgcgcaggcgccccagccacgagggggcgctctgccctcgccccctaccccaccccttctgcccagcacctcctgctctgccccgcctcttccgctcaccactcctttctctgtactgccctttccactcagcagtccgtgctttgccccaccccctctgcttagcaccacttgctctgcaccaccccttccacccagcacacccctgctctgctccactctcttcagttcagtaccccctgctctgccccgccttttccactcagggctccctgcaacctcccagccctcattcacctcactttccacccacgtgtcctatcctctcctaaactctcctgccaccctcccctgagccccaaccccacctcacactaagtatctcttttctgcagggtaaggtgagggacttggcacccctactcctttcctttgtcttcctctctacctatactttatatacctcttaacatgccctggcattggcagagtttatagcacactgtttctaatgcaaattaaatcttccataaaatgtctataggttaattcttaacactgaaaaccaagaacaagtttctatagtcggctgatgatataaaaaatattcatggcagggtcaaatagagtgtttggacccagtagaaacagtgatgtaattatctgtcactacggctaattttcttatttttttgtagagacaggtctcactgtgtcacccaggctgatctcaaactcctgggctcaagccatcctcttgtctcagcctcccaaagtactgggattacaggcatgaggcactgtgcccagaccctcttgagggaaaagtaaatatactgtgatttttaaatttagtactgtaataaaactttatccactacaatgatcctgtgtcttcacattatttcttttgggggcctattgcacgagtaacactctagggtttctctggattcctctgttcctgcagcctggtatcttcctctttcttagatttcttttcgttttgctgtagtacatccttaagctgttctttcaggaagggtttgtaggtgataaagttcctcagtccttggaaatcaaaatatatatatattggtctccatttaaatgctaatttgaatggttatagaactctgggctcaaaatcattgtccttcagagattttcaaaaggcattgttcctttcttttccagcatctagtgagccgataaatataatgccaatatagttgtcattcctttgagtaccctcttttttccttttgggaatcttttaggcattcctttttgtctttggaattgtgacgttcctccaggatactgttagatatgggtatttttccattcatatggattagcagtgggtaagacctttctatctgaagtcatggttctttagccataggagcactattcctatttatttgcttctctgttttctttgttctcaacctaaaattcttattgacggacactggcccttcttagcgggtcacctctgtctttcaacctttttctcactcatcaacgttttgtcccttgttctacattttgcaggatttccttgactttttcttctagcccatgattttttattttagaattatagttttaaaacatactattttttgcttttacagtcacctgttagtattttatagatattatcactttagatttctttcagaatattaatctgaacttttaaaaagttatctctattccatgaactgtgtttctttagcgtacattctatttatttattttgaacttgccagttttattcaagtatcttatgatccttggttgtcatttcatgcttatgaatatgaagaagcaggtcagttacttttgttcctttctgttactgtctcagtctgttcaggctgttacaatacaacagactggatggcttataaatgacggaaatgtatttcttacagttctggatgctagaaattcaaaatcaatgtgctggtagatt

SEQ ID NO: 1241229 - DNA, 4001 bp, Homo sapiens
ctccttccctagaccctggggcctcacggacctcctgcttcctcagcttcaccagagttctgagcaggggagggcagaggacctgagcctcccactcctgctcagaagccctgtgctgctggcctaggtatgcgtggatggggctggagagggctgaaggattggggtggggatgttcctggcagtcttggctcctaggccatcgattgatctacactttctgccgcctcagcaccttctgctatttcccgactggtgttgtgccagcgctgcactcagtcttggcacgagggagctaaactagggcaagggggtggggcagggggtggagaggcctctggagttctgaagaggatgggtctcagaagtggagtctgcagtgggcaggagacaggttggaaagtcccctgctgggctatccctatccactccctacccccattccccttctggctagctgatggaaaaggagtggtggtgggctgggaggcaggaccagggctctgctgaaagctccttcaggctcctggcaggagctctaactgtgacaagcctcacatccctccccacctcccctgttttcacacttcttggcagcactggcaccgtctcttagcgacaggatttttggggagtcgtggctccctccatgctgcccgtgggatgcacgcatgccaccttcccccagcagtggtaccaagcctcgggctgaagcaggcaggggtatgccggccagagttcatggccggtcagtccatctatctgtgtctgtacagatctcagggtgaggctgtctgatcccatgtcatgcttccccgagtgagtgtgcattggtgtgtctgagtgccccaccctccgtgtctgtccccccatgtcgtgtgtccgtttccaggagggtgtgacagttcctgtacctccctcagaagtgggacctttctctggctgggtatctacctccccacagtgtgtgcctttctggatatgtgagggagggtctgggctgggggaggggggtctctgccttccagccacaagtctcccagttcttgggggtccccgagataggcaggggcttgtggtggtgaagggattgggcagggctgggatctctctgcgggctccaggagatgttgttatggagactgggccaagctgggctgggctggggctgggctggggaggaagggtgggctcacctgggctctcggtcgggggctcctctctccggctctctggccctggccctgactcccttgctgctccagccgctggcgccggctccagctccggctctgctgctatttatggggcctggatggggaggggtgggggggggcgcagcaccagctccccccgcgtggatggattgggagggagaagagggaaggggcagggccacagcctgggagggagccacagaaccgggggaggagggcaggctgggggtggcttagaggcaggacccccacagacacagtgacacacatcttccccttcacactacacccacacccagaatcgcagagatgcgcacattgcagtggcatgcacatacacattcaaacagagaaatgatggcgacacatgcacccacgactcacaggctcacacatatcttgacacacacaggcgccagtacataaactcactgtgacaccacgacagttacagcccccggcggatacacattgggaaacataccccttctcacatcactttcaacattgttacactagctaaggatatctgcagtcacatatacaggaacactgggctgtccttgtcacacatgtactcactcaaactaacccggaatacagcaggatgtgatcttcccgtgctccttaaaagccatcacataccttgctgaacgtcatagctttgagaatgatgtccagttccctagccaccattttataaggagacacaggaaatggacataattgcttaaggacacccaacctcatatcctggtcacatgagggcatctgctgaaggactgactcccaaggcttcttcccggtgccacaatgtacccaacaccccccaagattcaacccatatggccttacccttgtgggaggggctgtgccatgcacagatcttaaggaaacaaaacaagtaattcctggtgaaatcagtaagtaagggaagtaagcagttgcctggggagctgcaaaccacacatgaagacatttgggcacattgtggtctgcgatgagtacgcaagagcatttaccttcgccctccatccccttaagctgctcatgtattaatatagcagccatttattgagcatctcctgggtgtcaggcactgtgccaggtgctggggctacacaggtgattaagacacagcctctgcccctgggggaggcagatgtatatggaacagaaagacaggcagacagagagaggataagccaatacgcatacgcaatgaagcgtgacaggtgcaatgttatggacctgctcaggatgcagtgggagcacattaaagcagggtgcaatatggatgagtggggaaggcatcaggaaggacttcacagaggaaggggcttttgagtgggatcttgaatgccaagatagtatttgctagaacaccatgggagacagctactttagttgctgacctcatgccacagagacttctgttcacctgcaagccactctgctattgagacttctgactagtgagggtgcccccaggacgacacaacatcatgtaattcccccattagtgtgcatgcatgcacacacacacacacacacacactgctcccgtgtccctctggtacactggggcttccaatcccattacacccccaaaagctggacagactttgtgttggtttctgtccttttggttctttctccaggaagctcagccctgaccctgggcataacacccatcttggcttggggacttatcagtccccttccctcggcagttctctgtttttttctcctgctcctctcagaaccccaagtctatccctgtggaatgtttctcatttttctccactgtggccaagctctgagggtttgtgggaagagagcagattgtggaggcagtgaatggggaagatagcagagactcgaggcaggcgatgattttgtttttttattctatacaagaggggagagagtccctggggatagagggacagagatccaccctcctgggggaggagataagcccccacccagaagctctctgcagagagaggtatcgaggcaggcactgacagcctccgtctctccaggtggctccctctgttctagtccctgcctccagctcccccatgcctggtcctgccgtcttgcccctgtaggacaggggctggcagggggccctggggactgggggtggataggggtctgagtccttgcgaggcacatgtcgagggctgaggagggtgttgtggcagttgtcagtctgttcctggctcactggttcctgctggggacaaatccagggagccctgtttcctgggcagggacagccagccacctggtgttggggcttcggggggtgtcatgttggacagataggtgggaaggggggacctgccctctcaccaccagcacctgtggggtcaggaggccgtcttctatcaggttccagcttgtcacaggactgtgcccgccgtgtcctcttgggcttcaggggggcagtccgccggcctggatcagggggccctgaaataacaatcaaggcaggcctaacacaggagtggggctcatgctgggatgctcatccaggctgtgactcctggttgtcactcattccatgctctggaagaggacctgatgtggacagcaaagtcctagaggtgccctgagccccccactcagccagggtggcagaccttggacttcgggctcctcttggtcttgctgtgagctcagcctcagccggggtttgttgactcctggagctgcatctccagcctcagcctcctccctgacccctggctcctggggaggctggcggcccct

SEQ ID NO: 1241230 - DNA, 4001 bp, Homo sapiens
gtgctgcctgcccactggactctcagtcctccgggctatcatgaggcctttgggagcaaccccactgcctctgggtcaatctcaggaccctctgggacaccatctccagggtacccaagcggcctcgagaaggcgccgcagagtccacacatttccctgcaaggctttcactgctcccacccagcctccctctttcccaagcttaacccaggttagttaaggagaaacctgagctgctctcacctccacccactgctcatcagagtagagcttgagcagcacgcaggggtggggtttggtgagtgtgtcccggtccaggaggccatggcaggacacccgcagctccacccgagaggcccccagcgtcatggttgggggctcaggcacccatcccatctcagggtccgacatgtcactgtggggacagagcaggtggcctggactctggaaagggaacacctgccagcagaggggtctatcctctagggtccctgggccccaccccttaacctccttccctagaccctggggcctcacggacctcctgcttcctcagcttcaccagagttctgagcaggggagggcagaggacctgagcctcccactcctgctcagaagccctgtgctgctggcctaggtatgcgtggatggggctggagagggctgaaggattggggtggggatgttcctggcagtcttggctcctaggccatcgattgatctacactttctgccgcctcagcaccttctgctatttcccgactggtgttgtgccagcgctgcactcagtcttggcacgagggagctaaactagggcaagggggtggggcagggggtggagaggcctctggagttctgaagaggatgggtctcagaagtggagtctgcagtgggcaggagacaggttggaaagtcccctgctgggctatccctatccactccctacccccattccccttctggctagctgatggaaaaggagtggtggtgggctgggaggcaggaccagggctctgctgaaagctccttcaggctcctggcaggagctctaactgtgacaagcctcacatccctccccacctcccctgttttcacacttcttggcagcactggcaccgtctcttagcgacaggatttttggggagtcgtggctccctccatgctgcccgtgggatgcacgcatgccaccttcccccagcagtggtaccaagcctcgggctgaagcaggcaggggtatgccggccagagttcatggccggtcagtccatctatctgtgtctgtacagatctcagggtgaggctgtctgatcccatgtcatgcttccccgagtgagtgtgcattggtgtgtctgagtgccccaccctccgtgtctgtccccccatgtcgtgtgtccgtttccaggagggtgtgacagttcctgtacctccctcagaagtgggacctttctctggctgggtatctacctccccacagtgtgtgcctttctggatatgtgagggagggtctgggctgggggaggggggtctctgccttccagccacaagtctcccagttcttgggggtccccgagataggcaggggcttgtggtggtgaagggattgggcagggctgggatctctctgcgggctccaggagatgttgttatggagactgggccaagctgggctgggctggggctgggctggggaggaagggtgggctcacctgggctctcggtcgggggctcctctctccggctctctggccctggccctgactcccttgctgctccagccgctggcgccggctccagctccggctctgctgctatttatggggcctggatggggaggggtgggggggggcgcagcaccagctccccccgcgtggatggattgggagggagaagagggaaggggcagggccacagcctgggagggagccacagaaccgggggaggagggcaggctgggggtggcttagaggcaggacccccacagacacagtgacacacatcttccccttcacactacacccacacccagaatcgcagagatgcgcacattgcagtggcatgcacatacacattcaaacagagaaatgatggcgacacatgcacccacgactcacaggctcacacatatcttgacacacacaggcgccagtacataaactcactgtgacaccacgacagttacagcccccggcggatacacattgggaaacataccccttctcacatcactttcaacattgttacactagctaaggatatctgcagtcacatatacaggaacactgggctgtccttgtcacacatgtactcactcaaactaacccggaatacagcaggatgtgatcttcccgtgctccttaaaagccatcacataccttgctgaacgtcatagctttgagaatgatgtccagttccctagccaccattttataaggagacacaggaaatggacataattgcttaaggacacccaacctcatatcctggtcacatgagggcatctgctgaaggactgactcccaaggcttcttcccggtgccacaatgtacccaacaccccccaagattcaacccatatggccttacccttgtgggaggggctgtgccatgcacagatcttaaggaaacaaaacaagtaattcctggtgaaatcagtaagtaagggaagtaagcagttgcctggggagctgcaaaccacacatgaagacatttgggcacattgtggtctgcgatgagtacgcaagagcatttaccttcgccctccatccccttaagctgctcatgtattaatatagcagccatttattgagcatctcctgggtgtcaggcactgtgccaggtgctggggctacacaggtgattaagacacagcctctgcccctgggggaggcagatgtatatggaacagaaagacaggcagacagagagaggataagccaatacgcatacgcaatgaagcgtgacaggtgcaatgttatggacctgctcaggatgcagtgggagcacattaaagcagggtgcaatatggatgagtggggaaggcatcaggaaggacttcacagaggaaggggcttttgagtgggatcttgaatgccaagatagtatttgctagaacaccatgggagacagctactttagttgctgacctcatgccacagagacttctgttcacctgcaagccactctgctattgagacttctgactagtgagggtgcccccaggacgacacaacatcatgtaattcccccattagtgtgcatgcatgcacacacacacacacacacacactgctcccgtgtccctctggtacactggggcttccaatcccattacacccccaaaagctggacagactttgtgttggtttctgtccttttggttctttctccaggaagctcagccctgaccctgggcataacacccatcttggcttggggacttatcagtccccttccctcggcagttctctgtttttttctcctgctcctctcagaaccccaagtctatccctgtggaatgtttctcatttttctccactgtggccaagctctgagggtttgtgggaagagagcagattgtggaggcagtgaatggggaagatagcagagactcgaggcaggcgatgattttgtttttttattctatacaagaggggagagagtccctggggatagagggacagagatccaccctcctgggggaggagataagcccccacccagaagctctctgcagagagaggtatcgaggcaggcactgacagcctccgtctctccaggtggctccctctgttctagtccctgcctccagctcccccatgcctggtcctgccgtcttgcccctgtaggacaggggctggcagggggccctggggactgggggtggataggggtctgagtccttgcgaggcacatgtcgagggctgaggagggtgttgtggcagttgtcagtctgttcctggctcactggttcctgctggggacaaatccagggagccctgtttc

SEQ ID NO: 1241231 - DNA, 4001 bp, Homo sapiens
caaagttagttattttgttataaaggaggcacataaagtatttgttgaatggatgttcaatgtatagaggagtaaaagtgatcatctttgtatatccaataccaacttcagtggtcaaggcagcataaatgggtactgcaagaaggaatgaagcctcatcatatcataaattccttcagagcactggttttgacagatactacttcatcgcaaatatctcacagttacttgccctcttaataataatcgtgcatgttgccgggcgcagtggcttgcgcctttaatctcaacactttgggaggccgaggagggcagatcacttgagctcaggagttccagaccagcctgggcaatatgacaaaaccccttctctactaaaaacacaaaaaagtagccgggcgcggtggctgcgctggtgaccccagctacttgggaggctgaggtgggaggattacttgagcccaggaggcggaagttgcagtgagctgagatggcaccactgcactccagcctgggtggacagagcgagacccggtctcaaataataaatcggccaggcgcggtggctcacgcctgtaatcccagaactttgggaggccgaggcaggcggataatcctggccaacaaggtgaaaccctgtctctactaaagctacaaaaataggtgggcgtggtggtgcgcgcctgtagtcccagctactcgggagtctgaggcaggagaatcacttgaacccgggaggcagaggttgcagtgagccgagaatcgtgccactgcactccagcctgggcgacagagcgagattccttctcaaaaataaaaaataattaccgtgcatgttgatgacaactaaggtgaactaagcaaaatccaagggaaaacagaggagtttgggttagccctggagctcactgagtggggaaggctcttctcggtcagttgagggagagccccagtttcatactggggttgcaaggccgggcatggtggctcacgcctggaatcccagcacaggccaaaatgggaggatctcttgagcccaggagttcgacaccggcctgggcaacatagtgaaaccccgtctttattaaaaaaaaaaaaaaagaaagaaaaaagaaaggggttaaaggggttgtaaaattaaaaattaggggatgggtataaatgatagctcaggttcgcctggtcacaggaagccagacttgccggggttcaatctgacctcttcttttctaaagagcacgtaaaatagtacgaagtcaaaaaagaattagaacttcgcagtgatagtggaagcgctggagggcgatggcgggagggcgcgaaggcccaagacccttttagtacagtgtggtacaaacaaccgaaaggtctctggagtcgaagaactaaaaggacgcctaagcggtgtccagagcttagcaacctcgtggtctctcaacccaaaacgacgggaagagcccgagcaggggaggctaagaacgccgtagccacgaagccaaggagctaaagctggcgtcggtttaactcttccagcgccaagagatgaaaggggaagcagagggaagcagaaaggagggaagaagatcccgggagggaaccgtacgggctgccgcaaaacagctgggagcttgaaacccatggagaagtcacttctctttccctcgctgaccacttctgccgggaacgaccgggacagtcgcagccgaagcggcgggggcgagtcctcgggggagaccgggtcggagtcggggccccgtgctcccggagggccaatgacgccgccttccccagcccgaggctcgctcctttctcccgccctcacttgcctcgtcaggcctcccccaacgccgtccacagcccttcccaacccctaggcgaatccaggttcaagacgtagaaaagccgatgctgggtcagcagcgccagggactaccggccggcagaagccccacagtggcagccgccattttggagctggagactagcggcggagacgaggaggaaccagggcgagaccatctccggggggtgggcacggtgctgtcggaaggcgacggcggtcacgcctgcacgcctcgtctgtctggagcgaaattttattcagaaattattggtaatgtttggaagctaaaaaaaaaaaaaatgagaggagtcaaccctgaggaggaaaaagtagtatgatttgctggcgtcacccctctgctccgtgcgggcgcggcgaatggcaggtcccgaggtcgcagcttccactggcgcgggttgagttccctgttgcccttggtctcggggtcgctgtaggcgctgaggctgcaggtgggtttggggagcccggggggccgccgcgacgaggatcacggcgacggtggcggggagggttctaggcaagccctcggtgctgtgcatgtgtggaggggtggtctgggcttccccggggcttccgaacgaaggtgacgggaaaggaaaatggggttttcttcgggtggaggatgggatttccgggccggagcttttggaaagggttttctgaggctgtcataacaggaaaacgtccgtagagatgtgacccagtgaccgcccgctaaccggactggagagaagaccggcccggatcccacgcctggcctgaagcagggaagacgctgcctcccctccgcgagcagcttacattcgtccaagttccagccttctgtcttctcgctaacctcgctctcttccaaatcgcaaatcctcttgagccgacaccgttgcgcctaaatgatgtgcttacccttttactttgcttttttatttttgagacagagattcactcttgtcacccaggctggagtgcaatggtgcaatctcggctcactccaacctccgcctcccgggttcaagcgattctcccgtctcagcagcccaagtagctgggattacaggcgcccgccaccacacccggctaattttttgtatatttagtagagacgagggtttcactatgttggccaggctggtctcgaactcctgatctcgtgatccacccgcctcagcatcccaaagtgctgggattacaggcgtgagccactgcacctggcccaccttgccttttaaaagacaaaagtatggccaggcttagtggctcacgcctgtaatcccaacactttggaaggccgaggtggccggatcaagaggtcaggagtttgagaccagcccggccaacagtgaaaccccatctctacttaaaaatacaaaaattagccgggcgtggtggcacctgcctatagtcccagctactcggaaggctgaggcaagaaaatcacttgaacggccgggcgcggtggctcacgcctgtaatcccagcactttgggaggcctaggcgggcggaccacctgaggttgggaattcaagaccagcctgaccaacatggagaaacctcgtctctaccaaaaatacaaaattagctgggcatggtggcgcatacctgtaatcccagctacttgggaggctgaggtaggagaatcccttgaatccgagaggcagaggttgctgtgagccaagattgcgccattgcactccggcctaggcaacaagagcgaaacttcgtctcaaaataaaaaaaaaaaaaggaaagaaaaaagtatgaattgtataagcatgccagtgtaagaggagaggcagaaattcagtctacatagtcctagcacagcttagtgctaagcacttttgttggcaataatgtattgtctttctaggatgttgtcatatgtcttcttagtcattgtacatgatttattagtttagtccaaacgcacacaggtgtattttgaattcatctgtatgcacgaatttttacagaaaattggcaatccaactatgtttttattgaattgtgcaatttattttccacatgatgtctattacaggttcagtatccctgatcagaatgttggaaatccaaaatgcccccatatgtgaaacttggggccacaagtttgagaccagcctgggcaacatagcaaga

SEQ ID NO: 1241232 - DNA, 4001 bp, Homo sapiens
accctggaacggccccctggggagggcaatgggcagcagaagagcaggcgccggtggcagagcctgctgccaggaccccactgcagctcccttggcactccccagcacacacgcgcatgtacacacacaggttttccaagtgttcaggtttactgagagcattaggggcaacaagggagccctgggcatctggggacaaggcctggcatttgcctggacagtggccctgcaagcagccaaggatggggtctccaccacctgtgcagagagagacaggcacagacgtgagtgcagcgtccacggcctcctttggggcccacgagtggtcaggcctccctgggagggggcatccccatcccgagggtggaaccaggaggcaggatagggggtggggtcctacctacctggtttacttgaaagtgtggctctcggctccgccccgcccaaagcctgcagagaaggtggaaaaagtcaacaggctggggtggaggaggctgtggggtggggtggggtggggatgacgggagcatacctttaggcccaaacatggctgcgtagcaggggtggttgcagtagggtttgccttcgtgctgcaaagagaagggccgtgagggggtgccatcacccctggcccctgccaccagggtgggtcccacctacctcagcgtggcccccagaggtcagcgtcttcccacatttctcgcacttcaggcagggccgatgccagtccttgcccagagaggtcaccctctcggctgcagaggcacagacaggccccggtgagacgctgcaggacgcggcgcctacccaccactggcgtacccgcctcttgcagccagctctgcccaaggccctgtgcacttagcccgcatccgcccagcctggcagcccaccctaaggtctcagcaccctccatgaggggaacatctccaatccccagagccaatacaactaaacaaagcgcggggtcgctggtccccggggcactttcgggtgcggccgggaatcttgctcctgaaggctgggtggggctagagggcgaggccgagggtcaggggtcgcggcttaggtcagcagggcctgggcctggctgcctgctttcagccccgggcctctgcggtggcaagggtggagcctgcgacagcccttctcggcggggacaggggtgacttcccacttcctccctcccctcggggcgcgcgggcgcggggcagggaggcgggcgcccgggatcgcgccccgggcgtcggtttccgcgtctgtttccacttagcgctggggggcgcggccccagccccgcgttccttccagccctgcgggtcccccactcagggcgcgcctgagaggaaacggcagagaccgtaggacccagagacggggaggctcagagccagaggtagcccgccgagcacagcaagaccactagcaggcagagatcgccagggccctcggacgcaggggcctccaccctcatcccggggcaggcggcgggccaggctgaggcgttttcaggctggggcgccgccccagggacccagcgcccccggtcctcctgagcggtccccagcctcgtcgccccgtcggcggcgcctcctcgcggggccggtgtgggcgcgctcaccgaagtacacctccttgttgcacttgggacacttgggcatgacggctccgggtccggtgcaggcggcagcggctggggcggcacgggctgcaggcgcgagactgggtggatccggcctggtccgcgcctttcagggaccccgggaccccgccccttggagaccccgcccctcgcgccccgccctctgaacccaggacttggaccctggggacctcgaatctaggcccagggcccaagaaagatcatctggtccacccccgccttcaggcaggacccgggcctgactgaggacggagcgcgggggggcagggggccatggggacttactgagagggcgcagctctttaggcgagttcaagccgcgcccctagcccagcgctgtgatgtctcccgggtccagttccgaggcaaaaggctcacccgcagcaggaaacgccgctcccacccccagccctaccccaccggcacccgcccgaaccccagatctgcccgggccaggactggaccaaacatcactaaaatgcaaagagatgcaaagcagcccgcgcgctgatcctgccctccccaggacggagggtcggggacaattgccggagagcccccgctgttgccccccaccgaggaacccactctgaccttccatcccacgcagggttacgaggccgcccctgtcagtcccctcactcccaagggacgtccccgcctctgctagctcccctgacctccgctgctctgggaggtccatcggaccgcagcgggaacatccccggggaattcaaaagcggggactcccagagaggggagctgtagcttgaggaccgatcggctgcgggggctgcgggggctggggtttcggccggcaaaagagagttcagccacccccaggccggctcggagatgcccggaccgggcgcagggaggggcccttatctctgcgggtagcgcccagggcggccagagcggtccaagtacgctgcaaagttgaggcggaggatggtcccggtgccaggcggagtctgtcccgcctcacccgccccccagattcaggagggccaagggggctgcgctggcctcgggctttggggtcagccctctagctgactggccagcctcaggaagggagcccaggtcactgtcagccccctctcctgtcactgagcaggggagccctctctctgcaggcccttcacctccatgctgcatggagctccctgggagctcccacagcacaagggcggtgctgcccttcctccccacccaccatccctcctgtcagccatgttaaccagcgtccttatctcccctcgatctccactgggcctgtgctggccctgtccccgctgggggcgctggagaccatcctcctgggccccaggagccgctggcctaccgctgtcgggccctgagccctaactgcacctgtgatcccaacctcactttccctgaatcctaccgcacccctgtcggcacctcgaggcctgcacttagaggaagagaagccgcctgccctgccctgtctgccaccagtccccagcttggggagagggcaggggcagcagggctgtaggacggccaaggcacaggcgtctggcacagaggccacactccagagagccccacaccagcacacccagcccaaggccacatcctgcttgccctcctcctggcgcccctctaaggccacagttctgtcccccgactggggctaagtcctggggtctgataggacattccacaggggcccattggagccctcctcatcccccattctgagacctcagagataaggtttccagagtaggggtgcgctcctgtcctgcaaacttggaacccccactctccagcccatgagccttgaaacccactctgaggtctgggcccacctgccatctccactgagtgtggggcatcgtgggacaaacctgcagacaagcagagggagaggcagaggcaccaagaagggggagaggccaggggagcccggacagtattggggaggccgggggctctgtcactgcactttccctggggcgtgcgctgcccccaagccccagggtgcccagcaccgctgtccacacccccaccaggatgacgtgctccgggtgcagaggtgcagggcaagtgcctgatgcacacgtgtgtgcctggtgcccgtggacatacccgtatgggtgtgtccatcaggggtctctggggtccccgcgagcatgtgtgtggtccctctcgcagttgtccgcccatatttctgtcaagcctcctccccagcccatcccagctcctggcccggtaccttgcagctcatgtacggacattagccagggcagatagggacaatgacccagtccttgtcctcccctctacccgcccccagggatggtcc

SEQ ID NO: 1241233 - DNA, 4001 bp, Homo sapiens
caccgagcgggccgggagcgggcacgcactcaccgaagtacacggtcttgtcgcacttggggcatttggaggccatggtcggtgcgcccggtcggcccgcgccctccgcccgttctcctccgggccgccgccgcccgcgcccagccccgcctgcccggctgtccgcgcgcccattggctccgcggccggggcggggcctcgataacccgtcccccgggctgggggccgcctgggggcgccgcgggggcggggcgcacctgccgggggtggcgggtgcggggcagccgggccaggcctggcgcccccgggcccctcgcgccggaggtggcgtctacaggggcccgcccgggcgaccgcggcgccgcccgcgccccggctgtttccatggcgacgtcggggccgcctggccgggccgtccccggggcggcgggcagggtgcggggagcctggccctcggctctcggggagccctagtgacttgggcctaggggtccaacactcccggccctgggcgcccaggctgcgctccgccgcgggaaggggtcgcaggctccgggagaaccccacccccaccccgccgcgcgcggcgcctgtcccgcttccctttgttgctcggtttccatagcaacagccgcgccgcgggagcggagtcagattcccggcgggcacggcccccagccctgtccgggtctccatgtcccgctccgcccccgcccgcgccccgccccaacactgtctgtggtgctgaaggctccttgggtggagggcagggctcaggaaggaaggcgccgccacctccagaaacagctcgagaagctgctggtagggggtgtggggaggtctgcgtctgcctcccaggcagggaaggggcggcgggcaccagcgccgagggatccgcgcttaaggcgtccaccccaagcacttccacccagggggcggccggggaggcggtgaggagttaggaagggaaggaggggaaggagtgggcgtgccctctgtgccccgggctggggctgacactccagtcccttctcccgcaccgcccaggaccagctgcgtgcctgggggcccagggcctgacctcgaggggtcaggcgggagattgaggggtcatgccagtcaccgcacccccacacccccactctggcctcctcccaaccagggcgtgcctgaccacgcctcaccacagtgcctccgccctagagccccgtagagcctggccccaggtggggaacctccgcacccacgggcttcctggtgctctgtccccatgggcccttctctgagccttctggccccagctgagcgtcggcctgggagacaggcagatcccagaagcccagtgatcaggccctatgggggcagctgactctggacacccttccccctgtgtcttggaggctgtgggctggacacggagacctacctgttccctctgcctggtgcaccaggcatgtttgtgagccaaccagaggccctcggtgctcctggctttcatggtggtcctggctgggctctctgtggcagcaccctcctcccttgcacacacaccctgcagccactgccatttccatggtgacagcaggccagaaacatgccccccgcccccccgcccgactgaccagcctgaccagctccccctctgcacttgggacctgtgccagccaaggcagaagatggtgaggaggcatcagtcagtaccttttctgggcagcccttcctccctggcaggcccaggggtccctaggggtccctcacagcagggccttgcccaggctggattcatgggcccactgccaaaccctctccagctccctgccctgttctgcccagcttgggagcctggggctaagccattaccctccctgactttgctacctgtggggcttgctacctgtggggcttgctctggaggacagggctggctgaacacagggctcttctggagggagaccacctgccccaaggtccccagccctgccagaagagtggatgggggtagaggcaggcccctcccagggtggcagcaaaggaatggcattcggcactggccaggtgccctggagacacacggagggtggggtgggacaaggagtgtgccagctgctgcactgccctcaccccagccgcagtccctgggcagcggccagaagctccctaatgcgacggggctattctgggcctggcaggcaggggtcaggatcaatgggtgcagagcagtggccttggtctccacctctgaggctgcggtgggtcacaggcaggggcagtgacacagtgggacgggcccgagtggagaggggggcacaggacacggcgggtgtgaagggagctggcagggctgatggctgggcatggggctgggtcacacccctgggctgcagtggtctggtcccttccgccatcctgtgacactggcagatagcaggcccctgctactcagctccactgcagggaagccaggctgggctgagtggtggacagaggaccctagcagggtggagcggagctggcaggacaggtctccaggcatgacagcatgatggccttgccaccctgagatgcccctggccctggggagccgcggcccctgtggggttgctggtgcagaaagcaggctgctgtctcatcagcagggaagggcctaacgaggacatagcaaagctgggagaccccttcatggcctgggcaccaaggccaatgctccccccagccggtacccactcacttctaagcccaggtttagacccacaagcagcccaggccccacccagcaccggtggccagagcttggccctgtgagggcactgcagcctgggtgtctggccggggagggtgtctggggtgggaaagggccccacatctcctcagggcctccctgcccttgggatagagcccaggacctaggacacctcacagcccacatgttgactccagaaaaggacaggccctggggggtggaagagctgctgaggccagaaccctgcagccagcactgggaggcaagcccgaggcctggggaagggagacaagggagctggggtcttcactgagctccagacccccagggttggaaaaggcctcagagggagctgtgtccttcatgaggtcaggggcctgatttcccagccgtctgatgacgcactacaggcaagtcctcaggctgtggggtcactcggatgctggctgcagattagagttggctggtgggggctggggttgggtgggggggcgccacagcccagggagggtgggtgggacgtgcactgcagccgagtccctgacacctagtcctgtcactgctgggccccagcacaggctcccacggaggccaggacgcccccttatctttgtctcctgggagacagcagaagtggtttctattttaattccgtggctgagatttccacatgacagggcgcctgggtgggctgggggagcaaaggcacagctctggggagagacagaggagctactctccctgagcgaggcctgggcggacccctcctggccggctgaggtagcacggccaggggggtggtctggagccaggctatccaccggacccctccttctggtggcccggcctgtacctgtcccccggcctgcaagtcctgtccccggccggaggatgggccaagcaggatttctgagaatgtgcttgcagaaatctaagcagattctcactgtggagactgcacacctgcttgggggccagagctctgggcagaaaccctcaggcggctggggccaggctctacatggccaggaggttgggcctctggctggagcactccaaggcctcgctggcccagctgcactggctgccctggtgggaagccacagggtcttcggcagggccagctctgcctgccgggaggcagtccccggcccaccgctgccgcagacacagacgcacagacggtttcagcacagctctgctggggaagggggttgggccctgcaaccgcttgctgccccctggggagggcagagggcac

SEQ ID NO: 1241234 - DNA, 4001 bp, Homo sapiens
agaaccactccactcaaggaagctgggacacaccagggcaggcaggggctggctgcacggtgggcaggcgtgtcccagcagcagcaaggaagtctcggtggctatcggccgtggcagctgcagcccagggctgccagcactgtgctctggccagctctgggacgtgggccaagtgggggcagggaactggccctcagacccactgggtgggtcaatggccacacattacgggtccgagttgggaacacagaatcgattgggtctaatggctcagaagaaaaccagctgcccaccctggctgcatgggctctggggtggcctcctcaatgtgctccgacatcccagcctgggttctactcaggtatgagctgcgggggcagcctggtgtgagggtgggcaggattctggaccctcgccctcacagtgcctcccaggcaggacagaagccagccgggtctgaagcgcctttgttttccgctgagaggctgggcgggccaggcaggcaggcctttccgggctgtccacaggactgttggccgagaccctggagagccccaggctggcctggcccggcctggggtaaagtcatgggcagttggactgcagaagggccctggggaccgtctcccaccctaagccttacagagacagccctcgctgggacagagactgagggctgagcgggctccaggagaggcagccggaagcccctcggctcccagccacgccagaagcactccaggccaaatccggtccctcccctctgggacgggcaaaatacaacctcccctcaaccccctccagcctgtgagccggggaagcccagtggcggccttccctgcagcctggccgcattctgggtatggggcgaccagggcaggcgccctgttggtcccggccctcctctctgcttcactaagtctgccccccttcgtgcagcagctggtgggtaggtgggcagggaccttaccaccctggagaaagctgggcagcgaatcagccaggaggaagggggtaggaagggcgcacccaggcccagagagtgagtaagcccagacggggggagcgcgcctgccggaggggctagaccgagggccgccttgcgagacatccctcttcccgccaccacctgcatcctgtccagggctgttctgaccttgaggaggcagggatcctggacacctgggctgcttgagcacaaggtccctctcacgttcgcgggaactcgcgtgtcacacccgcccccaccctacccccgtgtgaaactcctgggggaactggcgccaagggaatgcgtcgggacaagcaggaggcagaggccaaggtcgcccccgcttggactgaatcccgacagagtccaaacctggcccagcccagctcagcggagcccggagtgggagctgggggtcactgttcccggccacttgttcccgggggaagcgggtgtagggggtccaggagaaagggcccaggcccacgggagcgcgcgggacgcacccggggcgtacagccacgccctgccccgccccgcccggcgccgtccgaggaaccgggatgcgtccgcggatccccgagcgctcccccaaacactggcctcatcccggggcaccacaagccccgcccgggtggtccctgccccgcccccacaagccgcttcggggttcgggcgtgaccgcccccgctttcgcgcagccccaccctttggctttagccgcttgggcagcgcggccagccagcctccgggacgcgcatcctcggtccggggccggggccgggcgcaccccgagttacgccgcggctctgcggcgcgggactggccgcgaagggcggcgggatgcaccgagcgggccgggagcgggcacgcactcaccgaagtacacggtcttgtcgcacttggggcatttggaggccatggtcggtgcgcccggtcggcccgcgccctccgcccgttctcctccgggccgccgccgcccgcgcccagccccgcctgcccggctgtccgcgcgcccattggctccgcggccggggcggggcctcgataacccgtcccccgggctgggggccgcctgggggcgccgcgggggcggggcgcacctgccgggggtggcgggtgcggggcagccgggccaggcctggcgcccccgggcccctcgcgccggaggtggcgtctacaggggcccgcccgggcgaccgcggcgccgcccgcgccccggctgtttccatggcgacgtcggggccgcctggccgggccgtccccggggcggcgggcagggtgcggggagcctggccctcggctctcggggagccctagtgacttgggcctaggggtccaacactcccggccctgggcgcccaggctgcgctccgccgcgggaaggggtcgcaggctccgggagaaccccacccccaccccgccgcgcgcggcgcctgtcccgcttccctttgttgctcggtttccatagcaacagccgcgccgcgggagcggagtcagattcccggcgggcacggcccccagccctgtccgggtctccatgtcccgctccgcccccgcccgcgccccgccccaacactgtctgtggtgctgaaggctccttgggtggagggcagggctcaggaaggaaggcgccgccacctccagaaacagctcgagaagctgctggtagggggtgtggggaggtctgcgtctgcctcccaggcagggaaggggcggcgggcaccagcgccgagggatccgcgcttaaggcgtccaccccaagcacttccacccagggggcggccggggaggcggtgaggagttaggaagggaaggaggggaaggagtgggcgtgccctctgtgccccgggctggggctgacactccagtcccttctcccgcaccgcccaggaccagctgcgtgcctgggggcccagggcctgacctcgaggggtcaggcgggagattgaggggtcatgccagtcaccgcacccccacacccccactctggcctcctcccaaccagggcgtgcctgaccacgcctcaccacagtgcctccgccctagagccccgtagagcctggccccaggtggggaacctccgcacccacgggcttcctggtgctctgtccccatgggcccttctctgagccttctggccccagctgagcgtcggcctgggagacaggcagatcccagaagcccagtgatcaggccctatgggggcagctgactctggacacccttccccctgtgtcttggaggctgtgggctggacacggagacctacctgttccctctgcctggtgcaccaggcatgtttgtgagccaaccagaggccctcggtgctcctggctttcatggtggtcctggctgggctctctgtggcagcaccctcctcccttgcacacacaccctgcagccactgccatttccatggtgacagcaggccagaaacatgccccccgcccccccgcccgactgaccagcctgaccagctccccctctgcacttgggacctgtgccagccaaggcagaagatggtgaggaggcatcagtcagtaccttttctgggcagcccttcctccctggcaggcccaggggtccctaggggtccctcacagcagggccttgcccaggctggattcatgggcccactgccaaaccctctccagctccctgccctgttctgcccagcttgggagcctggggctaagccattaccctccctgactttgctacctgtggggcttgctacctgtggggcttgctctggaggacagggctggctgaacacagggctcttctggagggagaccacctgccccaaggtccccagccctgccagaagagtggatgggggtagaggcaggcccctcccagggtggcagcaaaggaatggcattcggcactggccaggtgccctggagacacacggagggtggggtgggacaaggagtgtgccagctgctgcactgccctcaccccagccgcagtccctgggcagcggccagaagctccctaatgc

SEQ ID NO: 1241235 - DNA, 4001 bp, Homo sapiens
ctttaattcacctaacaagaaaacataatcgtaactgcctcaataattaagtggtctttttaaagatttaatccagtttttaaaaacacggcgacataaatgcccctacacatgtcaacaaagatacctagaaacacttaaggagaaaaatctctacaacttgattataaactagacctgaaaaataaaaaacaaaatttgaacactgggagtttactatctctagactgtacattaacaagacagaagcgaagaacaatctcactcatggtagagcatctcaaaagggcattcattctttaccaaaaaaaaaaaaaatgcagaatcaaaatttcaactccccgcccaacctcaggtgttctttcaaggttcaacgagaagttacatcagtaaatgtaactaatttaaaggaacagtcctcaagtttctcacagtcgaaggaaccacgtgtctctgctcaaaataaacaacatagcggaaaggctaattagttttaggaatcgggaaacatttacatctttgcaaagtccagctaagcaagtgctttcttcaccttcccagagccccaggtcctcctccatcacacaaaaaccactcaagcgccctacgagcctaactactgcctcgaacacgggcgggagccgggcagcagacgaggactggcttcgggacctctgaccacggcggcttagaccccaaagccggtctactgcttccttcccccggcggctcccgcgacccctgggccacgtaacactcatcgcgcctgggctcaccctgcgtagctcctccaggagcagccccaaatacggttgaggggtaaccccgggctcctccatagcgccaaagctgctctcgtggtcgccacagtaaccccggcctgtcggggccacaataaacggcggagaacacacagccttcggtccggaacccgaatccgcacccggcaaccggagtggaccactgcggagccggctgcggggggagctgggggacaggggcacccgcaggcctcacaggcctacgctgcccatcccgaccctcttgttatactttacatcccgaggcagcgcaggtccgagcccgacccgcacaagcctgcgacgtaccctgtcctcgccaccccacccctcggtttggtttcggccgggcagccgcgagaaggcggggaggcgcggacagccgcaaacttccccttcttcgcgcaagcttcgcagacgtgtccgggtcgtttgctcttaaaggggccggcgctctacctggcgaagccacccagccctggtagtggagaggcttgggactagaggatgagattcggcctcatactccgcgctgtcgtgtgagccgcacaaccccaaagaccagggctatgtcccaagggcacccgcctcgggcggccgcggtggcggcggcggcgagacttctcctagaggcgtctcggcgcaacccccacccccccgacccaggggccgacgccaggcccagccccgacacccaaggctttccttccgcagcctcgctggagcctgctgtctgcgccctgcagaagtcctgacggcggcgtaccccgggagaccccggcagccccgagaagccagccgccgccgtcattccagtcagaaaaatggcctgcggggcacgcgccggtgcgccctgccaaccacgtccggactttggactttagacaggaaggcgtcccggctcagctgtggtttggtcagagtttaacctgtcccacgcaagagaacctcgatctggtttcctcgcttacctgagtcacctgggcacttgttaggcccagctgtcttcagttccattagcggccagttacccaaatgctaaatcaaatccccgtggaccttggcctggcgcggtgcgtgctgttttcctccgagaagaggagctaaaagtagcaccttgccttctaaatttaggactctatttttaggaccgtcgaataaagtgccaagtgctggatttgttcgtaggagacggttttagctgacgtaggtgtaaaggataacccatctcatatatatgtcttccttgccagcatgatcattctcattatattctgccttctcactcaagtactttggtgaagcaactcaaaaaggagcagatacttcctcctaaacaaatcacccaaaagaactcaatagatgaacaaaatcttaaatccttaggaaattttcctgatgtaacctcttgtagcaacgaactgttatgccatttaaaaaatcaaaaactggcccaagttcacagcaagtgatttttcaggaccaaaatgcggcctagcttttcagaactcaagattgctatttctcctttgccacatcagcctgaggagtttcaggaaatgctaatatcagagtagccaaaattgcttagtaattctccattgttaaggtataaggtattacacaactttcatacgtgttagacactgtgtattaaaattatgtgaatagttcattaaagtcaaaacaagcataatcaaacttttatctttagaatttcacagactcctagaacaacgtgtatgcctcaattagaacattgtattactcaataaaaattcttaaatgtgtctgaacattttcggaagactccagaataattttcaggttttagaactttcaaaaaacaaaaacaaaaaaaaaacctccctttgccctccctaagtcactctatgtccctctccaattttcagtaattaccactccaaatattaaaaatattaaggacagaggataaaatgaaaaaaaaagaaaaatccaagttccccccatagcaaaaacacagtaaagcttaacaaacttagtgcaaaattccaaacctcatttgtttcagtatgcttaatagttataaactcacctcttcctctggacttttcaattccatttcttgaaaagctcatgttaaaatttcctaacatgtaaataaagttctaccaggcacctcatatccttgagaaagatttcagattctaatatatcctgcactcttctgtttccacactgtgatcccgttttgacatttgtgtggtaaaggggtgctacaggtggagttgtgactaccaacccataacccaatttcatggacctcactcgttgttaagtatatatatatatatatactcacacacatacatatgcacctatatatgttttttaaaatgtacatattactaccctcttacaatctataattgaaaagaaaaatcctgaatttgataactgataaaaactaaaatgttttattctatagcctattcatatagagtacatgatctctatcatttaaaagatattcaaagactgtcctccataagtagacatgggaattttttggtcttatatagtacctgttttaaagcagatgttagaacaaatgctgttagtgtttgtgatagatactagaaaacatccaagaacatcggaaacatgctaaccagtaaactttgttcacaacctagacactgatttcccttatgaagggctccattgcaaagctgtaagtactagttactcccttttaattaaacaggcagtgtcacagactttaagatttactcttttggaagaaaatcaaaattgtggagccacatctttaatctctgtactagtgatgtaagagttgttctcagaacatattgaatcaggaactacctgttgaacaatagctggataatttccattgtatattctgtgaataaatgaagcattctacttaagaatatataaacattagaactcaaagaggctcctcaattgtaaaatagaaaaaaaagtagtgttaaaaatagaaccaccattcgacccagcaatgtcattactgggtatatacccaaagaaagtaaattgttctaacaaaagacacgtgcactctcatgttcattgcagcactattcacaatagcaaagacatggactcaccctaggtgcccatcaacggtgcattggataaagaaaatgtggtacatatacacgatggaatact

SEQ ID NO: 1241236 - DNA, 4001 bp, Homo sapiens
ccaggccagggtactcgcatttagcaaaaaaaaaaaaaaaaaaaaaaaaactgtgcaggtgaagatacaacgcaccagactagagaaaactgcaaaatctggctgcatttctccatgtatttctgcatttctccatgtacactggcagtcctataaaaactaaatcttgattattattgtttttagtgaagaaagggaaatatgcttctctttctaaaaaccctacctccatgaataagttaccacagccagaaacctgggagtccttctagattccttctctctcacccttcacatgcaatcaataaagtcaaacatattttagctcttagaggctatttctccacacagtaccctctttcctatccttactactgtcacctctcccttaatccctatttcaagttttgtttccctaacatctaatctacatgctactatcaagaagagcttaaattttaaaccacaagtctaaccacggaaaagccttcaagagctctccaacacctacagcacttggaacctacttacatctccggcaagcatcattgcccatcactccctaagcccactttacactctaagtaatacagctcctagttccctgcactgtgtgtgtatgcttaggtaagcacttcatcagtttctactttgtactatttttttttttgtcttctctctcttaacagacaacatgatgctagtggccaaaactaagtcttagtccatttagaatctccataaaggtgctcttttcatattaaatacatatatatgcgtatgcattagacaaactatgaactcataaacaccatggcaacactacctttaattcacctaacaagaaaacataatcgtaactgcctcaataattaagtggtctttttaaagatttaatccagtttttaaaaacacggcgacataaatgcccctacacatgtcaacaaagatacctagaaacacttaaggagaaaaatctctacaacttgattataaactagacctgaaaaataaaaaacaaaatttgaacactgggagtttactatctctagactgtacattaacaagacagaagcgaagaacaatctcactcatggtagagcatctcaaaagggcattcattctttaccaaaaaaaaaaaaaatgcagaatcaaaatttcaactccccgcccaacctcaggtgttctttcaaggttcaacgagaagttacatcagtaaatgtaactaatttaaaggaacagtcctcaagtttctcacagtcgaaggaaccacgtgtctctgctcaaaataaacaacatagcggaaaggctaattagttttaggaatcgggaaacatttacatctttgcaaagtccagctaagcaagtgctttcttcaccttcccagagccccaggtcctcctccatcacacaaaaaccactcaagcgccctacgagcctaactactgcctcgaacacgggcgggagccgggcagcagacgaggactggcttcgggacctctgaccacggcggcttagaccccaaagccggtctactgcttccttcccccggcggctcccgcgacccctgggccacgtaacactcatcgcgcctgggctcaccctgcgtagctcctccaggagcagccccaaatacggttgaggggtaaccccgggctcctccatagcgccaaagctgctctcgtggtcgccacagtaaccccggcctgtcggggccacaataaacggcggagaacacacagccttcggtccggaacccgaatccgcacccggcaaccggagtggaccactgcggagccggctgcggggggagctgggggacaggggcacccgcaggcctcacaggcctacgctgcccatcccgaccctcttgttatactttacatcccgaggcagcgcaggtccgagcccgacccgcacaagcctgcgacgtaccctgtcctcgccaccccacccctcggtttggtttcggccgggcagccgcgagaaggcggggaggcgcggacagccgcaaacttccccttcttcgcgcaagcttcgcagacgtgtccgggtcgtttgctcttaaaggggccggcgctctacctggcgaagccacccagccctggtagtggagaggcttgggactagaggatgagattcggcctcatactccgcgctgtcgtgtgagccgcacaaccccaaagaccagggctatgtcccaagggcacccgcctcgggcggccgcggtggcggcggcggcgagacttctcctagaggcgtctcggcgcaacccccacccccccgacccaggggccgacgccaggcccagccccgacacccaaggctttccttccgcagcctcgctggagcctgctgtctgcgccctgcagaagtcctgacggcggcgtaccccgggagaccccggcagccccgagaagccagccgccgccgtcattccagtcagaaaaatggcctgcggggcacgcgccggtgcgccctgccaaccacgtccggactttggactttagacaggaaggcgtcccggctcagctgtggtttggtcagagtttaacctgtcccacgcaagagaacctcgatctggtttcctcgcttacctgagtcacctgggcacttgttaggcccagctgtcttcagttccattagcggccagttacccaaatgctaaatcaaatccccgtggaccttggcctggcgcggtgcgtgctgttttcctccgagaagaggagctaaaagtagcaccttgccttctaaatttaggactctatttttaggaccgtcgaataaagtgccaagtgctggatttgttcgtaggagacggttttagctgacgtaggtgtaaaggataacccatctcatatatatgtcttccttgccagcatgatcattctcattatattctgccttctcactcaagtactttggtgaagcaactcaaaaaggagcagatacttcctcctaaacaaatcacccaaaagaactcaatagatgaacaaaatcttaaatccttaggaaattttcctgatgtaacctcttgtagcaacgaactgttatgccatttaaaaaatcaaaaactggcccaagttcacagcaagtgatttttcaggaccaaaatgcggcctagcttttcagaactcaagattgctatttctcctttgccacatcagcctgaggagtttcaggaaatgctaatatcagagtagccaaaattgcttagtaattctccattgttaaggtataaggtattacacaactttcatacgtgttagacactgtgtattaaaattatgtgaatagttcattaaagtcaaaacaagcataatcaaacttttatctttagaatttcacagactcctagaacaacgtgtatgcctcaattagaacattgtattactcaataaaaattcttaaatgtgtctgaacattttcggaagactccagaataattttcaggttttagaactttcaaaaaacaaaaacaaaaaaaaaacctccctttgccctccctaagtcactctatgtccctctccaattttcagtaattaccactccaaatattaaaaatattaaggacagaggataaaatgaaaaaaaaagaaaaatccaagttccccccatagcaaaaacacagtaaagcttaacaaacttagtgcaaaattccaaacctcatttgtttcagtatgcttaatagttataaactcacctcttcctctggacttttcaattccatttcttgaaaagctcatgttaaaatttcctaacatgtaaataaagttctaccaggcacctcatatccttgagaaagatttcagattctaatatatcctgcactcttctgtttccacactgtgatcccgttttgacatttgtgtggtaaaggggtgctacaggtggagttgtgactaccaacccataacccaatttcatggacctcactcgttgttaagtatatatatatatatatactcacacacatacatatgcacctatatatgtttttt

SEQ ID NO: 1241237 - DNA, 4001 bp, Homo sapiens
ctgcccatcccgaccctcttgttatactttacatcccgaggcagcgcaggtccgagcccgacccgcacaagcctgcgacgtaccctgtcctcgccaccccacccctcggtttggtttcggccgggcagccgcgagaaggcggggaggcgcggacagccgcaaacttccccttcttcgcgcaagcttcgcagacgtgtccgggtcgtttgctcttaaaggggccggcgctctacctggcgaagccacccagccctggtagtggagaggcttgggactagaggatgagattcggcctcatactccgcgctgtcgtgtgagccgcacaaccccaaagaccagggctatgtcccaagggcacccgcctcgggcggccgcggtggcggcggcggcgagacttctcctagaggcgtctcggcgcaacccccacccccccgacccaggggccgacgccaggcccagccccgacacccaaggctttccttccgcagcctcgctggagcctgctgtctgcgccctgcagaagtcctgacggcggcgtaccccgggagaccccggcagccccgagaagccagccgccgccgtcattccagtcagaaaaatggcctgcggggcacgcgccggtgcgccctgccaaccacgtccggactttggactttagacaggaaggcgtcccggctcagctgtggtttggtcagagtttaacctgtcccacgcaagagaacctcgatctggtttcctcgcttacctgagtcacctgggcacttgttaggcccagctgtcttcagttccattagcggccagttacccaaatgctaaatcaaatccccgtggaccttggcctggcgcggtgcgtgctgttttcctccgagaagaggagctaaaagtagcaccttgccttctaaatttaggactctatttttaggaccgtcgaataaagtgccaagtgctggatttgttcgtaggagacggttttagctgacgtaggtgtaaaggataacccatctcatatatatgtcttccttgccagcatgatcattctcattatattctgccttctcactcaagtactttggtgaagcaactcaaaaaggagcagatacttcctcctaaacaaatcacccaaaagaactcaatagatgaacaaaatcttaaatccttaggaaattttcctgatgtaacctcttgtagcaacgaactgttatgccatttaaaaaatcaaaaactggcccaagttcacagcaagtgatttttcaggaccaaaatgcggcctagcttttcagaactcaagattgctatttctcctttgccacatcagcctgaggagtttcaggaaatgctaatatcagagtagccaaaattgcttagtaattctccattgttaaggtataaggtattacacaactttcatacgtgttagacactgtgtattaaaattatgtgaatagttcattaaagtcaaaacaagcataatcaaacttttatctttagaatttcacagactcctagaacaacgtgtatgcctcaattagaacattgtattactcaataaaaattcttaaatgtgtctgaacattttcggaagactccagaataattttcaggttttagaactttcaaaaaacaaaaacaaaaaaaaaacctccctttgccctccctaagtcactctatgtccctctccaattttcagtaattaccactccaaatattaaaaatattaaggacagaggataaaatgaaaaaaaaagaaaaatccaagttccccccatagcaaaaacacagtaaagcttaacaaacttagtgcaaaattccaaacctcatttgtttcagtatgcttaatagttataaactcacctcttcctctggacttttcaattccatttcttgaaaagctcatgttaaaatttcctaacatgtaaataaagttctaccaggcacctcatatccttgagaaagatttcagattctaatatatcctgcactcttctgtttccacactgtgatcccgttttgacatttgtgtggtaaaggggtgctacaggtggagttgtgactaccaacccataacccaatttcatggacctcactcgttgttaagtatatatatatatatatactcacacacatacatatgcacctatatatgttttttaaaatgtacatattactaccctcttacaatctataattgaaaagaaaaatcctgaatttgataactgataaaaactaaaatgttttattctatagcctattcatatagagtacatgatctctatcatttaaaagatattcaaagactgtcctccataagtagacatgggaattttttggtcttatatagtacctgttttaaagcagatgttagaacaaatgctgttagtgtttgtgatagatactagaaaacatccaagaacatcggaaacatgctaaccagtaaactttgttcacaacctagacactgatttcccttatgaagggctccattgcaaagctgtaagtactagttactcccttttaattaaacaggcagtgtcacagactttaagatttactcttttggaagaaaatcaaaattgtggagccacatctttaatctctgtactagtgatgtaagagttgttctcagaacatattgaatcaggaactacctgttgaacaatagctggataatttccattgtatattctgtgaataaatgaagcattctacttaagaatatataaacattagaactcaaagaggctcctcaattgtaaaatagaaaaaaaagtagtgttaaaaatagaaccaccattcgacccagcaatgtcattactgggtatatacccaaagaaagtaaattgttctaacaaaagacacgtgcactctcatgttcattgcagcactattcacaatagcaaagacatggactcaccctaggtgcccatcaacggtgcattggataaagaaaatgtggtacatatacacgatggaatactatgcagccataaaaaatgaagtcacattctttgcagcaacgtggatgcagatggaggccattatcctaagcgaattaacgtagaaactgaaaaccaaatatcacatgttctcacttataagtggcagctaaatcttgggtacgtacagacataaagatgagaaaaataaacactagggactcaaaaatgaggaagggagcaggtcaaggactgaaaaacttcccactgaatattatgttcactatctggatgacagaatcaatagaagcccaaatctcagcatcacgaaatcaacccttgtaacaaacctgtacatgtaccccttgaatccaaaataaacatggaaataagaaagaaaggaagggctgggcgtggttggctcacacctataatcccagcactttgggaggccaaggcgggcgaatcactcgaggtcaggagttcgagaccagcctggccaacatggtgaaaccccgtctctactaaaaaatacaaaaaattagctgggcatggtagtgtgcacctgtaatcccagctacttgggaagctaaggcaggaaaatcatttgaacccaggaggccgagattgcagtgagctgagatcacaccactgcactccagcctcggtgactgagtgaaactctgtctcagaaaaaaaaaaaaaagagagagagagagaggaaggaaggaaaataaaggaaaagagaaaataagaggaaaggaaaggaaaggaaaggaaaagaagaaagaaaagaaaagaaagatgctgggcatgatggctcaagcctgtaatcctagcactctgggagactaaggcagaaggattcccttgagctcaggagctccagactggcctgggcaagatagtgagctctcgtctctacaaaaaatttagaaaaaaaaaaaaaagaacaatccatcaagatcaagttggctttatccctgggatgcaaggctggttcaacatacacaaatcaataaatgtaatccatcacataaacagaaacaaagacaaaaaccacatgat

SEQ ID NO: 1241238 - DNA, 4001 bp, Homo sapiens
cgttcccgccggtcccccacacaaatctgccttcgggggtcgtaggaaccgaagatgcggaggcactgcctatccctctgcactctcagctgcacctctcggagtgtatctgttcccctcctcatgctgaccctgccccagccggccacagtgcacagcgtcccgggtctcagtccctcctgggctctaggcagagccactgggttcacgtttcgattccgtctgactcttctgctcagctggaggaagaatgtaggcgttcccgctcagctggggcctccagccaaggctcgggggtcgctggtgcagtacacatcccatgccctccccgccaccccggagccttgccctcacttcctcctccattgtccccggacacactaggaaggagccagagggccaggtaggtggtacctgcaataacatgatgtcattctggatggtccgctgattatattgagggtggcggatggctctgcgcgcagtgatgtgttgctgggtgttttcccgtctctggatattgtgggcgcccagggtgacatttatattgctgcaaaagcaagaggtaggtctgggctgcaggagctatggtccaccagctctgcagggtaggcagacagcacggggagggcaagactgcagctaaccagaatcgaggggatgggagggccctggggctcagctgtatcctctttctcagcagctctgagctagggatgacagggtggtacttgccttcaggtttgcttccccagattaagttgataaatagcctgagtttatattttgagccccaatatgtgtcttccatctcttcctcttgctctttttgatcttatcctcctttcctcctcatttacactggcctgttccctcccgcaaagactcacttggtctttctttcaccctttcattgctacaactcttctttcagatggctcttccaccgaagagctccgcagggctgtgttcctggctggccaggaagttccttagctcctcaccttccccagcaatgagctgctgtcagcacaaagtcttctcgcaccaggaaccctccacatctgctctgacctgctggactctggatctgaagatacgccatgtaggggcgggagtggggcctgctctcccggcctccgatgatctcccctggaaggaagcatttggcacttagctctatgcttgctgaacctgcaatgtgggtaccagattggtggctccagaaaggctggaagatggggacggcaggagagagggtgcaggagagggaggagatggtgctgaggcttggagtctatggggcagcagattgggagggggctccagggttctacaggaaacactgctgtcttgaaaggagcccttttccccatcctaggcctcacctccctcctcctctccaaaagagggagaacaacccttgttccaggcaaggccagcttcagcctcaggtattgaggagaatgctttgctgtaagtacaggattgttcctgaagttcccttatacttttatcctcatggagcttcccagagccctctgagtccaattcaagaccacgtgggactggtgtttaaaaatctagacatgagctgatggtactgttattgctgtattcttacctcctaggtagggtctgacacatgctgccaaattatttacacaaagcatgtttttatagcacttatagtgtgcgggcaattccaagacatttaaatactctaacttatttaactctcatggcaactctgcaagatcggtattaatattattctcattttatagatgaggaaacacaaattcaaataacttgctcaacagtacagaattaggatataccaaggcaatttggctcaagaatctatgggatgaggtcaggcctctgagggtggggatggtcactcacctgcctcagccccagtgggtaggagaaaggccagcagaagcaggagtggctgcatctttcctgaaaggctgcccagtcagttgctgctgtgcttcctcctcctagactttaaggccctgagagaggaaggaaggggtggggacaggggattgagaattcacagtcccattctcctgctaccatgaaaggtttcatcacccaaggctgctcaggaagtttgcccacaaactgccggagatgtgggtgagaccgtgtaatccaagccaacatagtgagctcttgagcagctgctaagtcagtgccgagagcagaaataggaacccagcacaacaaggaaggggcttggggcattgtgtccagaaccctcaacccatcaaattccagaatactccagcaaagcaagaaagctggcagctgcccacttcctgttttctactcctctgggattagatcattattgcttttgaatttctgggtttctcctaatgaatgcaagttccctggattgcttatctgtatatacttaataagtctgggacaaggatgaatgaaagggtgtggtgtggtgagggatgtgggtaagaacatcaggaaaaagttgaagggggcagaagaggaaagggtaagcctgcctgctttcagtgtttggcccaagaccaccctgctgagacccctgttgctctaatttctttctagaagctgtcaagtcagattgcgtaggcactctcctgagtaggtgaagcgtgcggctggagaaagaaaaggaagaacaaggctctgacaatcacaattactttcttaggtcacttgagtcctcagtgaaaattgtgacacaattgaagacttctgcttgcctgtctcctacccaaggttaaagtccttatgttccagacggctccttgcttgcagaaaaggcttagtaatttggttttattgggagctgtcgtatcctagctggaaaatatctaatatcccatttcactggtgacattagaggcccatcaacctaatcccaggagcaaaagcttctgagaaggaggtacattcattgctgtgctacctataaaagaattagagccgcatactcaacaatgggagaaaagaacagcaaattactgcagagtaacacaatggattattaaaaacacttaaaatatttagaagattctgtgtatgcacagaaaaccgttataatccagtataatttttgcagaaatagcagaattgaagactaatacaattcccaatctctttttttctgtcttttattttgaaaatcttttacttaggtatttatttttaacttttattttaggtttgggggtacatgtgaaggtttgttacataggtaaacacatgttacggggatttgttgtacatatttatcacccagatattaagcccagcactcaatagttatcttttctgctcctctccctcctcttaccccactgtctgttgttttcttctttgtgttcacagttcttatcatttagctcccacttataagtgagaacatgtattatttggtttcctgcattagtttgctaactaacatgtattatttggtttcctgcattagtttgctaatagcctcctgctccacccatgtccctgcaaaggtcatgagtccattcttttttatgactgcatatgtatatgtaccacaatgtatatgtaccacattttccttatctggtctattgacgggcagttagattgattccgtgtctttgcttttgtgaatagtgctgccgtgaacatttgcgtgcatgtgtctttatggtagaatgatttatattcctctgggtaaatatccagtgatgggattgctggatcgaatggtagttctgcttttagctctttgaagaatcaccatactgctttccacaatggttgaactgctcccaccaacagtgtataagtgttctcttttgtctgcaactttgccagcatctgttattttttggctgtttagtaatagccattctgattggtgtgagatacaattcccagtctttatggagtataataggccctcttgaaaatctcatgaaaattagggttcctttccttatacataaatatataat

SEQ ID NO: 1241239 - DNA, 4001 bp, Homo sapiens
tgtgaatgtaccaaaaaccactgaatcatacactaaagaatacattttgtggaatgcaagttacatttcaattttttttaagatgatttaaattctgctttctcaagacacagagaccagaacaggtcatttgagtttatgagaagaccaagtaacgatgaaacttatcagaacaagcaccaaactcattcaattctaagtgctgatggcttctctgaaaacttgagagggtgatagtgtccaccacggaactcacgggagatttccaccattcaaccttgaattgctattcatagagtgtctactatgcatgtacaatgtgctgctacatgtcggagatgcagcagtgactgagacagacagggggcccatggaaaagagacacttaggaaaaacttgcacaaataattgcccaattaacattatgctgtaaaggaaaattacagtgatttcagggtttataaaatgaacataatatttttgggggagcaggaggaacctccctgaggagttagcattgaagccaaacctggaaggctgggggaagaagcatccaggtaaagtagaaggcagaggagctaagcaaggagagagagagagagcaccagaagggcagagagccagcagggagaacaggtgcctccctatgtcaccagccacagagatctttcctgaacccatcaagcagagattcaggcttctaacgccagtacatctggcttgtgctggagatgggtgccttccagaatattcatgtcctgagattttaaaaagtgtgtctaatacaattgtttattcattcattcaacaaatatttattgagatctgcaacacgccaggcactggggatacacaagcgaacacagagtgtccctgtcctcccggggctcacattctagagggggagacagtcaacaggtgaacagacagtcaacaggtggaaagaaggtaacctcagaggtgatggcccctgagaagtctggggctgggtggtctttacacaaggtgctgggcaaggcctgtttgagacaagcagaggaagaagcccgccaggcccaggcttgagaaaaggacccggggggagggaagctgcggggggggcggggggagggggaggctgggagaagaaaggctgggggcagtagtgagaaagcaagaggaaagagcaagctgcagagtgggttctgagtgctcggcaggggcctcgcgggccatgcagccgacttaatttagaactgcatttagttgtcaagtgatgggaagcccttggagcagggaaatgacacatttaatttaagcttcacaaagctaagctgggggtgggggggggttggcaagttgaggggggtgtaagttgcgtgggggtggggaccaagaatgcaattgtaagtactaaggagaagacaaatggggtgtcccagaacagaaatacaagcaaaaggaaacatgactgaagtacagcgtgctccaatccaggctgaccctgtccaagtcccaaagttaacagcgcccactttggaggcaggctgacctgggcttaaatctaggcttaccaaccgtgtgaccttgggcaggtgacttcgcctctgagcgcctcagtctcctcgtctgaacgatgggttaacaatagcgcctacctgaaagggctgtggctgccatcacgtttgtggggcccagctgtgcgcggtgggcgcccagcagctgctgcggctgtgagtaatttgttactaagaatagttagcgcccctctcggggccgccgactcccagcggccgcgcgcactaggcgaggccggacccccggcctggacgccggcttagacgctgtccccaggcccccagtcccagcaccccagccaggccccgcccccagccccgctcacctgggccgcggcggcccggggatgtgctcgtagcggctgcgagcgcggtgcacgaaggtgcagcagaggccgaaggcgagcaggacggcgctgccgagcagcagcagcccggggctcatggctccggggcagggcaggccaggccagggtcgggccgggcgccgagggggccgggaggccgcgagccgactcagctgtcagcgccgcgcgccgcctcggccccaggccaggcgcgacccagcaccctccccgcccgctcggctccgcccccgccgactccgacccctcccagggcgcacagtccccgccaaccacgtctccgcctccggctccggcgctccgggccctcccccgccccgccccgccccccagagctccgccccaacctccacaccgccccagcccaggccccaccccgagcatgtggtcttcaccaatcacaactccgcttctggctcagccccccaggctccgcccccacctcttcagactcaggtccgccccagcagcagctccgcccagaacgcgttgtccctggcaacgccgatcctcagcgctctggcccggcggcggcgcgaagtcctgctggctggctccgcccgcttcggcgcctccaaataacggcatctttccgcgcgcggtcttaggccccttcctttttcccccaaacctgcccggaaaccccatcccagcctgcaaaagtccgcataacgccgactgttcccaaacttctccttggaaccccagacccccaaagttgttctccagttgccccggggcgcctcctccgcccggacagtccacgcctagcgcccgtggtccgccagcggggcccgcgggctggtggcaggatcctgcgggacccagggacgcctgtgtctgcgaccgagagcgcacggcgtggccggaggctgttctcccagagactcgggggcctgcggaccctcctagaccaggcgaagccccatctgaggcgctggctcaggcccgaaggagttggagttggagggatgaaaatctgggtccgccctccagggaaagcgggaaatgtgccggggaggcgggggtagcggaggagaaggtattttcgaaataatgaccagggcttccccctctgtcgtaacccgcgtctccttgcccatcccgtatgaagatgaggccaattctgggcgttttagttcccaattcctatcccgagggaccacccagcgtgaaagtcgtggcaggggaaggccaggtgtgcccactcctagcccaggtaaaggtcccccgggctggaggtagaggcccagggagtgtagatgctgctgggtttctgagaagaggcaatgcccctgccccacgcttgagccagtcctggagaggttgggggttggaaaacgaaggggaccttggtaccgccttcccaggtatagttagggacatgggacatggctgttaggggtgtgggctgaggggcgacggagacggccaagtcttaagagccgtgcccagcacggaggaggcgggacttctgccctcggggccaccgcagcctggacaggtgggcagcagagcatccatccccccggcgcctggcccggccgcccagttggactcggggatgttggcttgctatggcgcccccgtgtggcggcggtgacaggcagccgcaggcccacagggtaactcaggctggccctgctggggtgaggtgtggaacggagccaccaggtcccctgtgggctgtgaaagctccggggcttgagggcaatttggagggaggatgaggctgcaagaaggagggtgtggattcctgcgcactggaaggtgggttggggtggttagctagaaaagaaatgtgacggcatcacatttagtatccagtttgtggaacggctccctgagattacacagtgcatcgcactgtctgaagaggactttctcttgccttgtctctccagacccctggaacaatggtactgttagcaacagcaaatccatatgggtctgcagcagcctcagttcttgcctcctcagaagaaagaattcgactgaggggcgtaaggcagagtgagaggcaagttttagagcaggagtgaaaatgtatttaaaagttttagaggccgggcgcagtggc

SEQ ID NO: 1241240 - DNA, 4001 bp, Homo sapiens
agccagtgactgacagagccagagtaggacccaaggctcctggttatggccctgcatgcttcaccctcaaggacctgcgccctctagcctggctttagattttatgagaaccacaagggactgcagtgtcttccagccgttattaattgtccctaatcacttccaatcagctgcacctagagcaaattgagggcctttgctggtgaccagagagctctctttatgcacaacaggggagggcgcctttcatgacaaagctgcctccaacaccataaactaccttattggggaaatgatgcggctagcccgaaagggggaagagatttttcaaattataattttcagagtttgcctcaggaaaaaggcgccaaacaattagtttcagggagagaggtggcgtgatgaggtgtggcacggggaagggaaaggggtttagaactgtgtccaagctatttaggagagaaaggggagagtcccggggctgtgaaaggggcgaggaggagagagcagctgggccagggcgagcgtttgaccacacccactagccactccctcccagctgcccgcagagccacatcgaatcgaaacagcagtggcagcggctaagattccgaaggcaggagtcgccatggcaacgggattcatcttgcaggcaactccgcttcgattcactgggtcctgctcgaatctcaagaaactaccagcaaaacggtcacggtggcatttgctcttgatgctctccagaaagtggagatgaaggagaggggaatggagttcaggcatcactaaatatgttatggggcgagaggtagctccgcaaagccaggccgtgaacaacttgagaccttagcagggtttgatgaatgagtaaacgaacaaatgaaggtactaggaaaggcaaagaacatccagaggactgagagctctgggcctcctgcacgtctccactcagagggcaagccgatcacaagcagttggctttcagaaccagctgggtaaacccgattatccagccctcctgccccacagcgagcctaatcattagattatccgacacctccacccccgcgctaccacctcctggcccagggcttcagggcaggcgcttcgccccagcccaggtgctctacaccaagggaccgtggagactgagatgcgccctcccgagagggacgggcggcaaaagccctctgcggtgcctcacaaccgggtccgcaggcggcgcagcctccccggccgccaacaccctgctctccctccgcaacgcccgatttcccttctctctgttttgaaacatttaggtccaacttagtctgaattacaggcgctccgtccctttcgaatggggctggaagtgagggtgccaggggcactgggggctctgctcggacgcgaacgggtacacgagtccctccttccctgtcgccaccgccgtgtccaccaagcctgcctcggggttctccctctcggagccgccgggccgggagctcgcggacgccgctgcagtacccgcggccccagccccggggagccttcagcaaggcggcgagtgttaccccgccagctcctcggccagccgggcgccttagaaagaaagggagggaccccagtccttgggggcgtcttcctccctgctgcctcggtttgcgttgcgctgcagccattttcccacccccagctaggcagccgagagctgtctcggtcccgttcccacccagacccaacctgaaggacgggtttaatatttacctactggcccgggagctccggggaggcagcaggagggcgcgccgcgaacccagcgcccagcccacggaagcacgcccacccccgcaccactgagcagtgccacttaatgaatgagtgcggcgggcaaggaggagcgtcccccttacctgagcagcccctgcatgctggaaaggcggctctgcactctgggtacaatgggatccggttaaacagtttccttcacagccgctcgtaggttactaactcgcaggtgacatcaccctctcctcgcctgataggatacaaagtggctcccactgcgcatggacgctccggtcgggcgcgcagactcctgggagtagtggtcccaatctattagcggagccgggacagctttgctgtcgggactcgcggaactacatctcccgacacactcctccgcccttctgccccgcctcttattcccgcccccttcaggacccgccccctcccagccttacagccttgcagtgttagcggtggtcgttccgaagccgagctgcggaccgcacgggagagtgggagggctgccctgcggtcgtgtgtgttgacttgacctctactttgcccggcgcgggctctgaaggatcggagaggtccggggctcgcgtggtccggccaggctcgctctaactggtctttcttggtccctgctgggaagggacgattaagacttttctgccttccccaggcgtagcagctaattcagagggcttactgttttctgggttaaatacggtcctcgaattctccccgctcaacacttccagaggatggggcgacgccggtcccaaggcggaggaatctccttgtaccccctcaattcacctttctcttttctgcttcccgtttaacggagacaaggtgaccaggcagaacgcggggaaccacttagtcggctgagctgacagaataacggaggttgtcactaccagaagtgcggtgtgatagactagacagtcgccgcaaccctccgtcagggcgcctgctgctgctgcaaagataatactatcgtgcagccatgcttttgttcatccctgcagcagacttcccgcgctggtggctctccactcccaggaagaaaacgtccttgtctaaagttttaataattgtgtatctatgtatacacatgtttttaaatccacaacactctcacctcattttccataccttttcaaatatttttataaagacattaaaccaaacaacatcgtgccgttcaagaattgccctgctcttaacacacctaaatatttatttaaaggtaagcaaaaggtgtgtagcagaattctgaccctttaggcaggttgtattgttaatacataattttttccgtggcatttttcattattcagtgaataccaagtgtcttttaatatgaaaagaatcaatgcatttagttactcgagttgtaaatgtaaattttaatggcatttgatgtgtctcaattccatataatgatcagctcacacacccgttccactagcaaaatctctagaagactgtgcatcttgtgaaaaaaaggttcacaattaagatttcagacaactccctactgaagtgttggtggaactcttatcatttattttctcctttcattctgcaacactaagttgggttcaagtgaaaaaatatttatgaaattagttgaggatctcaggggagaggaaatgctttgttttgctcagagagatgtttagcgatgaattctgatgttcttttaacaagcctgttctttatagacaagacccacttttctcccccgaaagaagatagctttgaatgttgctcttctgtcctcagctacttcttccatttcaaatattatctaaaatgaactctgacaatataaattttcccctggccatcagatcaaggatataatcactgatattctaactaatgggtagacttaatgtaacgcagttcatggtggaaaaatattcagagagaaacttgacctgggatgattctaaaggctcttctaattttataactgtgtaaagcttttagactgaaacataatcagtgagcctgaaatttattgagtcaataaattgaatgtggagcctttctgttaagacagggcttatccttgtagataaaagtatgttactgaggcacactctgaggagtaattttaatggagaaatcaccttacaacaagttctcttggctcttcagtaatgaaggagaagatgcagtctgtctgaaaacaaaaattccattctctt

SEQ ID NO: 1241241 - DNA, 4001 bp, Homo sapiens
gcaggttctggctttctatttcaaacttccttgttaacacctgcaacagagttcttcatgcagtggagatcaaagaaggaagagattccttaaacactgaaaatattcaagatcataaagcgtaagtacactggtaggagtcatctttcctttttcccgaccaactctggttggcaataggcccatcgctccacgcaggagaccagaaatcaaacatcagcttcataacctctctcatattggcttatctttctgctttataaatgaattctggtctataagagttggagtgacatggtcagttcagatattaaccaaggagaacactaacgcagcttacagtatgtccttgaccaaagaatcatgcaaaatgaatagtattctctagtgtctgttgaacaatataaatggtccatttagaactaactccattacaaatgagatcatgtcctttacaggaacatggatggagctggaagccgttatcctcagcaaactaatgcatgaacagaaaaccaaacaccaggtgttctcactaataagtgggagctgaatgatgagaacacatggacacatggggggaaacaacacacactggggcatgtggcaggaggcagggggatggtggattggggagagtatcaggaagaacagcgaatggatgctgggcttaatacctaggtgatgggatggatgacctgtgcagcaaaccaccatggcacatgttcacttatgtaacaaacctgcacatcctgcatatgtaccccagaacttaaaataaaagttgaagaaaaaaaaaaaagaagaactaattccattacaaaatgccagtggtgatcaaagcaggatacagtattcatgtaacatttattaagcatgtttaaaggccaggcactgggccactcccactgtgtgctgttctcactgaaacattatatcaaacctagaagaagatgtttttttccttcagaaaacaggaacagaaaaataacatgattttttacaattatgaagataaaatcaaagcagtgatttgaaaaaaagtcttcctaagtcctatgctagcacccctttaaactatgccataatatcttctgaaatacagaatagaaacactacttgatgcttgaaaagctaagctgaagaatgtacttacatctcttgatgaatgggtcctgcactagatgcatccttcatttcagtatatttgattctaaaatatgatagtacctataaaaagattcccacagcagttattattctaatcctatcattaggctaaataatgatgctgtactgaagtaataatgtctttcaccaaaggatcaatgacaggatggaaagtatgactaattttttaaaaatacgttaatactgtacattcggtgtgggggtaggggagcattagggaatcccaataggtgtgaagtaaatgaaggaattatttagcataatgtatagactaaggactgggatggagacaaattaggaagggcaacttaagatgcagtactgccacatatttgaagaactgaaggtctaaatccctccacccacttaaagcacaagcaaagcacttggatgtagtaatactaccctcttctaactcttccttctccacaggtttagtgctgacagtgagggtgcagacataaaggtgaatgggggccatttcactgaaaaggaaaagtccatgtcaaaccaaaccaactcattcacatcctctcctcttctccttctctggctccccaccaatgccaggatagaaaactgggactcaccaccagttcactgaacatgacatccagctcctccacagggggcatgggcaatgctggttccatggtctgaagcgcaaagttgctatcatttcgcagccgatacgtgatttctgggtgatcattatttcggaaacagcaaaagatgaatgaaatacctcgtccacctctctttcttggggccatggctgaattctgttctatttcttgatgtgactaaacgctgcaaaaagaggatatgacatggttaagagtacaggaacagataaaatgatttttaaaaggccagaccaactcaagaaagagctccgtgtgctgacgacactgtgtgcgccctgcagggcacagagagaacaacaccgagtgggtttggagtccacttggacagagaacacacacccttctattcatttgttgactgtttcctgcaataactgctgagcaaacaggacaactccagccactctcctgacaacatacactctaatcacactgagctactgtctgttctttgtacatcacattccctttcctgccgacctagtttgttcttgttactcttcttggaagactgaccttctcttccttgccccctaggagatctcttccttatcttttaaagtctgattccagactgatttaaaagttctcttccctaaatagaataacatatatgctatgacatatatatccactttagcatgatcacattctaagctctttatgagtgtgtcttcctgttaggctgtggtaactgaagtgaggggaagcggctgtgcatcaagtattttgtgggcctagtgccctgcacaatcccaggaagagagaaggcactccataaatgttcactgtattaactaattcaaatttacaacaaagccaggacttgagctagatgggccagaaattttcaaactgaaaagagaaaatgaattcaccagcaaggaaaggaaatggttaaattacacacacacacacacacacacacacacacacacacacacacacactaatagaatattatacactcatttaaaagaaccaaggcatttgtatatgtagatatgggaaaatgttgaaaatgctataggagtacatgatttaaagaatgtatgtatttataaatatatgaaagaaattactaatagcagtaatcctcaaaataaaaacagagggttggagaactattcattttcatttttacccttttgaatccaaattttcaccacaaaaacatgtttttaatgatgatagagggtatgttttaagttacaactgtatatattgccttggaaagatttccagttgatactgtctattgaaaaaaccaagtcaaagaagaacaataggcatagcatgatgccattgcgtctttttaaaaacgtcatacaaaaagccatacatgtaaattaatttccaccaaatggtccagaaggatagacagcaaatccctaattcctctcttctgagagtggaataagattagaaaaaggcaagaaaaaaaatgttcttttcatgcttttttaagaatagtggatacatttagatgtgtaactgttataagtcttcaatgaggttaaaaaagagatgaggttaaaagaaaaaaaaaaaggtgggatgagaattggtccttcaagagatggaagggcaggggaggagaaacatatcttggtcagggaaggtggtagaacaaggctgtgaatgcattatttatatacttaaatataaaagtatacacatagaagaaagactagggtcaagtttgtcaacatttaacaaatgtggacagtgagaaaacagatgccttccttgaacttttttttgttcttaagttttaaaagtaaactccaacccatcgacttatggcatcttccaaatcagataatccaactccaaaatctgtagccaatttcttgattttgtaattaacactactacgtaaataagtaaaagcactcataaacaactataatttccagagacttccacagtctagtcctccgctgacttgaaggcaaagtggtctctacagtcaggaactgggaggttctgtgacgggaagagagggaaaggttaaaagcagggtgtctatcacagagtccacaatgatgctgtaactggctcttaaataaagactaagccaaacatccaacatcctgttctgttgaagcatatgtctcctggcctagggtgtacttgtgcaaggtcatactgagacatatg

SEQ ID NO: 1241242 - DNA, 4001 bp, Homo sapiens
tcaaatcatgaatgccaagtctacaaatgaaaatagtaccataaatactgactggactggaattctcttgacatactgctttgctcccctcaagcggacaataggaatgcgccacttacaatcttgagattcatgcagacaaaaaggtgcaattgcacaaaacaataaaatgtaaaagtcaccagccataaccagtgagaactggctcaaatgaatgttacataggaatctggtctgtgaccgaagcagcacagtaaaatgccaaaacagagatattacacaaaccacagtgtacatccttacaaaacacatgcatatgaatatctacgcctcttgtcttttgacttaaaaagcttggagacataaattgtatgtttgtttgctacaattaatttcttcaggaaaaatgaacctatcaagtaaaagcactttggtgcttaaaaacacacacacacacacagagaaaagaaatgatctgaaaagagataatagaagaaaacacatgacaactgcacagcatcaccactttattgtgggagggccactacctggcatgtgtctagtttagatagtatcacttggtcaggtgaggacgtttgctgtttccaaaactacattttaaggtcactgaaaacaaagctgtcgccattattctgaggcggggtcaaaagctgttcatcaatacattaagctacaaagttctttttcttccccattaatgaagactgcatagaaagactgagacactgacagaaacccagtaagataaatgcttaccgagagcaggttctcttttctcccacctccaccaccaatcacagctggcagaacgtataaaatatgagaggaggggacacagtctccagccaaatttccatcatttccatctagtttgagctgccttatacaaagggcttctatttgaaattaagcaccagcctgggtgaaagctggcatgctggggagagctctcggagaggcacggctccctacaggcgctccagtgtaatcgtaaaactcggccctggacagttaagcacgccacaaaccccctccttggcttttggcccctctcggcgggaggagataaagtcaagaaaacctccaaataaaatggtattttaagtgggagtttgcaaaccgctggggagagggcatatactcatctaactaaggagaccgaacgttagaactaggcgactccaagaatcccgaaggcagaggaggagggaagagcggccacccccttcccgcaatccgcgcgaggtcgccagacacaaagcgggcacacgccagaaacgcgtgggcgtcggcagcccacacgccgcgggcactcaggaaggggatcagggaggtatggggcggtcgggggcgtcccataacagcgagcatctccccagccagagtcaacctcgcgcccgccccaggccacctgcccgacctccagcccctgggcaggaacagccgtgctccaccttcgggcacgacctaccaattgctttcttagcagcaagatgttctcctccaagaacttctcctccaggcgactgcgctgcgccgcctcccccagtagctccccagcgcggggcgcagcggctcccgcacccccggcgccgcgcagggcgcccctgaccagcagctcttggcgctggcgcaggtactccagctccgccagcccggccagcgtggcctcctgccgctcccgggtgcgctgccgctcggtgtctgcctcgcccttctcccgccagcgcccctcgggctccgccgtgcgctgctcgcctcgggccggcgccggaggctccagctccttcgccgtcccggccggactcggcttcatggcccccagtcgggcagcgagagccgtcaccgcagccgggccgcccaggcggaggagcagggcgctagggctgcggccgcgggtgggctcatgccgccctgtggcggggcgcggcgctggcggggacggtggctagaagccctcgagtcctgcgcgcgaccgccggctgctgctgtcccggcccgggcagcgccgtccgctgtcgccgcgcgtccctcgccgcggcccggcagctgataacgccctgcccggcgctacgtcacgcgcggcggccctgcaaacccccgcctggcgcccgcctccccgcgccggcccctcggctgcgacgcttgcgcccccaggcttcccctcctctgtcaggcgcgccgcccggcccccagagccgcctcctcctcgctcggccctccccgcccctcctcgcccctccccgcctcctcccccgctctcttcgcgggcctcctcgcccccttttcgggtttactgcacccgattttgccctcgctcctcattggctctttctcgtcgcccaaagctcggggcgagcgcctggagccccagcatcctgttacagtcggccgcgcaggcaggggccgcgacgggacgcggcagttgggctctccggagaactttctgaaactcgaccaagttgcagcacagtcttaaccctttccccacacggccactcctcatttccactcacaccgagttaggtttctttcacttcccaagcaaggtattgcaagtgtattcacagacactgtggggttggttccttaactccactttgtaaaggcaagcaatacagagcacaatgcagtgttctaaaacttaagttttgttgtcgttttaattttttaacgtcggtcttacgatggacggcatttaaaattaggcaggaggatgtcgttgtatagcgagaggttgcatcaattcttttacaagcctacgatttgagtgcgcgcgcgtgcgcgctttggtttttgtttgagcttttattattacttagtctgcgtttacaataagagctctgactcagaaatcagactgtctggatttgtatcccagtttcacccctaaatagctgtgcgggcaacttactcccttctctgtgtacgttccccccactgtaaaagggagcagctgctatgggaacctgctgttgaagaattataatagtatgcagcatatgctatatattgtgggggctgtgcacttacaacgtggctagcacatagatagtaaaggtgatatgagttgtagcttttctccagagggatttataagtcttccctcttgaagtatcatgtattggtcatctctgcttggaacacactactccagacccctatcccactgaaatttccggtgggataggggtctgaaaattccactagctggcttatctgtggaaaagtaccacatatatctttaaaagcagtacatccaagaacctcggaaattcaatccagcaagtcacaattgctgaagttcaggcaaagtgttgtgtgaaagagtgcatcctatatcattatttcagacacttgcacttttgcccatctgcttacccgtgctaggaattcctcttctttcctcccctctctgtgtggtctaaccacccttccaacctttgagctccagttaactatataaatatctgattctgatcccatgctacctgtatggttatttatctgggtgtgcacacgcatatctatctacgtaggtgtttatgtgtatctcttctctccatctacattatgaaagcttcctgaaggcagggactgttttaataccctcttagtatcgctgtattcagcacattaccttgcaagcattcacctgacaattgctagagagagactcgagaatgtagattggttgtaaattgttttttcattagcatacttttaaacttaatagtacccatttaatctctactacaaatagaattaagttgacatttaccaaaaaacaaaaacaaaagaactcccttgccacctttcactttcctccccattgctgcctcccacagacatgaaagaactacaaacttgattcataattaacaaggttgtatattagctctaaaaatggaattatggtcaggtgttcataagcatacaaaatcgattctcttcaggttatctattctttatgcctgctg

SEQ ID NO: 1241243 - DNA, 4001 bp, Homo sapiens
gaccctagaggcttatgaaggcagggtgacttctacatggagaaggcatcttttttaaaatcagctttcagaccctgccttgctcctactcttccagacctggaaacaaaaacatcaaacaaaattaaatcaaaagttctcatcaaggttccttctccgggctggctaataaaaacatatagtaccgtggcagagggcggtgggtgggtggtggagaatacttagagcaaaggggtagtgtatctggtcggatgatggttaacacatcctgaaggcaaggacgccaccacagacaactaggtcttggtcatctaggacaaaagtcaaagatggtaactaaatatccaatcaaaaggctaatctgcaacttcagtacacaagtcattagatcctcagacctgttttaaattctaagaaatatctctggtgtgtcagaacaatgtaaatgtacaataagcattctataggtctgtaactttaagcacagcaccactgtcaccagactttttttttttttttttgaggctgagcctcactctcacccaagctgaagtgcaatggcacgatctcggctcactacaacctccacctcccgggttcaagcgattctgcctcagcctcccgagtagctgggattacaggtgtgtgccaccatgcctggctaatttatgtattttcagtagagatggggtttcaccatgttggccaggctggtcttgaactcctgacctcaagtgatctgcctacctcggcctcccaaagtactgggattacaggcatgagccactgtgccaggcctccagacaattccaatgctgtattttgtctgtaccccaactagaccataaactctttacggataaagaacatgtgccaaagcttttaccataatgcctcatattggactgaaaatacaactgatgacctgactgatgatcacactgaaaagaaaccatgaatgctggcatgttttcaaagtcaaagtagcaggtgataccagtgatagaggccacgcctgttttcagtattcactgaatccccgttgggcaagaaaagtcagattttaacaaaaattgatggagactgttctcgctaaatatagcagtctacaaggttaccaaatcctggaatcaaaaggaaaaataaggctaaaatagagttatgtgaacaaaaattgggttcaggacagtgaaataacagcttcctcaacaagaaaaaaagtagtagcagctaaaaggcaaaatcaagtaaaggatgattcaacaagaaaagcaccagtatttatattctttgcactttcattgaaacgtttcaccggagattggtaatgattaggccaagatgacagagatgattcaaggttgggtttttcatttgaaaagtctactaattttagagttgtgttaaacctaagttaaagttggaatagggttttccccggaccaatattaagtgaagtggatcaccaagtggagtagcggcacgaaggtggtttctttagacttttaagtccaactcctacggagccgtttggtattaggcatataatctaagctttctgagcctcaatttccccattcacaacaaaagggcaatgcaggctcttctcataacttcaaggggcggtggtctgatatagagtactatgaaaacaaaagcagcacaccaaagtaacacattattattatgatcacttatagaaccattacccgctaggatgaaactccccacacaagagatgaagcccgagagaaaagagttgaaggggaaggtccccacgaggagacagtaaccgaactgcagcgccccggtcagcagtatatacagcaggtacgcgtccagcaacttcagacgctgcggagtggagctcaagtactcttctaagaaccgcgaaatgacagacactaccgacgccgacataactgcacgcaaggtactccggtccgcgccccaaactcttggaggacccgtcgaccacaccggatgtgctgtttgcgcatgcgcaccctcgtgacctaactccgccctccccggtgtgccaatttgcgcaggcgctgaggccggccagggcgcgtaacaactaatgcgcagacgcggactgcatcaacagactcaactacaactcagaaaagttaatgcgtctgcgcaatggccctatcaatgagctggggacgtgtactctttctgttctgtttccgcccgtcagctcggtgacgcccacagttgctctggcaacaagacacactgggaggaagaggggaataagctttactggggaccgcgtagctaaccagaggtatccggctctctctggtccttctgagtcctggaagatttaacggtttgcatctactttgaggcaatgcctggcgttcctggggtttgataccagcctgaccctaattctgttaagggcgctgtctgcagatgtctgtcacagatcattggaacaagtcaagttcatccgcagtgagacccggcgcggccaatcactgcacaggccccagtttagacttaattacttgggggagtgagtgggtgtggtgaggggcgggaggcagggaggaagcctgacctcagcagggttctgaactggaactcgggatctggccctgcaatgccaacatttattgggcgcctccttggggcctgacgttgtactaacttgtagggactctcacgtgaatcagatatatttgcagccttaaaagagctggtgaagggagggacagctgtcgaatgtcgtgcaaaaagcatatggtcaagtttagcagctctctttccgcaagctggtatcttgaacctggtgtaatatcccgggatgtcagcgtcgaaaggcccgaaagagcatgcctggttcaaccctactctctccaactcattttgcagaagaaactgaaatggtttcaggttttgtattttaacaagtgggattattttgagggttttaactgtttttttttttttttttgagacggagccttgctctgtcggccaggctggagtgcagtgtcgcgatctcggcccactgcaacctccgcctccctagtagctgggactacaggcacgcgccaccacgcccggctaatttttgtattttcagtagagacggagtttcaccattgttagccaggctggtcccgaactcctgaccttgtgatccgccagcctcggcctcccaaagtgctgggattacaggcatgagccactgcacccggcctgttttaactttttttaagaaattaagttctggctttcgttgcccttttaatttcacgtgaatccgaccttctagacccagttcatctcaccttttagctgtaagtttttccacacatgaccaggtactttattttcagcttcttaatattttgaactgtacgtgagcaaaattcctaaaacagcaggtgaacaacagcgttcctgccttttcacttttttttttttttttttttgagatgaagttttgctcttgtcacccaggctggagtgcagtgaatggtgcgatctcggctcactgcaacctccacctcctgggttcaagccattctcctgcctcagcctcccgagtagctgggattagaggcacctgccaccacgcccggctaatttttgtatttttagtagaaacggggtttcgccatgttggccaagctgatcttgaactcctgacctcaggtgatctgcctgcttcagcctcccaaagtgctgggattataggagtgagccactgcgccggccccttttcactttttatttgcctttagactggaaactctacacgcattaactaacggatgtattatcagtggtgatcaaagccttacttaagttctagaaagaagagaaataacctaagaaacctttagagtctatttgaatagatagatttatattcatacccgtggagatttgtgcagctatatgaacataagttcagcctaaacctatgttgctgagaaagaaaaaaaaagagtggataacaagctggttcttatttc

SEQ ID NO: 1241244 - DNA, 4001 bp, Homo sapiens
actaagttgacctcccagcgagctaaacattctaacatcatttccttagaacaagagcaagaccaatacgctgtggacatgacctactaagttgacctcccaacaagctaaacatcctcacagcatttccttctgagcctctgcctgagaagtccaccacagaagacaatattctaagctgggtgcggtggtgtgtgcaactgtagtcttagctacctgggaggcaaggattgcttgagcccaggagttgcaggctgtggtgtgcacttgatcacacctgtgaatagcccgttctccagactggggaacacagtgagccctgtctatgtctactaaaaacaacacaaaacacaaacaaaaaagaatacaatattctgaagggacccccaaacccatcttctcctcaaagagccataagcaaagaaagaaagccagctgcacccttttccagtcaattccaggtggtctctcccttcaaggcattctttcctcaagaacaggttagagtcagggcaaattaaacttgtttttcaagtaaatcgaagtggcctcatatcatgtgtcaactgccttactaaaaagttcaacactcccttcccatctcttcaccccttacatcactcctttcccactaggaccccccccttttttttttcaagcttacttggaaaatagactatatttgtgtagtcacagagacaggctcccttgaatagcccctcaaacacatgagcaggtcctcttggtgaccctccctaggtaagaaccactcttactgggtatggagctgagtgccatgggtgcccagcagggaaaggctgttcagctcaaacagaacagctgtcctgagcgaatcccatttcctaacctctgtaattttcctgcctggagttgggatcaaggcactgtggtagcacctgctgggggtcacaccagagggtaagttacctgcggaggagataggccagtacctgggccagatccacatcttcatcctcttcttcctcttcctcactccgacgcaggccagcccctcttcggggcaagccctcggaggggtctccggacccggatcctgcactgctgctgttccgcgatcccatcttctggtcacagcattcttaggtcctgtgcgggggctcctcctgtcacctccttgggtttggtgaaagcaaagcgtgctctagaaataccagggtctcctgagacggggtagtagctatctctaggagggtgacccttcctcggggctgagatcccttttctttagcctatgccaactaccaaggcgtcgggaacacaaaccttctccaatcctgtgaagcaaagaaagcaagagtgaaccgtagtgcgctaccctagctcaccaactgaagaaagatttgttttctacaccaaactcacctatcgaagtccccggactggggagcgggaggggtgttgggcggtgttggatttccaggtaacctctctgaccgaccaatcgaaatccctctcggaagaaagcgcttcactagcttatctcatctaaccaattagaagccttaggactcaaagaccctcgacgcccccaccttatcgaccaatcagagcgcccccttacaaaggccggcagcagtgacagccaatgaaaatagaatttggcctaacacccctccttcctcgcctcacgcccacgtggtgcgccgggggtgtgtacgccatgagggggaggaagccgagaagcacctcccactgaagccggcggtaaccgccccacgcgagaccacccaccagccaggagcggtcgcaggacccgcagcggcgcgaggccttgtttacaccgactgccgccactgcgttggccaaccgctcctccgtcacgcgcttcgctcgtcacgcatctcgcggcttcctggccggcgggctgcaaacgtcacacgacggccccgcccccttggccagccaactggacagcggagcacgatgattgataggtaggcgggagaatgcgcgaggtgcctgaggggaggagaaagtgcacacccaaggagggctgttagctcttgctggggaggagtaagtgggaactgccagcttcctgaatcagagacagccgaactaggcgtaacggctgagaggcggggcttaaaaaagaaacgtttggtggttcgctaccgagaggtattttagcaagggatataatttactgtctgtccctaaagatcatttggcatcgcacttttcagacagtgcccaagggcctcctttctccccactgcttcccctgtccagctggagccgttcttctgtcgctggccgcagctccagtcggttctgccctaaggggtgcccagcgtcccagtagacctccataccgtccttccgggcttagcttttggaagccttgctcttgggacggtccccttttagacctccctttatccggtctgacaattttttaagacaatccctggctttccgccgcggtctttgcagacgttccctaatacacgcgtctttctgtcaaagcttttccggttccgctgtcccctttgacgctcccttggccctccgggatttgcagaccttcgctagtccctctgtcctcgcggtgcctctccgcccccggccgcgggtccagggtgcgcgctcgccgcctcctgccccctcctgccccctcctgcgggtttatgagtaacaagcctgagtccaaggccgggagttgccacatctctgatcctcgccctggctgggtggggacgtgtgggttgaatgaccttgctgtctcgggctcagaggctcagggtccgagctgaacttcattccctgcagcctgcacttccttgggaaagctgcgagcttccctccgcccgctcctgagggcagggatgggagcgagggctcgtggccttcttgggccctcctggggcctctcccagtgagggcgagggtttggccagctttcgggcgacgtctcctagtctctagatccggagacctgagcttgtcaccagggctagctttgatggcctctgcgcttagaagggtcctgaatgtttggtttaatgttctagtgttaacggtcttgaaattattagtaattttaaagcaagtgcctggtattttcatcttgcactcggctccactgattatgtaggcggtctgctgggcgcccatcctctattgccagattacttactatctgtgctttaacgtttattgagactttaggattccgtggtttctgggttatccagcctggaaaatcgggatctttatttattgattgattttacctgcgttctcccagaatgtgacggaatcattttttttttttattatactctaagttttagggtacatgtgcacattgtgcaggttagttacatatgtatacatgtgccatgctggtgcgctgcaccactaacgtgtcatctagcattaggtatatctcccaatgctatccctcccccctcccccgaccccaccacagtccccagagtgtgatattccccttcctgtgtccatgtgatctcattgttcaattcccacctatgagtgagaatatgcggtgtttggttttttgttcttgcgatagtttactgagaatgatggtttccaatttcatccatgtccctacaaaggacatgaactcatcattttttatggctgcatagtattccatggtgtatatgtgccacattttcttaatccagtctatcattgttggacatttgggttggttccaagtctttgctattgtgaatagtgccgcaataaacatacgtgtgcatgtgtctttatagcagcatgatttatagtcctttgggtatatacccagtaatgggatggctgggtcaaatggtatttctagttctagatccctgaggaatcgccacactgacttccacaatggttgaactagtttacagtcccaccaacagtgtaaaagtgttcctatttctccacatcctctccagcacctgttgtttcctgactttttaatgattgccattcta

SEQ ID NO: 1241245 - DNA, 4001 bp, Homo sapiens
tggtctcctataaaacacagtaggaaagagagttttactcttacagcaagagcaagaccaacatgctgtggacgtgacctactaagttgacctcccagcgagctaaacattctaacatcatttccttagaacaagagcaagaccaatacgctgtggacatgacctactaagttgacctcccaacaagctaaacatcctcacagcatttccttctgagcctctgcctgagaagtccaccacagaagacaatattctaagctgggtgcggtggtgtgtgcaactgtagtcttagctacctgggaggcaaggattgcttgagcccaggagttgcaggctgtggtgtgcacttgatcacacctgtgaatagcccgttctccagactggggaacacagtgagccctgtctatgtctactaaaaacaacacaaaacacaaacaaaaaagaatacaatattctgaagggacccccaaacccatcttctcctcaaagagccataagcaaagaaagaaagccagctgcacccttttccagtcaattccaggtggtctctcccttcaaggcattctttcctcaagaacaggttagagtcagggcaaattaaacttgtttttcaagtaaatcgaagtggcctcatatcatgtgtcaactgccttactaaaaagttcaacactcccttcccatctcttcaccccttacatcactcctttcccactaggaccccccccttttttttttcaagcttacttggaaaatagactatatttgtgtagtcacagagacaggctcccttgaatagcccctcaaacacatgagcaggtcctcttggtgaccctccctaggtaagaaccactcttactgggtatggagctgagtgccatgggtgcccagcagggaaaggctgttcagctcaaacagaacagctgtcctgagcgaatcccatttcctaacctctgtaattttcctgcctggagttgggatcaaggcactgtggtagcacctgctgggggtcacaccagagggtaagttacctgcggaggagataggccagtacctgggccagatccacatcttcatcctcttcttcctcttcctcactccgacgcaggccagcccctcttcggggcaagccctcggaggggtctccggacccggatcctgcactgctgctgttccgcgatcccatcttctggtcacagcattcttaggtcctgtgcgggggctcctcctgtcacctccttgggtttggtgaaagcaaagcgtgctctagaaataccagggtctcctgagacggggtagtagctatctctaggagggtgacccttcctcggggctgagatcccttttctttagcctatgccaactaccaaggcgtcgggaacacaaaccttctccaatcctgtgaagcaaagaaagcaagagtgaaccgtagtgcgctaccctagctcaccaactgaagaaagatttgttttctacaccaaactcacctatcgaagtccccggactggggagcgggaggggtgttgggcggtgttggatttccaggtaacctctctgaccgaccaatcgaaatccctctcggaagaaagcgcttcactagcttatctcatctaaccaattagaagccttaggactcaaagaccctcgacgcccccaccttatcgaccaatcagagcgcccccttacaaaggccggcagcagtgacagccaatgaaaatagaatttggcctaacacccctccttcctcgcctcacgcccacgtggtgcgccgggggtgtgtacgccatgagggggaggaagccgagaagcacctcccactgaagccggcggtaaccgccccacgcgagaccacccaccagccaggagcggtcgcaggacccgcagcggcgcgaggccttgtttacaccgactgccgccactgcgttggccaaccgctcctccgtcacgcgcttcgctcgtcacgcatctcgcggcttcctggccggcgggctgcaaacgtcacacgacggccccgcccccttggccagccaactggacagcggagcacgatgattgataggtaggcgggagaatgcgcgaggtgcctgaggggaggagaaagtgcacacccaaggagggctgttagctcttgctggggaggagtaagtgggaactgccagcttcctgaatcagagacagccgaactaggcgtaacggctgagaggcggggcttaaaaaagaaacgtttggtggttcgctaccgagaggtattttagcaagggatataatttactgtctgtccctaaagatcatttggcatcgcacttttcagacagtgcccaagggcctcctttctccccactgcttcccctgtccagctggagccgttcttctgtcgctggccgcagctccagtcggttctgccctaaggggtgcccagcgtcccagtagacctccataccgtccttccgggcttagcttttggaagccttgctcttgggacggtccccttttagacctccctttatccggtctgacaattttttaagacaatccctggctttccgccgcggtctttgcagacgttccctaatacacgcgtctttctgtcaaagcttttccggttccgctgtcccctttgacgctcccttggccctccgggatttgcagaccttcgctagtccctctgtcctcgcggtgcctctccgcccccggccgcgggtccagggtgcgcgctcgccgcctcctgccccctcctgccccctcctgcgggtttatgagtaacaagcctgagtccaaggccgggagttgccacatctctgatcctcgccctggctgggtggggacgtgtgggttgaatgaccttgctgtctcgggctcagaggctcagggtccgagctgaacttcattccctgcagcctgcacttccttgggaaagctgcgagcttccctccgcccgctcctgagggcagggatgggagcgagggctcgtggccttcttgggccctcctggggcctctcccagtgagggcgagggtttggccagctttcgggcgacgtctcctagtctctagatccggagacctgagcttgtcaccagggctagctttgatggcctctgcgcttagaagggtcctgaatgtttggtttaatgttctagtgttaacggtcttgaaattattagtaattttaaagcaagtgcctggtattttcatcttgcactcggctccactgattatgtaggcggtctgctgggcgcccatcctctattgccagattacttactatctgtgctttaacgtttattgagactttaggattccgtggtttctgggttatccagcctggaaaatcgggatctttatttattgattgattttacctgcgttctcccagaatgtgacggaatcattttttttttttattatactctaagttttagggtacatgtgcacattgtgcaggttagttacatatgtatacatgtgccatgctggtgcgctgcaccactaacgtgtcatctagcattaggtatatctcccaatgctatccctcccccctcccccgaccccaccacagtccccagagtgtgatattccccttcctgtgtccatgtgatctcattgttcaattcccacctatgagtgagaatatgcggtgtttggttttttgttcttgcgatagtttactgagaatgatggtttccaatttcatccatgtccctacaaaggacatgaactcatcattttttatggctgcatagtattccatggtgtatatgtgccacattttcttaatccagtctatcattgttggacatttgggttggttccaagtctttgctattgtgaatagtgccgcaataaacatacgtgtgcatgtgtctttatagcagcatgatttatagtcctttgggtatatacccagtaatgggatggctgggtcaaatggtatttctagttctagatccctgaggaatcgccacactgacttccacaatggttgaactagtttacagtcccacc

SEQ ID NO: 1241246 - DNA, 4001 bp, Homo sapiens
ggtgtcaggggtagcatccactgtgagtaccaaggagaagtttcatcctaggtctgccagcctcagaggacagttagcagaactgtacccaagcccacccctgtggctgaatatactggggctgtaaggactccttattccttaaattatcgtaccttctttcaatgtaacctatcattcaaaatatcactaaaaggttttctagtaaaagtcttccaacattaggggcttttcctcttaccaggtgggttgtatcgatccccaagacgaccatcccaagctctgtcattctcttcctctgagtccaagagggcctgaatgaattgtaaatttgctgcacctcctccctgcaccaacctcacttggcctctgtggagagacccccattataaaggaggggacttcttcccccaaaccaaccaaattcagagtcaatggctatctagctcttagaccacttggtactcattttgaggtttgaggctgactagaccttggctgttatttttggtctcctataaaacacagtaggaaagagagttttactcttacagcaagagcaagaccaacatgctgtggacgtgacctactaagttgacctcccagcgagctaaacattctaacatcatttccttagaacaagagcaagaccaatacgctgtggacatgacctactaagttgacctcccaacaagctaaacatcctcacagcatttccttctgagcctctgcctgagaagtccaccacagaagacaatattctaagctgggtgcggtggtgtgtgcaactgtagtcttagctacctgggaggcaaggattgcttgagcccaggagttgcaggctgtggtgtgcacttgatcacacctgtgaatagcccgttctccagactggggaacacagtgagccctgtctatgtctactaaaaacaacacaaaacacaaacaaaaaagaatacaatattctgaagggacccccaaacccatcttctcctcaaagagccataagcaaagaaagaaagccagctgcacccttttccagtcaattccaggtggtctctcccttcaaggcattctttcctcaagaacaggttagagtcagggcaaattaaacttgtttttcaagtaaatcgaagtggcctcatatcatgtgtcaactgccttactaaaaagttcaacactcccttcccatctcttcaccccttacatcactcctttcccactaggaccccccccttttttttttcaagcttacttggaaaatagactatatttgtgtagtcacagagacaggctcccttgaatagcccctcaaacacatgagcaggtcctcttggtgaccctccctaggtaagaaccactcttactgggtatggagctgagtgccatgggtgcccagcagggaaaggctgttcagctcaaacagaacagctgtcctgagcgaatcccatttcctaacctctgtaattttcctgcctggagttgggatcaaggcactgtggtagcacctgctgggggtcacaccagagggtaagttacctgcggaggagataggccagtacctgggccagatccacatcttcatcctcttcttcctcttcctcactccgacgcaggccagcccctcttcggggcaagccctcggaggggtctccggacccggatcctgcactgctgctgttccgcgatcccatcttctggtcacagcattcttaggtcctgtgcgggggctcctcctgtcacctccttgggtttggtgaaagcaaagcgtgctctagaaataccagggtctcctgagacggggtagtagctatctctaggagggtgacccttcctcggggctgagatcccttttctttagcctatgccaactaccaaggcgtcgggaacacaaaccttctccaatcctgtgaagcaaagaaagcaagagtgaaccgtagtgcgctaccctagctcaccaactgaagaaagatttgttttctacaccaaactcacctatcgaagtccccggactggggagcgggaggggtgttgggcggtgttggatttccaggtaacctctctgaccgaccaatcgaaatccctctcggaagaaagcgcttcactagcttatctcatctaaccaattagaagccttaggactcaaagaccctcgacgcccccaccttatcgaccaatcagagcgcccccttacaaaggccggcagcagtgacagccaatgaaaatagaatttggcctaacacccctccttcctcgcctcacgcccacgtggtgcgccgggggtgtgtacgccatgagggggaggaagccgagaagcacctcccactgaagccggcggtaaccgccccacgcgagaccacccaccagccaggagcggtcgcaggacccgcagcggcgcgaggccttgtttacaccgactgccgccactgcgttggccaaccgctcctccgtcacgcgcttcgctcgtcacgcatctcgcggcttcctggccggcgggctgcaaacgtcacacgacggccccgcccccttggccagccaactggacagcggagcacgatgattgataggtaggcgggagaatgcgcgaggtgcctgaggggaggagaaagtgcacacccaaggagggctgttagctcttgctggggaggagtaagtgggaactgccagcttcctgaatcagagacagccgaactaggcgtaacggctgagaggcggggcttaaaaaagaaacgtttggtggttcgctaccgagaggtattttagcaagggatataatttactgtctgtccctaaagatcatttggcatcgcacttttcagacagtgcccaagggcctcctttctccccactgcttcccctgtccagctggagccgttcttctgtcgctggccgcagctccagtcggttctgccctaaggggtgcccagcgtcccagtagacctccataccgtccttccgggcttagcttttggaagccttgctcttgggacggtccccttttagacctccctttatccggtctgacaattttttaagacaatccctggctttccgccgcggtctttgcagacgttccctaatacacgcgtctttctgtcaaagcttttccggttccgctgtcccctttgacgctcccttggccctccgggatttgcagaccttcgctagtccctctgtcctcgcggtgcctctccgcccccggccgcgggtccagggtgcgcgctcgccgcctcctgccccctcctgccccctcctgcgggtttatgagtaacaagcctgagtccaaggccgggagttgccacatctctgatcctcgccctggctgggtggggacgtgtgggttgaatgaccttgctgtctcgggctcagaggctcagggtccgagctgaacttcattccctgcagcctgcacttccttgggaaagctgcgagcttccctccgcccgctcctgagggcagggatgggagcgagggctcgtggccttcttgggccctcctggggcctctcccagtgagggcgagggtttggccagctttcgggcgacgtctcctagtctctagatccggagacctgagcttgtcaccagggctagctttgatggcctctgcgcttagaagggtcctgaatgtttggtttaatgttctagtgttaacggtcttgaaattattagtaattttaaagcaagtgcctggtattttcatcttgcactcggctccactgattatgtaggcggtctgctgggcgcccatcctctattgccagattacttactatctgtgctttaacgtttattgagactttaggattccgtggtttctgggttatccagcctggaaaatcgggatctttatttattgattgattttacctgcgttctcccagaatgtgacggaatcattttttttttttattatactctaagttttagggtacatgtgcacattgtgcaggttagttacatatgtatacatgtgccatgctggtgcgctgcaccactaacgtg

SEQ ID NO: 1241247 - DNA, 4001 bp, Homo sapiens
agtctcagctactcgggaggctgaagcaggagaatcccttaaacctgggaggcggaggttgcggtgagccgagatcgcgccactgtgctccagcctgggcaacaatagtgaaattccgtatcaaaaaaaaaaaaaaaaaaaaaaagtggggggattctgtagactagcgggctgtaatgtgcaaaacgctaacgccactggtctgtaaagctgaatacaaagtagcttctacaggccagggcggtggctcacgcctctaatcccagcactttgggaggctgaggtgggaggatagcttgagcccaggagttcaagaccagcctgggcaacatagtgagacacccctccgccccatcttaacaaataatttaaaaattagccgggtgtggtggtgcatgcctataatcccagcagttaggagttgttcactgtaaaacaacattttagacagctgacttaaaaaacaacaaaattttctcttaacacttatttaagaaatacttcaggcgcaagctttgtactaacgcccaccctgagttggtattttcaatcctattttacaaatgaggaaacaggcttacaggactaggtaccacacccagcgtaagttaaatggtggaacagggattccacctctgttggtaggacccccaggcctggttacccacagaacaccacctcaggccgggcgcggtggctcacgcctgtaatcccagcactttgggaggccgaggcgggcggatcacgaggtcaggagatcgagaccatcctggctaacacggtgaaaccccgtctctactaaaaatacaaaaaattagccgggcgaggtggtggtcgcctgtagccccagctacgcgggaagctgaggcaggagaatggcgtgaaccccgggggcggaggctgcagtgagtcgagatcgtgccactgcactccagcctgggcgacagcgagactccgcctcaaaaaaaaaaaaaaaaaaaaaaaaaaaagaacaccaccgcgactctaatttccatcgttatttaaaatcagagtttgggactttggaattgtttcctctaggaagccgtcccctcagttttctttgcttctggctgcgctgctggagtcacaagacaatgcctgtagaacaccatggtgaaaggcgtcatggtttctgaagcccccggggagcccacgaggcgtggctttctcgctaactcacaactcagagtggaggcgagggccaaacccaggccccatcacttgctagttgtgcgctaccccgacggacaaccaaactgcacccctttctgcgtctgacaaggacatcatagcgctggcaaatgttagcgcctgtgaagccggcagcacagagccggccacttcgtaagcttcaaccacacctaacctgttatgctgacctgaacattcacaggggacaccgccccaaggcccgcagcccagcccccgccaggtgtcgggtggggccttcagcagcaggtctcagagaagcgcttagagaaacgccctcagcggcgacactcggggtgccctccctgcgtgtttacggttgcagcactgatccggccggagggccccacgcgccccagaacgggcggagcgcgccggcccagctgccacctaggcccggtggcgccggcgttccacgtgctcactcctccccgcccctccccgcccctttccctggccttcctcgccgcgcctgtctcccaccccgagctctgcagcgggagcgcggcagccctcgaatcgatgccagtaggcaccccaggcagcacagtcttacctgttcagcgtgtcccttccggattcccctccggctcagctctgcaggagttggagcgaagcgtgcaaggacccggaaagaccaaggtgtagcgtcagccagttaggtggatgcgttttggtgttgtagcagccgatagggctatagcggccgttctttccttctcactggacgcggcttctgtctgtcgacgtcaatagggacgatctcatgaagaaggcggggagtggggcttcggctcctcccaggcctggcctgtctggggcggatgcacgtggaggctggtcatggagcgcttgggggtggggccaggcgcacgcgggggcggggccgggggctgctcccggagcagcggaactgtctggagaccctttcgtgagagaccgtgtcttcctccctccgcagggtgatgcggccctggagaagtcctctcgctgtagtggaaagagcgaaggagtctgtgaggcgagggacagaagtaacgtgatgttacgactggcggcgaagtcttcggcagtggcctcaggcggccgaggccgctgccctgggtctgcgttcagggtgtagcgtagcgagccctgaccgtgaaaccggggggcctccgtgttggctccagtactgctgcttgctgtgggacctagggcgagtctcttcccttctctgtgccttgatttcttctgttgagagaaggaatcggatctatcattctcatgtcctctccagcttagagtttgttcagaccaccaatatttctagaatgacctatgtgtgctgtgcctgtcccaggtatcagctgacggttatgagatcttatgaaaggaaaacggaagcctctgatgggcttgtgtcccgaagagacagtttgtgaggacagctggattcacagaggctaggcttgttggggtccagcagtaggcctggtgtgtcatgcggctccgtaacacaggcccctgcccgcggcttggacccgttagaaagcaggcggtggggttcacccattgcacgccgtgcgaaggcatttcagctcttaaccaggaagctaggatttcaggctaaactcctggctctcaggagtttatagataaatgcagtatgtggagcggggccgggtgatgagggaaatgagagaagtgggcatagtcagaataaagaaccgcttcatgaagcttgagcggccttgaagagaaggcagagaaaaattctagctgaacaaacaacgtgactggaggccggttcaagccggctggatgggaggggagtcttggaaggaaaactcagcagggtgggttggggcttggtgacgcagcaattgccagggaaagagtagtcaggccgggtgcagtggctcacgcctgaaatcccagcacattgggaggttgaggcgggtggatcacttgaggctaggagttccagaccagcctggccaacatggcgaaacccccaactctactaaaaatacaaaaaattagccgggcgtggtggcgggcgcctgtaatcccagctactcaggaggctgaggcaggagaattgcttgaacccgggaggcgggggttgcagtgagccgagatagcgccattgcactccagcctgggtgacagagtgagaccctgtctcaagaaaaaaaaaagtagacaatgggaggctctgagggttctagagttgggaagtgacaggactagagctgtgcttctgggaaatcaccgtgtagggggttggggagaaaagattgtggaagtcagctgggagacccctaaggaacttattgcagcaacagtccttgtgaaaggtagtgagggccaaaccagggtgggggtagccaggatggaaggggggtacagatgggaggcagaattcagagggagaatcggccagacttaactctcggggaggagtcaagctggattttccactgaagagccaggggacacttgaggaaggtggcaggaggagttggcttgggcttgctgagtcaatgagtggctggcagccggccagcaggctctgttgaatgtccacagaggggacagtgacgtgggcatgagatatacctcggggacctgcaacacacacagatgaaagattaaagaatgtttgcaaatcagtgaacaaatgaagcttgctgggccttgggcaagtcatgaggcattccaacctcagtttcttcacagattagaatgaggataagacatctactgagaaaggttgtaaggag

SEQ ID NO: 1241248 - DNA, 4001 bp, Homo sapiens
ctgaaagatcaggtttcttcagaggatgatctagggccaaaatctacctagtcaaagagaaaacgatctggggtacaaaagtcaagtcagttctggacagaccccagaaggtttatcataaaatgatcacagaagacctttctctttgctacccccaaattggactgtacgccccatgtcacttccgaaggttactcgcgaagacggatgctttgccaagatcccagaagtttctggcgagctgctcacggacacaaattagaaagacattcagggaccgacctgggtgaagctaagcgccacgtccagcgctgggttcccccttcatccctcccaatataggaaaagggacagaagagggcagcagccaagcaggaacgcccaatcagccgtcttcaccccccctcccctgagccaggtttcggggagccgccccctagccctcacgtaggcccattcccacccgcccctgccctgggcccgcgaccccagggaggaggggacgacggcggcgagcgcccccaccggcagcaggcgcacctccccaggggcagctgtcgccgcggcccgcggggcccgggcctccccgggagcaataggctatcgattcagctgcctgtcgctaggagccccgggagagcgaggcctacaccgcccggccggagccccggcctcgatttcgccactttccccaaaccagagggagagcccgggggcaaccaggcccgtctgggcgagagggaggagaagcagagaccacttgcaacagcggccgcgggaaacggggtgcggggcgccgggctcccgccaacaagtctcccgggggtcccccaccctaccgcctgcctcgcaagttgcgcattcaagttcaggctggtgccctttagcctccacagccctcgccactctcgaaactgtattaaaaacaagacgcagaagaggccacaaccgaacgaaaggcgatggtgctgggcctctaagagcgccgaggggggcggcccacagcgaccctaccgccccagtcacttcccctctgcagaccccgccagcccccgggtcgcagcccccggcccctcggcgtccgggtctgtcaccgcccgcttcccagccccaagaccccttttccttaacgccggcgacgggggcttcagctcccccttgcctccggcgctcctcggcctcctcaccctccacatccccaaaatgcccccagcaccttttaaagtacgcggaggaagagtttgccgtcaaactttgtagagcggtaacctcgcccccctccccgacctacactttcagggcaggcatcaggagagatcactttgcacttgggataaagcgaattaaggagctgtcaaccattttaggtcttttttatagaagacatcctctccttcccctccccctgcaatggttttaatttgacaccaaaccttcccaccgcagaagggggtagagaaagggagggggtggggacagagggcaggaggagggtgacgggggagagcgagagggggaggctgggagggtgcggggaggcgcggggaggggaagggggttgatttacctgagaccagccactggcctccattgttggagaattcaatggcattgacacagccgaagtggccgaggaggtccttcttgtagaggtttctgcagccccgcaggcgtctcctctgaaagtcctgagtgagcagggggtccccatgcaagccccgctgggacaagaagcccaccactgacctcatgctgccccccaggccagctctcctcttcatgctggaaccgccgccgccgccgctcgcgccgccgcccctccctcggcctcacgcgcggccgctgctccccccacccggccctccccccgcgctgcgatccggatggttctttaaccagccatggcaggcagagcgaggtgtgcagacactcggcggcgttcgcggcttcctgacggtcccctccctctccttccccccgaggctcctccctctgcctctccgcctcctccagcagctgatcctcagctgccgccgcgcttccgcgatgcgcggcccttccgccggctgcggggccccgagaacgcggcgtcggcgcccctcccctccgcggggggctggccggaagaacgcgggcggccggcccggagaccacgggcgccggctgctttcccagttgagccgcttcccgcctggggacctgggtggcgccgggcggagacccctctgcaccccagcgccccgcactccgcggagttgaatgcgcgtaacaatccgagtggccgccgggctttggctcgccttcctcccgcggggacccgcgggccggctgctgcccggaggccagcgcccgtacgagttcggggaaaatgcggctggagtgggggaaggtgcgggcgggggctccggccctccttcctctgctggcctctgccttgggcagtccggccctgcccgaggcgggggaaccgggaggtagggccgcacacttggaggaacgttgcctgggggttttgttcgcgcacccgccccttcccctctcccggtaaatgtttaacaccaccgctcatccccaagtccagttctctaactcttccttcctccggtcctttagttgaaaaaggctaaattgttccgtctggcagattagagtggtacatggggggaaagagaaagggataaagaagtaggaagaaaattgccaaaaccgagttgatgaagtcccgagaagcacgaggtacttctctccgttccagataaatttgcacgacacaagaagcgtgatttgaaactaacgatatatgttatttaattgggttcggtgagctcctcttaaaggtctcgagtggggagcactgaggttggacagctgttaaccagcagctgcgctccaggccagaagtggctgcacttcagtaggatgggagtcaccgcgttgaccctagtgggtgttaaatgctttggaattctaccagatacagttaaaagtccccttttcgatgtattatagtacttttcctggaagctatcctctgtcattaagtggtaataagctactgaaataggcacttgtcagttttgccctttcaagttagcaggaattacatcctctggaccagagatggcacaggagcagttgagtagaatcatcattgaaagatgggctgtacatctctgatctggggaaaataataataattttttttaaaaaaaaagatcggctgaacatggaagaggtttacccgtcaaacaaaattatttacttctactttttgttcagtgacaatacgattaatcgtactaataacaaatatgcaaatgtttcatataaaagtacatattctagcaaacattactaaacagaaaccaaattccatcagaacttggggaaaagggcaaaaaataaataaatttttaaaagaaagaaatcaaattccaaaaatgtgaattttaatggaatattgttcccctaaataggaaactatgtggtacttaaaaggttttatcctcaggatgccttctaataatcctttgtgtttattcattataatcaccacctaaaaattagtagcagtataccagctttattaaagatgtatagcaccaaacatccttctgtcattgcaatgtcaaaatgtgtaattaatcatttatttttgtgatgatatgagtctccccactctgctgtaagttctctgagagcagggactacgtctgttctgctcaagggtgtatgcctggagccagtacttgctggcactagtggccgctttaatacttgctgaattcatgaatgtacttagggagtggggaggagtttgaagggaaaggtcgtgctttccggtttggatatgttgagtttgacctgtttcattccagtggaatccacttgttccaaggccagtttccctgctcactgttcctttgcttggcatactcagtccacacattcaaaaccccctctaacttcttccagttaataggccatcatttatacctatt

SEQ ID NO: 1241249 - DNA, 4001 bp, Homo sapiens
gtgtgagctaggcatggtggcttatgcttgcaatctcagcactttacggggtgaggcaggaggattacttaaggccaagagttcaagactagcctgggcaacatagggagactccacctctacaaaaaaaaaaaaagtttaaattacctgggcatgatagcacctgcctgtagtcccagctacttgggaggctgaggtgggaggttagcttgagcctgggagatcaaggctgcagtgagcagtgagtgatagcccactgcactccagcctgggcaacagagtgataccctgtctcaaataaatacgtaaataaaggtgtgtcaagctgggcaacgtgtgactacttacaattccgttaacatgattagttcagttgtctctaaaagagtacccccaaactccctcactcggtaggtaaagtttacttgtgtctgggaacttctctgttgtaatacatcgggagttttatgaatacataaaaaacaacagcagggaaactgggagctaggtctataaagaagaggtcttcccccatttttgctcttcaaatttatttgataaaattttatacggtgctgtgggggaaggaggcttttgtctgaaagatcaggtttcttcagaggatgatctagggccaaaatctacctagtcaaagagaaaacgatctggggtacaaaagtcaagtcagttctggacagaccccagaaggtttatcataaaatgatcacagaagacctttctctttgctacccccaaattggactgtacgccccatgtcacttccgaaggttactcgcgaagacggatgctttgccaagatcccagaagtttctggcgagctgctcacggacacaaattagaaagacattcagggaccgacctgggtgaagctaagcgccacgtccagcgctgggttcccccttcatccctcccaatataggaaaagggacagaagagggcagcagccaagcaggaacgcccaatcagccgtcttcaccccccctcccctgagccaggtttcggggagccgccccctagccctcacgtaggcccattcccacccgcccctgccctgggcccgcgaccccagggaggaggggacgacggcggcgagcgcccccaccggcagcaggcgcacctccccaggggcagctgtcgccgcggcccgcggggcccgggcctccccgggagcaataggctatcgattcagctgcctgtcgctaggagccccgggagagcgaggcctacaccgcccggccggagccccggcctcgatttcgccactttccccaaaccagagggagagcccgggggcaaccaggcccgtctgggcgagagggaggagaagcagagaccacttgcaacagcggccgcgggaaacggggtgcggggcgccgggctcccgccaacaagtctcccgggggtcccccaccctaccgcctgcctcgcaagttgcgcattcaagttcaggctggtgccctttagcctccacagccctcgccactctcgaaactgtattaaaaacaagacgcagaagaggccacaaccgaacgaaaggcgatggtgctgggcctctaagagcgccgaggggggcggcccacagcgaccctaccgccccagtcacttcccctctgcagaccccgccagcccccgggtcgcagcccccggcccctcggcgtccgggtctgtcaccgcccgcttcccagccccaagaccccttttccttaacgccggcgacgggggcttcagctcccccttgcctccggcgctcctcggcctcctcaccctccacatccccaaaatgcccccagcaccttttaaagtacgcggaggaagagtttgccgtcaaactttgtagagcggtaacctcgcccccctccccgacctacactttcagggcaggcatcaggagagatcactttgcacttgggataaagcgaattaaggagctgtcaaccattttaggtcttttttatagaagacatcctctccttcccctccccctgcaatggttttaatttgacaccaaaccttcccaccgcagaagggggtagagaaagggagggggtggggacagagggcaggaggagggtgacgggggagagcgagagggggaggctgggagggtgcggggaggcgcggggaggggaagggggttgatttacctgagaccagccactggcctccattgttggagaattcaatggcattgacacagccgaagtggccgaggaggtccttcttgtagaggtttctgcagccccgcaggcgtctcctctgaaagtcctgagtgagcagggggtccccatgcaagccccgctgggacaagaagcccaccactgacctcatgctgccccccaggccagctctcctcttcatgctggaaccgccgccgccgccgctcgcgccgccgcccctccctcggcctcacgcgcggccgctgctccccccacccggccctccccccgcgctgcgatccggatggttctttaaccagccatggcaggcagagcgaggtgtgcagacactcggcggcgttcgcggcttcctgacggtcccctccctctccttccccccgaggctcctccctctgcctctccgcctcctccagcagctgatcctcagctgccgccgcgcttccgcgatgcgcggcccttccgccggctgcggggccccgagaacgcggcgtcggcgcccctcccctccgcggggggctggccggaagaacgcgggcggccggcccggagaccacgggcgccggctgctttcccagttgagccgcttcccgcctggggacctgggtggcgccgggcggagacccctctgcaccccagcgccccgcactccgcggagttgaatgcgcgtaacaatccgagtggccgccgggctttggctcgccttcctcccgcggggacccgcgggccggctgctgcccggaggccagcgcccgtacgagttcggggaaaatgcggctggagtgggggaaggtgcgggcgggggctccggccctccttcctctgctggcctctgccttgggcagtccggccctgcccgaggcgggggaaccgggaggtagggccgcacacttggaggaacgttgcctgggggttttgttcgcgcacccgccccttcccctctcccggtaaatgtttaacaccaccgctcatccccaagtccagttctctaactcttccttcctccggtcctttagttgaaaaaggctaaattgttccgtctggcagattagagtggtacatggggggaaagagaaagggataaagaagtaggaagaaaattgccaaaaccgagttgatgaagtcccgagaagcacgaggtacttctctccgttccagataaatttgcacgacacaagaagcgtgatttgaaactaacgatatatgttatttaattgggttcggtgagctcctcttaaaggtctcgagtggggagcactgaggttggacagctgttaaccagcagctgcgctccaggccagaagtggctgcacttcagtaggatgggagtcaccgcgttgaccctagtgggtgttaaatgctttggaattctaccagatacagttaaaagtccccttttcgatgtattatagtacttttcctggaagctatcctctgtcattaagtggtaataagctactgaaataggcacttgtcagttttgccctttcaagttagcaggaattacatcctctggaccagagatggcacaggagcagttgagtagaatcatcattgaaagatgggctgtacatctctgatctggggaaaataataataattttttttaaaaaaaaagatcggctgaacatggaagaggtttacccgtcaaacaaaattatttacttctactttttgttcagtgacaatacgattaatcgtactaataacaaatatgcaaatgtttcatataaaagtacatattctagcaaacattactaaacagaaaccaaattccatcagaacttggggaaaagggcaaaaaat

SEQ ID NO: 1241250 - DNA, 4001 bp, Homo sapiens
aatactggtggtcagtaacttctgtgactattgaatatctcctatatattacatacgtaatatttgctgcatgcactggcagatatttacggtcaccttcctcctattctaactataaacccgtctgtgttgttgtctaataaatactgttaacactcatatcacacgtaagtaccaaccatagttccaagcccttgaagtatattttctaatttactttcacaacaatcccgtgaggtaggtacaatttctccccttttacaaatgaggaagacgaggcatagaaatggtaatttttcaaggttaagatgcaaacacaaaaatatgtaaatgaggacctaagagacagaatccagtattccaccgagggagcggagccacttgccagagctgcttcacgcagtgctttccacctctccgaacacacccagtgggaacaacctatctcctttccctccagggattcttttacttttcctgaacccataactaagctgttgattctcgagcagatcctctcaaaccttcctactccagaagacgtgccgctatttaaatcataggctgtttagggtaaatgagacagaaccagatccccaggtggacaaagctggtaggatcacgaaattaaacctcgggctgcggatccggtcctggatcacttccaggggatggcagcagcacccggctcacccaggaggcgctacccccgaaggtatccagtcctcctgaccccaggcagcttgggttttgccatctgctcgtttacccttcagctgccgacgctccctgctcaatctccatcctgccccagccaaacgccaggcctcacgcgcctccctcttcgcggcgaccagtcccaaacccacaccggtgcgcatcggcccatgcaggggcagcccgtcctgccctaaccccggcccgctactcacggttccagtacaccgggtagcactctccttgggtcacatccacctcgtagaggccgccccgcacgcacacaggctcgatgttcacaagctccaccatctccggctcgtgccccgtcgtactctggcagaagccgcaggcgcggtcctcatcgtcatcttctccggaactggaggctgggcccgtgggggagcacacatggtcgccgtcccggtccccgccctggggccgggcacccgtggtctgcagcagggtccggaaggcgagctcgatgcggagcgagtcgtagccgatgaagggcttccaggtcttcttgtcctccttgtagaaccagcgtacctcctccgggcccagctccgtcactacctcatagcggtgccgggccgccgggccgccaagccgggtacgtttcctttccccgggggaccctcctgtcgcgccgccgccccccgagttcgtcgggaccagcggaggctgctgcggcgggtgcagcgacaaggagctgccgccgccgccgctctcaccctcgctgtagtagcgcagcgaggagcccgactcggcggagctgaagtcatagttctcgtcactgaggcaggggtccagcgcgaggtggtggttgtggtcgtcggtgcccggcgccaaatgcagcccgggttccccgcgcagcagggccaggggcacgtcgccgtcgtccgggtccccgccgggcaggtgctcgaagcagcagacgccgccgccgaacgctggcctcgcgtctgagcccagctcccaggcgccgccgccgccgcctcggccgttatgctcggggctccgtggggacccgcggcccgggtaattcatgctgtggagacgccgccggctgtccggcggcgcgcggagccgtgacccccagcgcttccgccacacattcaacgccgccgccctctccacccgaagtttctaatctttcaaatcccgacccgagctgcggcggcagcggcgaccgctccgcccccacgagacccgcagccgccgcagctgcgttctgccgccggccccattgtcacgcagcccgacgtaggcggtgcttcggcccccgccccgccccccggccgcgtgcgccgccccggaagcccgggctgcaccggcgccgcgcgcggggttcccccctgcccctctggctgggagggcagggtggtgtcaggtcgcccgccgctcttgggcctcctcggctcccttcctccttccttgcggtcttcatgcacagctgcctcggtcccccgcttctggaattcacagcccagatgtggataggctttaccccactcatccttacaatgtgggtcatgagcccagagccttaagctacgtgttaggagggccccaggatgtaggattcagcattgctctttttgaccttaggccctactgcggcctcgcctggacgttttgtcacctggccctggtgcctccagacagaaccaggacgcataggtgggtggatacgagggcactccaccccacacccatcactcaccttggtgtcaccactcccactgggaaactggaatctaaaccttgcttcatatgccatctcatattattacttatcttttgatgcttggatttcctgttttctcaacctcattgctaggcccttgatggaaaccaagtccatgtcagcctctcccacacagtgggtgcgcaatcagtcttagttgattataatgatgtcaagtccaaccagctgtggtaaagagtgttcgattgagaggtagaaaacaaccaggttctagatttagctttgctaaccatccacaggcaaatcacataatcttcctgatctttttggtttcctcatctgtaaaattaagattcttggaccagatgatatctaaagttccttctagcaatggaattctatgaactttaaggtttcttccagatttttatgcatctctgattctgtaactcatattctgggatcaagttgaatacagaggctcccttatgtgggtcttttttatttaaaaaaaattattttgtaagcacatcaccctatgttgagaatccagagaaaaaccatctccaacctcagtgttttcattttaagaatagacagtcttcactatttcttttactctctggtggaatcagattggtagggcaatttttcttgctcctgagatgtaacctgtcagacattattactctgtcattatttaaatcaagactatctgaagtttgtacagggcctttgtaggaatttgaaaaaaggcattgcttcctgtgggcagatacagagcggtgttggagttgatggcttgtcaagtagaatacaggctggattttctgccccaattagtgcccttagctggttaaccttgtgcagtgaacaacctatccaactgtatactgcagctctgactgaaagcatctaagatcaggaccctctttaccactcaaaaaaaatttctgagtgcctgcttcccagttgctcctccagtatttctattgacaatatgcagcatatgatattgggtatgggctttggtctgtttactagctgtaaaagcattcattctacagggtttgaataggtgtctggccacctatatgccaggcacctctatgctaacttctactataagagagaatgggagagagttctttctttcttcaaggaacttacagcctagagggggatacagacaagtaaacagatacattatattatagtacagtatgaaaagtactatgaaggggattataaataaggaatatcacaacatttaaaatatctctattcctttatgtttcttgatagaatgtagcctaactatataactatctggtcagattattttggccagattttaactcttgactacacaatttccgttaacattatcctctgttaaaaaaaaaaaaaaaaaaaaaaaaaaaaaaaaaaagaagtactaaggccgggcgcggtggctcacgcctgtaatccccgcattttgggaggccaaggcgggcagatcacgaggtcaggagatcgagaccatcctggctaacatggtgaaatcctgtctctactaaaaaaaaat

SEQ ID NO: 1241251 - DNA, 4001 bp, Homo sapiens
gcttttttgggcaccttggcagcagtgctctgagaaggctccaacccttttttccctttatttttcttcttttttggagcagtttggaccaggttttctgatgtcatctccccagcctccggatcatcacaaaccatgtcatctccctgggcctccagctcaggatctttcacttcaaattctttctgggtactggttccttcagttgctacatttttacttttcttcaacttgatctttttctttggtgagctagactttccctcctcctcctcctcttcttctgaaacagcttgtgcctttctcttgggtgcttcctttgagaagagactggagggattcttggcaggggagaccaactggtaatctgtcaattcctcaaagcacaccaagtcatccatctgtccatctgcaaacatatttgggtcaatcttcacttccttccattttcccacaactttgattccctttgtctgaaatttgccacagcttgactgctttggccttgattttgtgtccttcaacttcatggttgctgaaaaggagatacatgttctattaggttggtgtctgagaagcagagggttctgatgtaacaaatattttctaagcaactaggccctacaaagaactgaggatacaaagatggctatcacacagttgctcccacctagagaagaacaaagaataccacagaacagacagctttgcctggaacacagggtacacatgtgatggaacaaagacatatgagctagacctggtttgaattccaaatccaacacttactgcctgtgtgaccttggatagtgccacccactcctctctgaacttcagtgctctcatctataaaaaggggggagggtacctaacaatatctaagttgtacattttatgtaaataaagaaaattatgtaaagcacggaggatgaaacctgccacacctaagtcgttctgaaggcagagtaagaatctcaggggtttttcttgtgggggcaggaggggtgagctttattaaaagcgtactgcgcttgcttccttctcaagccttgcctgagagagcaaatgcctgctccaccatcctttcctttgccaagcgtcttaaaacccatccagtttcttcatcatattttaagtggcttaatggccatttaggcccaactcgtttgggtggaactcgatccaggtttttccttttcagaaaggccaagaaagataacagattccgtgaaaaagaccaaggtaaactttggttcaaatccagatccaccacttgtcagctgtggctctgcggtggacgtattaatctctgagtctcttatttcccagtctgcacaatgggaaaaacgaggacatctgtcccacagaatccttatacgccactacgaaaaagtgacgcacgtcaaaaaaaaccgctgagcatggcgcccggcgaggagagcacgttcgcacacagtgcccgccggacccgctgcgccacggcaaaaaaacaaaaaacaaacaaaaaaaaacacaaagaaacacgcggggttcaacaaggagagggcgaggggtgccacgcgaaccgggcgaggacacggagagcgccaggcagagtagaagggcctctgtctcctcgtgacgccggtcccgcgcggccctctcgctttgtctcaggcacgaacgcgcgcacgaaaccgagaaaccgagaagccgagaagccaaggccgtcaggctctgatgaccggacaaggagcccaaggcgcggggaccgtggcacgcagctcggttggacggcttgggccggcggccgccctctctggacccgggaacccaccggcccagagcgacccgcgataggaacccgggttcctggcctcagcccctctccagagtcggctccaaccccgctcgttttggtactcaccgtgtggagacgccaccgcagctccgtcagtcgcgagtgaagaacctcagaaaccgccgctgtacctcagctgcagcagcaactgcagttccggggcgggacctccacgcacgtactcgtgcgcgctggggaggaagtcccgcccctatggcaaactcagctacctgattggctgcctcgcggaccgcagcagtgccggcgggagagctggcttggggcgctggcacctcctcttacagctttactcctgccagcttgggaaaaggccggagaaggtgaaattctgtgtgctccctccggcgagagactttgtcagctcccgcacagtaacgtaagttttcttgtattcttagtgtagtttcgttaccggaaaggggtctcgatccagaccccaagagagggttcttggatcttgcacaggaaagaattcagggtgagtccgcatagcaaagcaaaagcaagtttattaagtactttactccgtagacagagtagggcgttcccgaaggtaagaggacgaacgcgtccatcctaggtacaatgctcgtacctagatcatagggagatgtgctctgctacaagggtgacgtgtgatgagtgttccttgtattgtaattgttttggggcgccatgagctgtgcccatataagatacaaacgtaattgataaatgttgtgtgtgttcagactaatccactgacaggccgttcttccttctctctccctttccttgggtctctattccctgagacacaacagtgttgaaattaggtcaattaataaccctacaatgggcctctaagtgttcaagtgaaagaaagagtcgcacatctctcactttaactcaaaagctagaaatggttaagcttagtgaggaagggatgtcaaaaggcaagataggctgaaagctaggctgaaagtttgcaccaaaaagttagccagtttgtgaatgcaaaggaaaagttactgaaggaaattaaacattttactctaatgaacacatgaatgatatgaaagcgaaacagtttattgctgatttggagaaaattttagtggtttggatagaaaataaaaccggctacagcatcccctaaacccaaaaccgaatccaaagcaaggccctgattctcttctattctatgatgactgagagaggtgaggaagctatagaagtttgaagctagaagagattatttcatgaggtttaaggaaagaagccgtctccagaacatgaaagtgtaagatgaggcagcaaatgctgatggagaagctgcagcaagttatccccaagatctaggtaagatcgttgatgaaggtggccactgaacagcaagtagtcaatgtagacaaaacagccttctattggaagaagacgccatcaaggactttcatagctagagaggtcaatgtctggcctcaaaggccaagctcactcttttgttagaggctaatgcagctagtgactttggattgaagccagtgcttgtttaccattctattataaaaatcttaggtctcttaagaattacgctaaatataatctgcctgtgctctgtaagtagaacaacaaagcctggatgacagcacaactgttcatagcatggtttactgaatattttaagcccactgttgaggcctactgctcagaaaaaaggatttctctcaaagtattattgctcattgaaaatgtgcatagtcacacgagagctctaatggagatgtataaggagatgaatgttgttttcatgtctgtgaacacaagatccattcttcagcccatggatcaagaagtaattttgcatttcaagttttattacttaagatacatttcgtaaggctatggctgccatagagagttattcctctgatggatctgggcaaagtatattgaaaaccttctggaaagggttcactattttagatatcattaagaacatttgtgattcatgggaagatgtcaaaatatcaaaattaacaagagttcggaagaagttgactccagttctcattgatgactttgagaggttcaagacttcagtgaaggaggtaactgcagatgtggttggaaatagcaagaaaactaaaattacaagcgg

SEQ ID NO: 1241252 - DNA, 4001 bp, Homo sapiens
gaggccccagttaccccgggatgcagtcacaggctagccacccaatgtatcttgggtttcaaacatttaaaagtcatggtatctcagtatgctgccatgggattaaaaaaagaggaagaaagaaaaagttggctgggcgcagtggctcacacctgtaatcccaacagtttgggaggcagaggcgggtgaatcacctgaggtcaggagtttgagaccagcctagccaacatggtgaaaccccatctctactacaaatacaaaattagccgggtgtggtggcgggtgcctgtaatcccagctactcagaaggctgaggcaggagaatcgcttgaacctgggaggcggaggttgcggtgagtggagatcgcatcactgcactccggtctgggcgacagagcaagacttcctctcaaaaaaaaaaaaaaaaaaaaaaaaagttgttcaggccaggcgtggtggctcatggcccatgcctgtagtcccaacactttgggaggctgagatgggtggatccctcgagctcggaagtttgagaccagcctgggcaacatggcaagaccctgtttctagtaaaaatacaaaaaaaatagccgggcatagtggtacacacctgcagtctcaactactcaggaggctgaggtaggaggatcagttgagcccagtggggagaggttgcagtgagctaagatcgcgcctagccaacatggtgaaactccatctcactacaaatacaaaaattagccgggtgtggtggcaggtgcctgtaatcccagctactcagaaggctgaggcaggagaatcgcttgaacctgggaggcgggggtcgcagtgagccgagatcgcgagactctgtctctaaataaataaattaattaaattaaataaaacgcccgattaaaatgtgaaacctccatcaaataagtgcaaattaaagccacagtgaaatggtattgtttccccaatctgactgaagattacaaagtgtggcaacgcgcggtgctgacttaggcagggcgggaggggcgggcctgtctcagcctgtggcgatttggtggcatctggcaaaagccactctccagacgcaggccctttaaccccgtaagcccgggccaaggacgactcaccggggccaccttgcttgtgggtgggatggggcctctggcatgaacgagagtgactccgagtgggtaaagatgccctcctcgcagaggacacgaagcaacaaggaaaacagccaccacgtaataagcgacatgccagaatagaaggattctttagtacaatctttgcttttttcaaagaaaacacgcgcgcctctcattcgcgtttgctcccttcccggcgctcatccgccctgaactccagcctggggcgcccgtggccgcgagacccaggggctctgagcgcagcaggcgcccagtgactgcgggtggaggccccgcgtcgcgcaagctgcctccgcgccagggagcgcgtgcgcctcgtagcgcgtcccggggccgcccctgcgccctcgcgtcccagcatcccagagccccggccctggccccgggagtggctcgcgaggaacagctgggacgcgctccctggcgctcggacccgtactggggtcctcggaatcctcaggtcccagggagtttcagacccggccagggtgggggaccctcggggagccggccggggaccccagggaggggagcggcaatggcggaacgcccactggaatttgggccagagctggagcggcccgtctgggctcgaccccacgacgcgactccagacgggccaacggggcggtccccaccggggtgggccccgcgcggcgctcacccagtatctccttgcgccgctgcgtgtgcggctggtcggtgtagacccactcgaagtcgctgcggctcgcgctgttgcccatggtggggcgggaggcgccgttcggagcgcggccggctcggctctgctgcacctgtcgcggcggccgcggcgcggaaccagctctgattagggcgggggcggggtcccggcggggcggggccaggtgcgccaggcttggggcggggcacctctggctgggcggggcggccgggccccggcgctctccagaccccggcgggtagctggcgctttgggaacctcagttgcctcggttggaaatggggctccccggcaggaccgaggtggccgcgtgccatctgcgcgagtccctgggtccctcgatgcgcgggggcgactgctgccaccgcggcctcccaccggctctgcgcgccccgcccacccgcgggcagccgtcgggtttttaccccggcccgttctctccgcagccccgacccgctcgcgggcacgcccctgtggctcgcgccgcccctgccccaaggaggagcggctggcaggatagggggactgcggaggatcggcgtggaatggatgcgacggtgccagtaaacaggcgccgaggaaaggttggtgcagcaatcctcccttcctccacccggccctttcaccaataatgcaaaggggagataatgcgtctgcagcaacctcacagggatgagtcagacccactcctgccttcagggaacttgagttctggatggggacacaggtacagaagtggctgttatgattcagggtgatacgtgccatgacacaggtaggccctgaagcagctaggatccaatagaaggaacttttgcattgggccttgaggggtgggtaggagttcaacagctagaaaagggaaaggcattggtgctagggggaacagcagatgcaaacgcttggaaacaaggcagaacctgaatgttctcaaatggaaagtctagttttggggaggtaagggcacagggcccctcatcttcaccctctcagtgatgcctctgttccttctcccactcccttggagttttggagggtggacctgctgtgcctgtgggccagagcctggcctcggctggcagttgcctgggagctgactgacacatcagccagcgctgccacaggctcgcacatagtgagggcgtgcttctgtgcgtcccatggaagtccatggcccggggtttggtacacttggcaggccttccttagctcagggccaaaggcagtcctgagtgagccaggaaggaaggcatgggtgtcctgcagccgccagccaccatcccctgaattagccatgggaaaggtggacacagaggccagattttccatcagcagggggacccacatgccaccatggccatcaccccttgccacacccaggaggcctcccggcccagcttgcacccttgggagaagactcattgctcccagggcagcctgctctgttcccagccagaagggtcctcagaagtcatcccaccagccatcactttacagatcaggagactgaggcccagagatgaggagcgccttgcctgaggcacagaggaattaacagcaaggctggggcatgactttggcccctgacctttgaattaaaaagcttccaaaatcagagccttcgcccctgtgttgaactccgtgagatctgccgccctgagccccagctccaccctcaggacaacaccaagcctgccagttccctctgccccaggccaccgcctatccagaggaaactcaccaaggccctcattttccagatgaggaaactgaggccagagaggggacaagtcagaggacatgctgaagaagacctgggagtggaacagacacccaggatgcatgaaatcaagtctgatgcccttgccaagtgctccccaagtccctggggagccagaaacccagcttcacggtgttgacgagccaggagcacatactgttgcgtccccaccctgtccgttgtcccagaaatgacagaaaatacattttcgtttgtaatgtggtgtcttgaatgggatcctggagcagaaaaaggacattaggtaaagctaaggaaagcctagtaaagctggaccatagttaatcatagtgtatcaatattggtccatcaaaggcaacaaatgcaccat

SEQ ID NO: 1241253 - DNA, 4001 bp, Homo sapiens
tacctttcaaaactcagttcaagaaccacctacctcctccaggacgctttcccaaaccactttccctagccactctcctatgtcatctggatgctccccaacacccctagagtattctgtgcatatctccctcttataatttaccatattcacattacattgaagtgactgctttctgtacctgacttcctgttggaatctatcttcatttttaattaaaatttttttttttagagacagggtctcactgtcaccaggctggagtgcagtggtgcaatcatagctcactgcaacctcgaactcctgggctcaaacgatcctcctgcctcagcctcccaagtagatggtactacaggtgcaggccactgtgcctagctaattatttaaaaaatattttttgtagagactgggtctagctatgttgcccagactggtctccaactgctggcctcaagtgatcttgctgccttggccacccaaagtgctgggactacaggcatgagccactgtactccaccatggactgaatctttgaagagcagaaattagattttattagtcttggtaacttcagtggtttaccaatgcctagcaaatcatggatactcaaatatttatttaactgaagtctagtaaataagtaaaaaatgtgcagttcaataaagtcttgcctgaaatagaggaaagcacaggtccacaaccctttagttgcaattccaaaatctctgctctcaaacaaaaagttttttacttttctttcttttcttttttttaatacagtgtctcgctgtgtcgtctagactggagtgcagtggtgtgatcatggctcaactcctaggctcaagcgatcctcctgcctcagcctccggagtagctgctgggactgcaggaacgtgccaccatgcctggctcaaacacaaagttttttcataaaactcacttggcggcaaaattctaccttacctgaagttatttacggggtttttaatttccactttgaataaatattcacatcttgttgagtagtattatagtttcaggtaagggattaggaaaggagctgttaagtggaagggctctctcgggtggtttctgcaactgtggtcccagaggaagcactcacctcctgagcaacaacgcgaagggtgtccagatggcggccagtgatgtaaactgtggcgcctgctttgcagagctgcaaggcaatgccacggccaatacccctggaggcaccagtcaccacacacacttggccattcatgggagctgccatgactcacaggcaaaggaggcaggtctgtggaagcaaagacttactctgagggaagcctggagactgtgtgtgtgttggggcgaggttggggggtaggggagaacctcactagggctaagaggaggagccaaggtaagaatcctttgaggggagaggagtcagaggctgacaactgggtgcgggcctgaggacaaggctgactgtcttttgggaggcccagagagtgaagaaggggctgagtgggactgtccagaggtggacaactactacaaccctctgagtgtggctgcctggatatgggaatctggcgcggcagcccctcggggcgcgtccacgcagagtcctgggctatctgaagctccggtccctggcctgacccagtccggctgagccagaggcgcagcttccgggccggggatgagcgcgaagcctggagatcctaagccctaagtgggacgagcgtgcgccgcttacctgccacctgcgctgccgctgaggtctgcagattgcggggctgcggtggaagtctgggttctcgcccagattgagccggcgacgtggaggcagtgttcaaggattgattctgtagtaggacccggggcgattctgtgctgaggtagaggggcagagtcccaggccaaagttagaacctgcggatgggggcggagcgatctgggtgacacacccaccccgcccggctggggcggcgcggaactatgacgtagtagctgcgtcaggagcgcgcccgcgtttctaaactttgtctggataaggcgcacgcttggcgacgtcgaaggtccgtccgcagttaaggaagcttttgcagccggacaggtcgcgaagcacacatggggcagggtccgcgctctccacacaaggtggggcgccggttcccagctggtggcaaacgggggcgcggggccaaggggtcggggcgccccttaccaggccgtaagcggcaaccctggccgcctccggatgggcgctcggagccggctccagattcgcacccgcacctgagcccggaagctctgggatatttccgccgggcgctgtcagcattgaaagaggctcccgagactggggaagaacgaggtaggcagcaacttcggggtttagaccaagagcatcaaatccagggcaggcaaggaaactttctagggtcggcagggcgtggggacttagtttcatttcccatgtcctcttcctcggcctccgacccacgacccttggttaagcgagggtacataactgtattctctactaagtctcttcaaagtgtgtctttcttcccttttcagatctgatggtgcacaatataatgaaggaagtagagactcaggccctagctttgtccacgaacaggactggcagtgagatgctgcaggaactgttgggattcagtcccttgaaaccgctttgtcgcgtgtgggctgctctgcgctctaacttgcgcactgtggcctgtcaccgatgcggggtccatgtattacaaagtgctttgctacagctccctcgattgctggggagtgctgcagaggaggaggaggaggaggaggaggatggaaaggatggtcccacggagaccctggaggagctggtcctgggactagccgctgaggtgtgtgatgattttcttgtctactgtggagacacacatggcagcttcgtggtcagaactctgcttcaggtgttaggagggactattctggagtctgagagagccaggccccgtggttcccaatcatctggtaagtattacaagaggaaagtggacctagggggaagaagaatttagaaagttcagaatgagacagtaaacagaagagtaagtcttcatgggggagcttgaccgggaagaattagcttgacctgtcctaatctgaacagggcttagcaagccaaagattagtgtgtgcggaggcccagaggtagggatgtacagttgtgtttggggaaggctattagaatggacgcaggaggagaattttttttaagcatgacttaatatacaaatggacttaagcaaaagtaacatacacactggactcaagcaaaagttcaggaaactatacccttactacatgcagcccactctgttatttttttttccttttcaaaactattctgctctatttcatttaaaaaaaatgctagttgagaccactaacttgatttcatggtacagtcttgagctgtgatccacattttgaaaaactaggaaataaagttagcgagtttaaatgaggctttattttggaatggcttgaatacctggctgaggaggttgaactgtcttctgtggaccatggggaagctggttgaagtttcttagaaaaattaagacagaaatgtagtctcagttcagtcatccagaagagacatttagttgtactacatctgttctgcatctccaagcggaatccttgttcatctgtgaaatttttctctcctggatggcagtttgtgatctccccactgcacatgttcttaatcttccttcagaagcacagaagaccccagctcaggaatgtaagccagctgattttgaagtccctgaaacctttttgaatcgccttcaggacctgagctcctcctttctgaaggacattgcaggtaaggagggaagtaggaggatggtctcgtatctacttgtctggaggtcatcttaccaccaagcaaggcccttacctcaggttattcctcttcttttcaaacctggtctggt

SEQ ID NO: 1241254 - DNA, 4001 bp, Homo sapiens
atcctcctattctccaaatttatgctctgggtccccgcctattaccctccttgcctgaactactgcaatgcctcccaacgactcacctgacctccagtctgtctgccttaaattaattcttcataatccagccagtacgacctatctaaaacacaaaccctgttcaaaatctcctaactggatctccatctcttagaggatgaagcctgagttctctattagggtcttccaagacccactctttcctctccagcctctcactcactactcttcccttgcattatctcacacatctactctttcacacagcgtccctatgcttatggagctccctctgctggaatgcttttcctaacttcctttacctaattcttacctttcaaaactcagttcaagaaccacctacctcctccaggacgctttcccaaaccactttccctagccactctcctatgtcatctggatgctccccaacacccctagagtattctgtgcatatctccctcttataatttaccatattcacattacattgaagtgactgctttctgtacctgacttcctgttggaatctatcttcatttttaattaaaatttttttttttagagacagggtctcactgtcaccaggctggagtgcagtggtgcaatcatagctcactgcaacctcgaactcctgggctcaaacgatcctcctgcctcagcctcccaagtagatggtactacaggtgcaggccactgtgcctagctaattatttaaaaaatattttttgtagagactgggtctagctatgttgcccagactggtctccaactgctggcctcaagtgatcttgctgccttggccacccaaagtgctgggactacaggcatgagccactgtactccaccatggactgaatctttgaagagcagaaattagattttattagtcttggtaacttcagtggtttaccaatgcctagcaaatcatggatactcaaatatttatttaactgaagtctagtaaataagtaaaaaatgtgcagttcaataaagtcttgcctgaaatagaggaaagcacaggtccacaaccctttagttgcaattccaaaatctctgctctcaaacaaaaagttttttacttttctttcttttcttttttttaatacagtgtctcgctgtgtcgtctagactggagtgcagtggtgtgatcatggctcaactcctaggctcaagcgatcctcctgcctcagcctccggagtagctgctgggactgcaggaacgtgccaccatgcctggctcaaacacaaagttttttcataaaactcacttggcggcaaaattctaccttacctgaagttatttacggggtttttaatttccactttgaataaatattcacatcttgttgagtagtattatagtttcaggtaagggattaggaaaggagctgttaagtggaagggctctctcgggtggtttctgcaactgtggtcccagaggaagcactcacctcctgagcaacaacgcgaagggtgtccagatggcggccagtgatgtaaactgtggcgcctgctttgcagagctgcaaggcaatgccacggccaatacccctggaggcaccagtcaccacacacacttggccattcatgggagctgccatgactcacaggcaaaggaggcaggtctgtggaagcaaagacttactctgagggaagcctggagactgtgtgtgtgttggggcgaggttggggggtaggggagaacctcactagggctaagaggaggagccaaggtaagaatcctttgaggggagaggagtcagaggctgacaactgggtgcgggcctgaggacaaggctgactgtcttttgggaggcccagagagtgaagaaggggctgagtgggactgtccagaggtggacaactactacaaccctctgagtgtggctgcctggatatgggaatctggcgcggcagcccctcggggcgcgtccacgcagagtcctgggctatctgaagctccggtccctggcctgacccagtccggctgagccagaggcgcagcttccgggccggggatgagcgcgaagcctggagatcctaagccctaagtgggacgagcgtgcgccgcttacctgccacctgcgctgccgctgaggtctgcagattgcggggctgcggtggaagtctgggttctcgcccagattgagccggcgacgtggaggcagtgttcaaggattgattctgtagtaggacccggggcgattctgtgctgaggtagaggggcagagtcccaggccaaagttagaacctgcggatgggggcggagcgatctgggtgacacacccaccccgcccggctggggcggcgcggaactatgacgtagtagctgcgtcaggagcgcgcccgcgtttctaaactttgtctggataaggcgcacgcttggcgacgtcgaaggtccgtccgcagttaaggaagcttttgcagccggacaggtcgcgaagcacacatggggcagggtccgcgctctccacacaaggtggggcgccggttcccagctggtggcaaacgggggcgcggggccaaggggtcggggcgccccttaccaggccgtaagcggcaaccctggccgcctccggatgggcgctcggagccggctccagattcgcacccgcacctgagcccggaagctctgggatatttccgccgggcgctgtcagcattgaaagaggctcccgagactggggaagaacgaggtaggcagcaacttcggggtttagaccaagagcatcaaatccagggcaggcaaggaaactttctagggtcggcagggcgtggggacttagtttcatttcccatgtcctcttcctcggcctccgacccacgacccttggttaagcgagggtacataactgtattctctactaagtctcttcaaagtgtgtctttcttcccttttcagatctgatggtgcacaatataatgaaggaagtagagactcaggccctagctttgtccacgaacaggactggcagtgagatgctgcaggaactgttgggattcagtcccttgaaaccgctttgtcgcgtgtgggctgctctgcgctctaacttgcgcactgtggcctgtcaccgatgcggggtccatgtattacaaagtgctttgctacagctccctcgattgctggggagtgctgcagaggaggaggaggaggaggaggaggatggaaaggatggtcccacggagaccctggaggagctggtcctgggactagccgctgaggtgtgtgatgattttcttgtctactgtggagacacacatggcagcttcgtggtcagaactctgcttcaggtgttaggagggactattctggagtctgagagagccaggccccgtggttcccaatcatctggtaagtattacaagaggaaagtggacctagggggaagaagaatttagaaagttcagaatgagacagtaaacagaagagtaagtcttcatgggggagcttgaccgggaagaattagcttgacctgtcctaatctgaacagggcttagcaagccaaagattagtgtgtgcggaggcccagaggtagggatgtacagttgtgtttggggaaggctattagaatggacgcaggaggagaattttttttaagcatgacttaatatacaaatggacttaagcaaaagtaacatacacactggactcaagcaaaagttcaggaaactatacccttactacatgcagcccactctgttatttttttttccttttcaaaactattctgctctatttcatttaaaaaaaatgctagttgagaccactaacttgatttcatggtacagtcttgagctgtgatccacattttgaaaaactaggaaataaagttagcgagtttaaatgaggctttattttggaatggcttgaatacctggctgaggaggttgaactgtcttctgtggaccatggggaagctggttgaagtttcttagaaaaattaagacagaaatgt

SEQ ID NO: 1241255 - DNA, 4001 bp, Homo sapiens
tgacttcaagaatgaagccacggaccctcgcaatgagtgttacagttcttaaagatggtgtgtccggagttgttcattcctcccatccggagttgttcattcctcccgtccggagttgttcattcctcctggtgggttagtggtcttgctggcttcaggagtgaagctgcagaccttcgcagtgagtgttacagctcttaaaggcagtgcgtctggagttgttcattccttctggagggtttgtggtctcactggcctcaggagtgaagttgcagaccttcgtggtgagtgttacagctcttaaaggcagcgcggacccaaagagtgagcagcagtgaatcaagatttattgcaaagagcgaaagaacaaaacttccacagtgtggaaggggactcaagcaggttgctgctgctggctcgggtggcctgcttttattcccttatctggccctgtccacatcctgctgattggtccattttacagagagctgattggtctgttttatagagagctgattggtccattttgacagagtgctgattgctgtgtttacaaacctttagctagacacagagtgctgattggtgcatttacaatcctttcgctagacacaaaagttctccaagtccccacctgattagctagacatagagtgctgcacccttgcttgtcctcctagaccatgaggaggaccgagaaaaatcggatttagtggcccttaccgacgcattctcgaaaacctgttagagtcctaagcattctcctgttagtattgggaacttacccgtgtcctataaagatgttatgccccaaaaatgaagaagagtaacctgagggagggaaggggtctccagggttggaaaagtgacaccttttgtcctcacttatatgaataggaaggatacaatttctgaggctccccctatcctagcttcaggaatagcttttgttagacctgcttatctgaggagggattctaaaattccagatagttccccctacaactgggctttgggcaaaaattatgtctttctgattggtgagcccaggtgcctaaagaaggtaacagagtcctgaaatttttactagaaatcattcttataagagaaattagaaaagcaccagagacagggagtggttttttagaagtgggactagcctaggagaagagaggagagagaaagtttgtctggcaggcattaggacccagcgagcaagggtcaggatagataggatagataggtgagtctcacttgggcaacatgcctttgagagttccgctcatggccgcagggtcaaccaacttgttgtggggactccggagctgaatggctttcctctctgttgaccctcagctcagcccagaagtacaggaaaagcggaagctggttccaggcaaaacaacattcccaactccacagagccaggggttgttagagatccctttcccagaaagcctgacacccacgtttttagtccagcggctgcgctagtcacttttaactggccgacaggtgcccagaatttagccaccgaattctaaggaaaaataggacagaatagcaaatgaaagggatctgatggtactcaccacttggcgataggtgatagtctcaccgcttggtgatggtctcaccacttggcaatagtctcactgcttggcaatagtctcaccacttggtgataggtgacagtctcttcaaagtcaccaaaatgtgtacggaattgatgggttcttggcctcactgacttcaagaatgaagttgcagacccttgcggtgagtattacggttcttaaagatggtgtgtccagagttgttcattcctctcggtgcattcgtggtcttgctggccccaggagtgaagttgcagaccttcgcggtgagtgttacagctcttaaaggtggcacggacccaacgagtgagcagcagcaagatttatcatgaagaccaaaagaacaaagcttccacagcgtggaagggaaccagagcaggttgctgctgccggctcaggcagcctgcttttattcccttaactggccacacccacatcctgctgattggtccattttatggagagctgattggtccattttacagagagctgattggtctgttttacagagagctgattggtccgttttgacagagtgctgattggtgcatttacaaacctttagctagacacagagtgctgattggtgcatttacaatcctttagctagacacaaaagttctccaagtccccaccagattggctagacacagattgctgattggtgcatttacaaacctttagctagacacagagtgctgatgggtgcatttacaaacctttagctagacagaaaagttctccaggtccccaccggacccagaagcccagccggcttcacctctcaatggcacacactgcaggactttgcggcacctagcccaggcactccagcagcccagagggagctcatcccccagtcaggcccagctggcaccggccggcccacggagcccctgctggccggtgagtgccctgtacagtgtgggctcctgccggcgcctctccctccacacctcctggcgagcagagggagctggcttcggccttggccagccccagagaggggcccccacagtgcagtggtgggctgaagggctcctcaagtgcagccagagtggatgtggaggacgaggaggcaccaagagtgagcaagggctgctagcatattgtcacctctcacttctagttgaaaaagcaaaatcaacagaaactctcattcactgctgggtagagggtaagtacaatcactttgggaaatgatttggcattatacggagaagttgaaaataaagatctctgactctgtagagggaacttgcatcctgcagacaggaggtcatgtgtgcaccaagagactgtacacacaggttcagagaagcctgcttagaatgttccaaactggaaacaagtctgtattagtttgttttcacactgctataaagaactaactgaggccaggcacggtagctcacacctgtaatcccagtactttggaaggccaaggtgggcagatcccttgagctcaggagtttgagaccagcctgggcaacaaggtgaaaccatgtctctataaaaattagctgggtgtggtggtgcatgcctgtagtcacagctactcgggagactaagatgggacgattgcttgagcccaggaggtcaaggctgtggtaggctgagattgcaccaccgtactccagcctgggagagagagcaagaccctgtctcaaaaaaaaaaagaactacctgagactgggtaatttataaagaaaagaggtttaattgactcacaattccacaggctgtacaggaagcatggctgggaaggcctcaggaaacttacaattaaggcagaaggtgaaatgaagcaggcagaacttacacagctggagcaggaggaagtgagagcaaagggggaggtgctacacacttccaaacaaccagatctcatgagaactcactcactatcacaagagcagcaagggggaaatctgcccccatgatccaatcaccttccactaggccccctcctccaacattggggattacaattcgacatgagatttgggcagggacacagacctaaaccatatcaaagtctatatgcctattaacggtggaatggataaacaaactgtgttgcatttctataatggaatactatacaataatgaaaatgaatgagctgaagccacactgaacaacataaaggaatcttaaaaaatatactgttgagtaaaagaagtcagacacaaaagaatacatattatttgagtccacaagtttcaacaacaggtaaaacaattctatattgcttaagaaggcaaacaggtgacaaaaatacagagaaatgcagggcagtgatcaccacaaaagtgaggagagtgggtatttccgcagtagagctgtggggaggcagttatgattaagaaggtgcaaacaggc

SEQ ID NO: 1241256 - DNA, 4001 bp, Homo sapiens
gaccttgggaagttgctccagctatctgagccagggtctgcagactgagagaatagtccttgccttgcttgggttgttgtcaggtctagagataacctgtgtaaggctctgaacacaggaaatggcacatagtaagtggctgaaacatggtgggctgcttcctgaggttcccagggacttgactctataagctgaagaagaggggaatgtttattaactcatgggtgggaacatgtattttgtgattgtatttacccttcacatctgttcaattagattgaaaattactgcagaaccagtaccagctgtttctttggggtactcaagggatgatgcagggttgaagcattagaatgttttaaaattctctgactgagatgggatgattctctgacgttagtatatggacataatagaaaggcacacagtaaaaatgtgctgctgtctaggaaagcagggaaggaggctcaggctggctccgttttccacctcctggctctgtgcccatttccctgcagctcaccgtggccaccagccgctcccggtcctccgccttccccacatggcacacggtgcccgtcacgctcagcccctccccctgcagcgtggccaccgcctggtccacattctgctgcttccggctgctgacgaccacatgggccccgtcctgggccaaacgccgggcgatggcgaagccgatcctgtgagcagaaagagacaaagactgctaaggcctgtgcaggggaagaggtcgacagtatgagctctgaagttaagactgcccgggtttgaattctggctctttctctatataacccctacgtgtgcctactatgtgtaaaacaggcttaatggcatggccatttttggcattcctttacttgtttttattatgacctggaccacagcctcagttcccaagaactgacatcactttctacagttcccaccatgggtgacaggcttcatcccctcttgggactgagaggtgagaaatgagctgggtttgcagcagcagccacttccgtgatttgagggtctcactcagaacagccctgcccccaggtttctttcttactcgtctacatcattctcaaaattctatccttagttattttttggggtgcatgtgaaaagatggtctccggtcaaaaatgtaaatattgccttgggaggaagagttacacattttgcatttgtcagctattagcattttacctacatttgtattttagttttgtgaagagctggcatctagcaaagtcctgtagaaatgaggaccaggatagacaagaatggtgggtgagaaacaggctgggcaaggtcggcccagatgtaccgacctaaacaaaaatctcgacatatggctctggtgtcccatctaggtaagggggaggggttccgggggactttccggtgcccaaatagaatgtctggtacattttcaaagtgctggaggccgtgggatagtattttgaaatccagatttccttggatttccagtttctggtcttcccagacgctaggtggcgctggttgactggggcagcccagaacactggggagactagatcgatagggctgcacagaggtggcacagttgtgccagaggtagcagggacaggagggctggcaagggagggtccagggctaggggattcggagtggcttcaggcggaccacgtggctaccttttttccagggccagactttggcagcgtgtaaggtctgaggacaggggcaccggaggccgaggatgagaggccagtgcctgtttccaggcagccagggcctcagaaactccggccggagcactcacccgtcggtggaggccgttaccagggccaccttatttgcgagcgggtcccggcgggtcatcccggagctggccatccgcaccgaattccaagcccgggcacagaggcctagcagccccgccttgtgcatggatcagaccagcaagtatgggttccactcttcccaggggcggtgacagagtagggcgaggggcaggacgaagggcgggccgattccctgcccgccctgctccccgccccggtaccgctgtgagcggtctgtggccctgggcacctccatccgccgcggcgcccctccaccatctaccttccgcctgactggggcttgcctttccgggctggcgggtgagctctccgttcaagttgcctgtagggctcgcccctcccctggcccttgcaggaacccgcaggctttggctgctgcctttctgcatctgcttgcccaccttttcttctctgggaagtgggggttttgagttggttgcttttgcttcttcagaattccttctccaagaaagtctgggtctatgtgtgtgacagcccacaggagggcaaatgttttgagactgcccatggaggtgaggcctgtggtcgccatggagtccaccaggtgaggctggaagagcctgggagagagacgtgatagggagtagctgcgccaggcctggcactgcccttcactctgcccaaggtctcttccatcttcacgggccctggagggcagactatggtcattggccaaacagcattctcatgtccgttgacaaagggacttcctcctttacaggggctaagtggtagcgaggaggctggacagtccctcaagcagtggtggaaatgcaaagaactcggggcactcaagttctccctaaccactctgtccccaggtcttagccgccatcttagttcaataaatatttgttgaatgcaaaatctctttatgaactgtaagctactaagcacatagtagttactgccaccatgtagtgattattattggtgccctgggccagactcttcatctgtaaattactgagggtatggatgatgaataaagtccttgccagctataaattctgtgtccaagacttcagtctgcacttctgccaagtgggctgaaatgatctccctcctgggtttccgggagaatgaagaaatctggatggcttatggtacagtgtagaaaggccccaacagacccaaatgcaagcatctgaattggtttaacccactggcctccaaagccagactgagaagcagtgctggttcatggcagcgttttcactagttcaaggcaaaatgagaaaaggaaacaattacagtgagtttcataaagctaagcttatttaacagtcctttattgtggagtatacgtttgcttctttttgtgtgtgtgtgtgtgtgttagtgttttcttttagaaaagatgatgaaagcagatgggtaggtttagagatgtgttattggtgaaatcaccagtttggcagccttatgccagtccctacaattaaaggggaaagaatcctggtttgtgaaatccagttctaggcatgacttttgaatagaattcatgtttgctcaagattcatttagtatatgtgcaggtaagctgagcagctgaaaaagggtttcaacattcaaaagggggtgtatggtgagcaagtaatagaacggcctgcactggaattctagtgttttcctcagccaagaagttacagctgcaatactctgctttgctactcagcagatcccgatgagacaggagagcttcagtataattttccccatgtccagggaaggctgactctgactggtgctcctcagtctgagcctcatgaattattgacagaggctggaagcgccacactgcttgtcctcttgcactgtttggagctaacgcactgtgggaacccttcccagggctctccatctgtgtgtgcggctgggggagggtacacaggaggacggctgcgggggttctcagggcttggttcaaagggacaggcctgcagggggcgtttgatctctctttcccttctcttcagaggtagacaggtggactcaggggctgaggttggcaggaaggtgaggaagactacacttcaaagagcaaaggattctgggaagagagaattgtggcttgggtgcttggtgaacattacatggcccttccttgtgtgggca

SEQ ID NO: 1241257 - DNA, 4001 bp, Homo sapiens
atttcgtatgtttttgcagtggctggtactggttgttcctttccatgtttagtgcttccttcaggagctcttattgtaaggcaggcctggtggtgacaaactctctcagcatctgcttgtctgtaaaggattttatttctccttcacttacgaagcttagtttggctggatatgaaattctagttccaaaaatcttttctttcagaatgttgaatattggtcccgactctcttctggtttgtatggtttctgctgagagatctgctgttagtctgatgggcttccctttgttggtaacccaacctttctctctggctgcccttaaccttgctgaatctgacaattatgtgtcttggggttgctcttctcaaggagtgtctttgtgatgttctctgtatttcctgaatttgaatgtttcttttttcttttcttgtctctaatcttgtgttctcactttatttcattaattttatattcaatcactgatatcctttcttccacttgattgaatcagctattgaagcttgtgtatccttcatgaagttcttgtactgtggttatcagctccatcaggtcatttaagctcttctctagattcttcattctagttagccattcgtttaacattttgtcaaggtttttagcttccttgcaatgggttagaacatgctcctttagctgggtgtagtttgttattactgaccttctgaagcttacgtctgtcaagtcatcaaacttattctccatccagttttgttcccttgctggtgaggacttgtattcctttggaagagaagagacgttctgatttctggaagtttcagcctttttgctctggtttctctccatctttgtggttttatctacctttggtctttgatgttggtgacctatggatggggttttagtgtggatgtcctttcctgttctgatgttgatgctgtcctttgctgatgttgatgctattcctttctgtttgttagttttccttctaacaggcccctcagctgcaggtctttgggggtttgctggaagtccattccagaccttattttcttgggtatcagtagaggaggctgcagaacagcaaatattgctgcctgatccttcttctggaagctttgttccacaggggcacccacctgtatgaggtgtctctctgcccctactgggcggtgtttttcagtcaagctacatgggggtcagggacccacttggggaggcagtctgtccgttatcggagcacgaactccgtgctgggagaaccactgctgtctttagagatgtcaggcaaggacactgaagtctgcagaagctgtctgctgccttttgctcagatatgccctggcccctgaggtggaatctggagaggcagtaggccttgctgagctgcggtgggttccgcccagttagagcttccctgcagctttgtttacactgtgatcatagaacgcctactgaagccttagcaatggaggacttccctcccccacggccccgttaattgatgcagtttccgcaccccccccacggccctctccaccctacctgtcaagctccagctccagcggaggatgctccagggacagcgatgtcaggactgagatgcaggggctgccttagagtctggatgcatggggtagcggggtgtgaggcaccgggccggggtgcagggccggaaggaacgtgctggatctgggatgctaccagacggggcgtcccaaagaccgaggcagtcccgtaccttacaactctcagatgagctccacggtgggcttggccaccgtgacccctactgccgaggctgctgcagaggagccgccgccacccacaccgctgtggagcagccgcacatgctagactccgcttcagtaaagcccgggcggtgagtgccgccgcagaggcgagcccgctccagacagtggcggttgcgtgagcgcccctccccccaccgggctttggagcgcgggctcccacgccggcccggagagctgcccgactgagcatgcgcgtcgcgctgccgagcctcctgagagcccgcgggctggcgccgacctttcttgccggctccggcgtgagaggcccgtcggtgtgagaggctcagcgtgtgtcgcccagtgtcagtgcctttggggcgggggacagcgtccccactttccttctactgaatcctcgggcccgtgggcagaacccatttcttttgtttgtgggcctgggtaccttgcagggcctttctctattccccaccggctcaggacccatccagcttgtacttgctgactcgggagggaactcgggacgtagggccatgcggggagaggacctggcctgatctgggaggcaaggggcggggaggtgttagagagttcatccttccccactctctccgggctcgcgctgcctcggggattcccgtggcgtcctgggagttcccgtgccaccttccttccagctggcagctctgcagacacctccacccgtgaacatcacgctcaagttctggagacagggaggagggctgggggatccagagatccagcctgaatagacttctgctctctgctcagctaagcacccaacactgagaaatgaacaggtcaattggattcaaagccgcgcaatcatctgcattttatttgcacctcatttgcaagttgttaatttgcaactctgctccttccactccaggttccttctctcccatcacccctcagattccccagtggcccaggaaaaaatatcttggtctttgccaaggtagactcagccttgtcagcaggcctgtcctgtgttctcaggggaggcctttacccaaggccacaacaacagcaggaatcccgagtaagacgccaccttgacggcagggaaggctggatcttttcacagggcagaactgatttgatgaggtgaacagtaaggtgagcagaggtgggaaaggccagtgggtgaatgcaggaacagcaccaggagctagagcccaactctggcctgtgggctgtctcccggtcctcagaggcgggacggggttcctccacccaccaccactgtttccccagtgatgtagctggcatcttcagagcacaggaaagacacgatgccagcacaatcctctggctcgcctaacctggggaataagggaagcaaggaaggaggtaaaaatcaaacgggtctgcctccctcacctgggacacggggagttaaatttgcttaatcaagaattatcagatgacttttcaggatcagtgtacaagctttctgcctatcaaatagggttaccacgaggatatgctgttataatttagtataagcatactgtactctgcaaaactattacccataatattcaaatactatagaaacacaccggtttttagagagctcaggacaccaaaatccaaagttatatagataaaatggtgagcaattaattatttcatacttcaaaaaaatggtttcacatgtgcacacactaaagtatcagggagtctgtgtgacagtaaatggtgtgtttaaaatgattccatttgtacaggttcagcttagaactttttcaggaatctatacttgtgccttaaagtcatgttcatttagtgagaatgtgctaattcttattttatcagtgactgcatagttaggagacactttaatctccctgccatagaatgctctagaggtgggcagagtgagtaactcaaacctagaagggctgaattaatgcttctccattctacttgtatcttgcaatcatttgagaggcttaaaccaaaaaagaaaagaaaagaaaagacaaagaaaaacaaaagcccagatggtcaagtcctaccttggaccaattaaaaagaatctctgggagtgggtggggcctgagcacctgcagtttaaaaagctccccaggtgattctaatgtgaatccagtattgagctacatgggctagatcattcattggtgctctaggttgacaatcccctcacttattaatgagttatgaaccaggcctgca

SEQ ID NO: 1241258 - DNA, 4001 bp, Homo sapiens
attggggcatttatcccatttacattgaaggttagtattgttatatgtgaatttgatcctgtcatgacgttagctggttattttgcccattaattgatgcagtttcttcatagcatcaatggtctttacaatttcgtatgtttttgcagtggctggtacccgttgttcctttccatgtttagtgcttccttcaggagctcttattgtaaggcaggcctggtggtgacaaaatctctcagcatctccttgtctgcaaaggattttatttctcattcacatacgaagcttagtttggctggatatgaaattctagtttcaaaaatcttttctttcagaatgttgaatattggtcccaactcttttctggtttgtatggtttctgctgagagatctgctgttagtctgatgggcttccctttgttggtcacccaacctttctctctggctgcccttaaccttgctgagtctgacaattatgtgtcttggggttgctcttctcaaggagtatctttgtgatgttctctgtatttcctgaatttgaatgtttcttttttatttttttgtctctaatcttgtcttctcactttatttcattaattttatcttcaatcactgatatcctttcttccacttgattgaatcagctattgaagcttgtgtatccttcatgaagttcttgtactgtggttatcagctccatcaggtcatttaagctcttctctacattcttcattctagttagccattcgtttaacctttttttgaaggtttttagcttccttgtaatgggttagaacatgttcctttagctgggagtagtttgttattactgaccttctgaagcttaacttctgtcaagttatcaaacttattctccatccagttttgttcccttgctggtgaggacttgtattcctttggaagagaagagacgttctggtttctggaagtttcagcatttctgctctggtttctctccatctttgtggttttatctacctttggtctttgatgttggtgacctatggatggggttttagtgtggatgtcctttgctattctgatgttgatgctgtcctttgctgatgttgatgctattcctttctgtttgttagttttccttctaacaggcccctcagctgcaggtctttgggggtttgctggaagtccattccagaccttattttcttgggtatcagtagaggaggctgcagaacagcaaatattgctgcctgatccttcttctggaagctttgttccacaggggcacccacctgtatgaggtgtctctccgcccctactggtcggtgtttttcagtcaagctacatgggggtcagggacccactcggggaggcagtctgtccgttatcggagcacgaactccgtgctgggagaaccactgctgtctttagagatgtcaggcaaggacactgaagtctgcagaagctgtccgctgccttttgttcagatatgccctggcccctgaggtggaatctggagaggcagtaggccttgctgagctgcggtgggttccgcccagttagagcttccctgcagctttgtttacactgtgatcatagaacgcctactgaagccttagcaatggaggacttccctcccccacggccccgttaactgatgcagtttcggccccccgccccccaccgccctctccaccctacctgtcaagctccagctccagcggaggatgctccagggacagcgatgtcaggactgagatgcaggggctgccttagagtctggatgcttggggtagcggggtgtgaggcaccgggccggggtgcagggccggaaggaacgtgctggatctgggatgctaccagacggggcgtcccaaagaccgaggcagtcccgtaccttacaactctcagatgagctccacggtgggcttggccaccctgacccctactgccgaggctgctgcagaggagccgccgccacccacaccgctgtggagcagccgcacatgctagactccgcttcagtaaagcccgggcggtgagggctgccgcagaggcgagcccgctccagacagtggcggttgcgtgagcgcccctccccccaccgggccttggagcgcgggctcccacgccggcccggagagctgcccgactgagcatgcgcgtcgcgctgccgagcctcctgagagcccgcgggctggcgccgacctttcttgccggctccggcgtgagaggcccgtcggcgtgagaggctcagcgtgtgtcgcccagtgtcagtgcctttggggcgggggacagcgtccccactttccttctactgaatcctcgggcccgtgggcagaacccattgcttttgtttgtgggcctgggtaccttgcagggcctttctctattccccaccggctcaggacccatccagcttgtacttgctgactcgggagggaactcgggtcgtagggccatgcggggagaggacctggcctgatctgggaggcaaggggcggggaggtgttagagagttcatccttccccactctctccgggctcgcgctgcctcggggattcccgtggcgtcctgggagttcccgtgccaccttccttccagctggcagctctgcagacacctccacccgtgaacatcacgctcaagttctggagacagggaggagggctgggggatccagagatccagcctgaatagacttctgctctctgctcagctaagcacccaacactgagaaatgaacaggtcaattggattcaaagccgcgcaatcatctgcattttatttgcacctcatttgcaagttgttaatttgcaactctgctccttccactccaggttccttctctcccatcacccctcagattccccagtggcccgggaaaaaatatcttggtctttgccaaggtagactcagccttgtcagcaggcctgtcctgtgttctcaggggaggcctttacccaaggccacaacaacagcagaaatcccgagtaagacgccaccttgacggcagggaaggctggatcttttcacagggcagaactgatttgatgaggtgaacagtaaggtgagcagaggtgggaaaggccagtgggtgaatgcgggaacagcaccaggagctagagcccaactctggcctgtgggctgtctcccggtcctcagaggcgggacggggttcctccacccaccaccactgtttccccagtgatgtagctggcatcttcagagcacaggaaagacacgatgccagcacaatcctctggctcgcctaacctggggaataagggaagcaaggaaggaggtaaaaatcaaacagttctgcctccctcacctgggacacagggagttaaatttgcttaatcaagaattatcagatggctttttcagggtcagtgtacaagctttctgcctatcaaatagggttaccacgaggatatgctgttataatttagtataagcatactgtactctgcaaaactattacccataatattcaaatactatagaaacacaccggtttttagagagctcaggacaccaaaatccaaagttatatagataaaatggtgagcaattatttcatacttcaaaaaaatggtttcacatgtgcacacactaaagtatcagggagtctgtgtgacagtaaatggtgtgtttaaaatgattccatttgtacaggttcagcttagaactttttcaggaatctatacttgtgccttaaagtcaggttcatttagtgagaatgtgctaattcttattttatcagtgactgcatagttaggagacactttaatctccctgccatagaatgctctagaggtgggcagagtgagtaactcaaacctagaagggctgaattaatgcttctccattctacttgtatcttgcaatcatttgagaggcttaaaccaaaaaagaaaagaaaagaaaagacaaagaaaaacaaaagcccagatggtcaagtcctaccttggaccaattaaaaagaatctctgggagtgggtggggcctgagc

SEQ ID NO: 1241259 - DNA, 4001 bp, Homo sapiens
ttttgcagtggctggtacccgttgttcctttccatgtttagtgcttccttcaggagctcttattgtaaggcaggcctggtggtgacaaaatctctcagcatctccttgtctgcaaaggattttatttctcattcacatacgaagcttagtttggctggatatgaaattctagtttcaaaaatcttttctttcagaatgttgaatattggtcccaactcttttctggtttgtatggtttctgctgagagatctgctgttagtctgatgggcttccctttgttggtcacccaacctttctctctggctgcccttaaccttgctgagtctgacaattatgtgtcttggggttgctcttctcaaggagtatctttgtgatgttctctgtatttcctgaatttgaatgtttcttttttatttttttgtctctaatcttgtcttctcactttatttcattaattttatcttcaatcactgatatcctttcttccacttgattgaatcagctattgaagcttgtgtatccttcatgaagttcttgtactgtggttatcagctccatcaggtcatttaagctcttctctacattcttcattctagttagccattcgtttaacctttttttgaaggtttttagcttccttgtaatgggttagaacatgttcctttagctgggagtagtttgttattactgaccttctgaagcttaacttctgtcaagttatcaaacttattctccatccagttttgttcccttgctggtgaggacttgtattcctttggaagagaagagacgttctggtttctggaagtttcagcatttctgctctggtttctctccatctttgtggttttatctacctttggtctttgatgttggtgacctatggatggggttttagtgtggatgtcctttgctattctgatgttgatgctgtcctttgctgatgttgatgctattcctttctgtttgttagttttccttctaacaggcccctcagctgcaggtctttgggggtttgctggaagtccattccagaccttattttcttgggtatcagtagaggaggctgcagaacagcaaatattgctgcctgatccttcttctggaagctttgttccacaggggcacccacctgtatgaggtgtctctccgcccctactggtcggtgtttttcagtcaagctacatgggggtcagggacccactcggggaggcagtctgtccgttatcggagcacgaactccgtgctgggagaaccactgctgtctttagagatgtcaggcaaggacactgaagtctgcagaagctgtccgctgccttttgttcagatatgccctggcccctgaggtggaatctggagaggcagtaggccttgctgagctgcggtgggttccgcccagttagagcttccctgcagctttgtttacactgtgatcatagaacgcctactgaagccttagcaatggaggacttccctcccccacggccccgttaactgatgcagtttcggccccccgccccccaccgccctctccaccctacctgtcaagctccagctccagcggaggatgctccagggacagcgatgtcaggactgagatgcaggggctgccttagagtctggatgcttggggtagcggggtgtgaggcaccgggccggggtgcagggccggaaggaacgtgctggatctgggatgctaccagacggggcgtcccaaagaccgaggcagtcccgtaccttacaactctcagatgagctccacggtgggcttggccaccctgacccctactgccgaggctgctgcagaggagccgccgccacccacaccgctgtggagcagccgcacatgctagactccgcttcagtaaagcccgggcggtgagggctgccgcagaggcgagcccgctccagacagtggcggttgcgtgagcgcccctccccccaccgggccttggagcgcgggctcccacgccggcccggagagctgcccgactgagcatgcgcgtcgcgctgccgagcctcctgagagcccgcgggctggcgccgacctttcttgccggctccggcgtgagaggcccgtcggcgtgagaggctcagcgtgtgtcgcccagtgtcagtgcctttggggcgggggacagcgtccccactttccttctactgaatcctcgggcccgtgggcagaacccattgcttttgtttgtgggcctgggtaccttgcagggcctttctctattccccaccggctcaggacccatccagcttgtacttgctgactcgggagggaactcgggtcgtagggccatgcggggagaggacctggcctgatctgggaggcaaggggcggggaggtgttagagagttcatccttccccactctctccgggctcgcgctgcctcggggattcccgtggcgtcctgggagttcccgtgccaccttccttccagctggcagctctgcagacacctccacccgtgaacatcacgctcaagttctggagacagggaggagggctgggggatccagagatccagcctgaatagacttctgctctctgctcagctaagcacccaacactgagaaatgaacaggtcaattggattcaaagccgcgcaatcatctgcattttatttgcacctcatttgcaagttgttaatttgcaactctgctccttccactccaggttccttctctcccatcacccctcagattccccagtggcccgggaaaaaatatcttggtctttgccaaggtagactcagccttgtcagcaggcctgtcctgtgttctcaggggaggcctttacccaaggccacaacaacagcagaaatcccgagtaagacgccaccttgacggcagggaaggctggatcttttcacagggcagaactgatttgatgaggtgaacagtaaggtgagcagaggtgggaaaggccagtgggtgaatgcgggaacagcaccaggagctagagcccaactctggcctgtgggctgtctcccggtcctcagaggcgggacggggttcctccacccaccaccactgtttccccagtgatgtagctggcatcttcagagcacaggaaagacacgatgccagcacaatcctctggctcgcctaacctggggaataagggaagcaaggaaggaggtaaaaatcaaacagttctgcctccctcacctgggacacagggagttaaatttgcttaatcaagaattatcagatggctttttcagggtcagtgtacaagctttctgcctatcaaatagggttaccacgaggatatgctgttataatttagtataagcatactgtactctgcaaaactattacccataatattcaaatactatagaaacacaccggtttttagagagctcaggacaccaaaatccaaagttatatagataaaatggtgagcaattatttcatacttcaaaaaaatggtttcacatgtgcacacactaaagtatcagggagtctgtgtgacagtaaatggtgtgtttaaaatgattccatttgtacaggttcagcttagaactttttcaggaatctatacttgtgccttaaagtcaggttcatttagtgagaatgtgctaattcttattttatcagtgactgcatagttaggagacactttaatctccctgccatagaatgctctagaggtgggcagagtgagtaactcaaacctagaagggctgaattaatgcttctccattctacttgtatcttgcaatcatttgagaggcttaaaccaaaaaagaaaagaaaagaaaagacaaagaaaaacaaaagcccagatggtcaagtcctaccttggaccaattaaaaagaatctctgggagtgggtggggcctgagcacctgcagtttaaaaagctccccaggtgattctaatgtgaatccagtattgagctacatgggctagatcattcattggtgctctaggttgacaatcccctcacttattaatgagttatgaaccaggcctgcagctcatgtc

SEQ ID NO: 1241260 - DNA, 4001 bp, Homo sapiens
ttgcttgggttgttgtcaggtctagagataacctgtgtaaggctctgaacacaggaaatggcacatagtaagtggctgaaacatggtgggctgcttcctgaggttcccagggacttgactctataagctgaagaagaggggaatgtttattagctcatgggtgggaacatctattttgtgattgtatttacccttcacatctgttcaattagattgaaaattactgcagaaccagtaccagctgtttctttggggtactcaagggatgatgcagggttgaagcattagaatgttttaaaattctctgactgagatgggatgattctctgacgttagtatatggacataatagaaaggcacacagtaaaaatgtgctgctgtctaggaaagcagggaaggaggctcaggctggcttccttttccacctcctggctctgtgcccatttccctgcagctcaccatggccaccagccgctcccggtcctccgccttccccacatggcacacagtgcccgtcacgctcagcccctccccctgcagcgtggccaccgcctggtccacattctgctgcttccggctgctgacgaccacgtgggccctgtcctgggccaaacgccgggcgatggcgaagccgatcctgtgagcagaaagagacaaagactgctaaggcctgtgcaggggaagaggtcgacagcatgggctctgaagttaagactgcccgggtttgaattctggctctttctctatataactcctacgtgtgcctactatgtgtaaaacaggcttaatggcatggccatttttagcactgctttacttatttttattatgacctggatcacagccttagttcccaagaactgacatcactttctacagttcccaccacgggtgacaggcttcatctcctgttgggactgagaggtgagaaatgagctgggtgtgcagcagcagccacttccgtgatttgaaggtctcactcagaacagtcctgccgccaggtttctttcttactagtctacatcattctcaaaattctttccataattattttttggggtgcatgtgaaaagatggtctctggtcaaaaacgtaaatattgccttgggaagaagagttacacattctgcagttgtcagccattagcattttatctacatttgtattttagttttgtgaagagctggcatctagcaaagtcctgtagaaatgagaaccaggactgacaagagaggtgggtgagaaacaggctgggcaaggtaggcccagatgtaccgacctaaaaaaaagtctcgacacatggctctggtgtcccatctaggtaagggggaggggttccgggacactttctggagcccaaatagaatggtacattttcaaaaagctggaggccttgttataagattttgaatccagattcccttgcatttccagtttctggtcttcccagaggctaggtaaggctggttgactggggcagcccagaacactggggggactagatcgatggggctgcacagaggtggcacagttgtgccagaggcagcagggacagaagggctggcaagggagggccagggtattcggaggggcttcaggcggaccacgtggctactttttttccatggccagactttggcggtatgtgaggtctgaggacaggggcactggaggcaaaggacgagacaccagtgcatgtttccaggcagccagggcctcagaaactccggcaccaacactcacccgtcggtggaggccgttaccagggccaccttatttgtgagcgggtcccggcgggtcatcctggagctggccatccgcaccgacttccgtgcccaggcacagaggcctagcagcctggccatctgcatggatcagaccagcaagtctgggttccactccttccagcggaggtgacagagtagggcgaaggggcaggacgaagggcgggccgcttccctgcctgcccccttcccgccctcggccagctgggagtcgtctgtggcggttggcgcctcccgccgcccgccagtcgccccgccccgcagccagctaccttccgcctgactggggcttgccttcccgggctggtgagtgatcaaagcgctctccgttcaagttgcctgtagggctcgcccctcccctggcccccgcaggaacccgcagactttggctgctgcccttctgcatctgcttgtccacgttttcttcttggggaagtgggggttttgagttggttgcttttgcttcttcagaattccttctccaagaaagtctgggtctatgtatgtgacagcccacaggagggcaaatgttttgagactgcccatggaggtgaggcctgtggtccccatggagtccaccaggtgaggctggagcagcctgggagagagacgtgataggcagtagctgcgccaggcctggcactgcccttcactctgcccaaggtctcttccatcttcacgggcccttggagggcagactacggtcattggcaaaacaggatctcatatccctcgccaaagggacttcctcctttacaggggctaagtggtagcgaggaggctggacagtccctcaagcagtggtggaaatgcaaagaactcggggcactcaagttctccctaaccactctgtccccaggtcttagcctccatcctagttcaataaatatttgttgaatgcaaaatctctttatgaactgtaagctactaagcacatagtagttactgccaccatgtagtgattattattggtgccctgggccagactcttcatctgtaaattactgagggtatggatgatgaataaagtccttgccagctataaattctgtgtccaagacttcagtctccacttctgccaagtgggctgaaatgatctccctcctgggtttccgggagaatgaataaatatggatggcttatggtacagtgtagaaaggccgcaacagacccaaaggtaagtatctgaattagtttaacccactggcctccaaagccagactgagaagcagtgctggttcatggcagcgttttcactagttcaaagcaaaatgagaaaaggaaacaattacagtgagtttcataaagctaagcttatttaacagtcctttattgtggagtatacctttccttctttttgtgtgtgtgtgtgttagtgttttgtttcagaaaagatgatgaaagcagatgggtaggtttagagatgtgttattggtgaaatcaccagtttggcagccttatgccagtccctacaattagaggggaaagaatcctggtttgtgaaatccagttctaggcatgacttttgaatagaattcatgtttgctcaagattcatttagtatatgtgcaggtcagctgagcagctgaaaaaggatttggacattcagctgggcgtggtggctcaccctgtaatcccagcactttgggaggccgaggcgggcggatcacggggtcaggagatcaagtccatcctggctaacacggtgaaactcgtccctactaaaaatacaaaaaattagccgggcgtggtggtacttgcctgtagtcccagctactcgggaggctgaggcaggggaatggcatgaacacgggatgcggagcttgcagtgagccaagatcacgccactgcactccaacctgagcgacagatggagactctgtctcaacaaaaagaaaaaaaacaaggatttcaacattcaaaagggggtgtatggcgagcaagtaatagaacaggcctgcactggatttctagtgttttcctcagccaagaagttacagctgcagcactctgctttgctactcagcacatcccgatgagacaggagagctgcagtataattttccccatgtccaggcaaagctgactctgactggtgctcctcagtctgagcctcatgaattattgacagaggctggaagcgccacactccttgtgctcttgcactgtttggagctcatgcactgtgggaacccttcccagggctctccatctgtg

SEQ ID NO: 1241261 - DNA, 4001 bp, Homo sapiens
caatttatcaaactacatgtgcaaatttgcaaattatataactacataatgataacaatgtaattaaatttaaaatccttcaaactgttcttttccgacaaaacacaactgaaaatattaaatgaatttcttaaaattttcaatgatcttaacttttaacttttccttaatatgagaaaataacttttaacttagtagcttagagatattcattcagatgttgtcaataattttgctttttagcacttgacataatttgatgggttgaatattttttgtaggattaaataataaaatataatctattttcgtttaattctccaagtccaagtgaacacaaaagcactaaagatcaaacacaaacaacgtctgcaaggcagccaatggcagccaataggcacacatattcccccgctgaggtggaacaatcgatcaagagaaagcccttggttaatgaagttgtgcagtatttgggattcctgctttaaaaggagaaagcccaatcacttgccatagttttgtagcactgctgtggcgtccatgttgtgtatttttcgtgaactcaatgtcagtgctgcacatgctatacccaagaaaacccaaccagaaaaatgaaatactaaggaataatattttctcgggtggggttaagctttggaggggcacaaaccactgtattaccagatttttttttttttttttttttgtccacaggaaccaattctcaccttgggatcaatatcacccccctcaacgcccaacccataacgccccccccaaacatagtctatctttcgagctactatctcttccaagcaaactttgtaacatgctttgagtatttttataccagaaacttggtccagggaaaccccatttccccaagtccttaaggatccaaagcctagctttcggtaggtcatttaatttctctgaacatcagtttccctatctggaaaataagattaataatgcctaccttgtaagagttgttgtaaaagttaaatgttatgtgtgtaaagcgctgagccaacatacagcaaatgtacacgatgtcaaatattaagcaagacacagataaagtgagataggcagtatgccaataatgatctcgctccagcaaactgccatttttagttctttctagtgtttgactagaatgagtaagtaggtgaaggacttcggattatctcagattttatttcaaaactgcaggagtgggaagtggaggacagactacttcaggtagtagaacgaccgggcttccggtacttacaaaggagtttcccttacaaacgcagggggacgctcactgtttctcaaagtatcgtcctctgagacaacaccagaatcccttgagtcctgcgtaagatgtcagagtcctcaggagcaccgccgactccagtgctctcttaacagtttggcactccctggagaggtttcctagcctgaatggcaagtccatgccatcttccgaccagtacagaagacaaaggggctttttagccctcgcctcttcctccccaacccgcagcccctgcgtaaggggcagccgggccttcgggaagctccacgcaacccacaaaggacccgggatcactgcagaacccccggagacccggacacgcctcggcagctccgagcccggcctcccactcgggagaggctttggccggtcctcacctgggcgtcgtccctgccactcggcccatagtagcgtcaggtcgccgtcagccctcaggaagcgcagcagctgcaccaagagcaggagcagcgcgcacagcaccagcagccacagcagcagctcccagttcattgcggccgcgcacgcccagctcggggggaagaagacggcccgcaccagagtcgcgtcgctgccctgcgggatcgcagcgccaccccttcggccagcccagagccgcactgccccggctccgcccagggagcaggccgggaggaggagcggctcgggcgcgccgggctcagcactcgcggccccactcgcggtccttgggcggcccgcgccctcatgcggcacacccggcggggccggcagattgcttgaattcaagtgtccgagaccagcctgggcaacatgaggaaaccctgtgtctaccaaaaataaataaataaaattccagtatttttaaagaagctgattcaaacataagctacatattatactacgttatttcctctctgtacagggacactatcaacggccaggagacagatagaatcattcttgcttggcccctcttctccattcctattcagaaagaacatccccttttcaagcttcagtatcttttcatgaggtcgagaaagtgctgaagaaagactgtggctatcactcaagaccccacaagccaaggcaatggtccctccatggggacaaggtccttttacaattagagaaaaaaagactgaagccatgtgctgtgttggcaccttacaacctgattctgaccacacacaaatttactctggtgtctgtttggcaaccaaagcctaggttggtaccaaatcctccccttacccaagccattattcacatcctaatgtaaacagcaaataaaaacagagaatgtaatgaaaacaccaaggtcttgcctactctaatacacaaaagagtaaaatactgtttttgattaatttccgtttgaaatgaccttcaaaacatttaattgcttcccactaaatacctacatgtatttgaggcatcaatagtagcatctttcttgttttcaagcatttgaaagcaagagggttttccattcacaagcctcagagggacccagttagagtgcatagaaactaggccatgtatgagaacgacctgtggccaaatggagaaagttctgggcgttgatgcagtagaactttcatcctcttcatttcctagagtactttgtgtgctctgatgtcaaaggctcttccttggctgaaactaaatatgactttaaaacagtcatggaaataaaagaagcagtgacttccctccccagtgttgttttctttttctagtcttgcctgccaaacttttgtttttctttaaatgttttgaagaatgttacttgcagtaatcaaatttccttaaatagctcttccttctctttttaaatcctattataaaccccctacctgcctccccaccctcatccttctctaaaaagctttttggggttatctggactcagagtcatctttccctaatctcacctcttttcacaattacttctgaactatatctgaaattgttttttaattattttcagggttaatatagtattgttccaatggaactttagaatccttgaaataaagtagcaaatctgatgcttcttttgaagagtctggaatacatagcttagtgttgacatgagaagcaataagcccacgttgattgaattctcctttccttgaaatttaaacctccttgatagagagtagaaggatagttaccagaggctgagaagagtagtgggagggttgggggggacgtggagatggttaacggatacaaaaaatagaaagaatgaataagacctagtatttgatagtgcaatggggtgcctatagtcaataataatttagttgtatgttttaaaacaaccagaagagtataattggattgtttgtaacataaaggataaatgcttgagggggtggataccccatttaccatgatgtgattattacacattgtatgcctgtatcaaagtatctcatgtactccataaatatatacacctactgtgtacccacaaaaattaaaaattaaaattcaattttttaaaacctccttgaagttcggaagttaatgttaaaatgagagttgctagcatttaataaatcaatcttctctaagtattattaaaatgctttgaataaagtccgaaagtcttttctataactggtaaccttcatttttaattccagatgtaatagaatggtaccctgccttccctccttttagtaatggtcacttttgatggtct

SEQ ID NO: 1241262 - DNA, 4001 bp, Homo sapiens
cttacctggtgcttagtaaactcttggttccatctctcttttgtccaagatgcatttacttctaggtttgagtattccccaaccttgagatctgaatgagttctgacagctgacacttgttgagcaacctggtttgctaattacaaatataatactccatgtaaatatgagaaatcttgcctagttggctctctggactactaatgattaacagtctacagaaatccttattattatattagacctaaccaacaatgtttttgatagcctctttaaaaccacagttccaaggttatcctccaaaaaaatggcacctactagacttgccacctcactttttgtcactcgcttcagagaaccctacaccacctttcttcttcatagctgatttcctctaagccaccctcctgttttcttcaataaaatcagatggaaacaagacagtctaacatgtatttaaagcagatagttatactgagacaacctaaaaaaagagcagtgacatgaatatattagtgccctaccagcttaggttcacattttatattttttatttttatatataatccaagcatataaaaatcagtattttaaactcttaactgaatatctaatttctaagcagcatgtaactttattaatacaactgattagcaaaatcataagtacaaacgttaattatccataattaagcaccttttgacatacttggtgaagctaaaacatcaagaaaaaaataaatgtaacaacttagattatgttctaatgtacatatgttccaatacttatgttccaaaagcaatccattcaaaagaaatacagaagcagaacatttaagagaaacagcaaaaagaaataggacaaaacaatttctgccagaagagattaaatgagtacattatctgtcaaactttcttcaataatttaacttaagaaacacagaaaatctgtttaaacataaaatcccatccaatttcccctgcacaacttgataaaataattttttattaccagagttgaccaagaacaccgtcctttttccatttctgctgaagtctcccctgatctgataggacagctctttagtgagtagtactgcaataaatgtcttccctgagccagtgtttaaacagacgatggtattatgatccagagctgcttcaagcagttcaacctagaaacatggtgaaaaaaaagttatgcacttcttacctaagtacaaaatttataaaattggattttattttaaatcaggaaatttcactattctctaaaatcgtcctccaataaatttacaaaaaaaaccccacagtctacgtctttatacgagaataactcagaggaataaaatgcctgctatatacagctgtattgtgtaaatacgtgttgaaatggcatttaccctttctttaagcattatttttgtatacacagaatacttctttagaataacatgaatgactaaacttagagtaatcgtggttctgccagttcatggctgaacattttcaaactaatctaggttcctacccagctcactaggacagacacatccaagtgaatattaaggaacagtgaggttttcagagggggaaaaaagaaacttcacaaatacaactatcaaatccaattacccagcagatgttagaaaagaaaaggactattaagaataaaagtattttaaatgagaaaattaatcagaagtgggaggcctgaaagggtaaatgagttttatataagttgtgtcaactatatgctaatgtattccattttagtgtagaatgctccagtattagtgttcgcattagtacctgatattttcttggcgtataaatgttatcatgaattgcttcttgttgccatggcagtccaaagaaaggacccattggtgaggaagcaggggtcatgagctgcaggcctgccatgctgaggggttgcaaagcagggcttttcattcatccagtgtttctttcattgcatttttgttctagcacagcttactacaaaagggaaaaagaataccattacacaatcatgcagggttaaaaacaaagaaagcacagaaacaagagaaacatcagaatatcattcctatgagccattcaaactcttcctataattgttttagctttttcttgatctaagaggatcattttaggagtcaagcattctgtaccttacccagtgattctatgcctagaaatttgtcttaaagaatgaatcaagcaacttcacaaagagatgtacatgaatatttgttgttgcattattacttaaaaataagaaataactttaaaatctactggtaaaaaataagctacataaattatgctatgactatataatggaatactttgaatccattaagattatagcacatatctgtagttcctgacacagaacaatgtccataataaacctttaaaagaaaatatgtacagcatgatgccttgttaaatatatgtacatatataaaatatgtaaatatacacataaataaattttgaacattctttgtatattctatgacgttactgataaaatgataatgtatggaaggcacttagcactgtgcctgcaccacgaaagatttagacacctgctaaaattgtcactttatcaacagctcacgaacacaggcctttttctcaattgacaacctattataaatgcacaactatttaaatatgtatctttaaaattatacatatcctagataaattaaaacaaatgacaccactctgtgaaataaaaattttttcatggtatctaagcactttctatatttcatatagtttttcccacagataaatttgattatgtaaaatgataaaaactgaaactttaaaattcctacccttcaaacagagggtcagggattcaaatatctgtgtgaaagcctaccactggctttactgtcagcaggatttcctcgccccacagaagggaatttcctctcttgcactgctttggagtgttcattgctattactctatgaaactggaagagataattcaactctgttacttaacaaccaaaacttttgaatctcctgacatgttaagtacaacacatgacttaagttgttgcaactatttcaacaagaagtctcaagtgtagggtctcttatacaacacaatactgaattctgatttgagaaattaattctgttgacaagaattcaacattcagctaccataaagtactatctcaagtaagcagtgcaggggcaccccactgccggagctgagagcccggtaagacagcacgtctgcgggcctgacagcacaatcacgctcatcatctttccagaagggaacaagcgaagtaccacagagtactttatgagataatattaacccataatttccctggatcaaagagaactatgttcttcacgaaaaataatgtgctaattctctctgaatcaaagccccaacagccattccttttaccctagtacccaagcctagtacccactttcccaaattcagcaagccctcaggacttgcaggctcatcagttaaacttttttcttaatacaactgccaagaaccctatgtggaagtctattttaccaaaatgtctgagatcaggaggccactctgaaggcccaaggctaagatctgcgggtcccatcactgaccttctcacctggaatccactctcgtgatacctccacaattctccttcatgactacagactgcatactgtctagcactattcacccttaagcctgacccttcactttcacccaacccaaatgctaatcctagacttattgaagacatggtagaaggtaccaagaaacaagtctaagttctgatgatggatgaaaatataaaacaaaggagaaaagagggccgtgatgtaaatacccaacacatcttctcctacttccagaaaccaggtatgtccaggaaccagcagcaccccctcctccctacaactgtcaccatttcttctcatatagataacattagtaataacaataaataac

SEQ ID NO: 1241263 - DNA, 4001 bp, Homo sapiens
tccagaagggaacaagcgaagtaccacagagtactttatgagataatattaacccataatttccctggatcaaagagaactatgttcttcacgaaaaataatgtgctaattctctctgaatcaaagccccaacagccattccttttaccctagtacccaagcctagtacccactttcccaaattcagcaagccctcaggacttgcaggctcatcagttaaacttttttcttaatacaactgccaagaaccctatgtggaagtctattttaccaaaatgtctgagatcaggaggccactctgaaggcccaaggctaagatctgcgggtcccatcactgaccttctcacctggaatccactctcgtgatacctccacaattctccttcatgactacagactgcatactgtctagcactattcacccttaagcctgacccttcactttcacccaacccaaatgctaatcctagacttattgaagacatggtagaaggtaccaagaaacaagtctaagttctgatgatggatgaaaatataaaacaaaggagaaaagagggccgtgatgtaaatacccaacacatcttctcctacttccagaaaccaggtatgtccaggaaccagcagcaccccctcctccctacaactgtcaccatttcttctcatatagataacattagtaataacaataaataactttagaaaaatagtctaaaaataaattaggaatgttttattttttaaagctggggagggtattcttcaaaaatgtcaatgccataaaatacaaagaaaaactatgaaaatgttccagattaacaaagactatatggatacaaatggacataaagatggaaataacagacaggcttattatccttagtattacgtcctccaggttcatctgcgtttttgcaaatggcaggatttccttctttttagcgctgaataatattcctccatgtgtgtttgtgtatcacaatttctttacccattcatctgttgatggacacttagattgtttcaatattttggctattatgaataatgttgcaaagaacataaatagtgatctcattcataaaggacattattgaattcatttttaaaacgagataacagcaatgttaaaattccctgaagttgatataactgactgtggctatgtaagacaatactcttattgttagaaaatatacactgaagtatttaggggtaaagagctatgatacatgtaacttattctcaaatggtacagaaaaagaatctacatgtagatacacacacacacacacacacacacacacacacacacacagctgataaagcaagtggggcaaaatgggtacagcacatatttttgtcctattattcttgcaacataaatctttttcttcattttctgctcaaatataaataaatacctcattcctttatgtattcaaaagcacaaggacaggtgattctggctagctctcaaatactccatttcctccacaggtaatagccatgctcaactcagcgtggtctcagtcaaacagtggctcactgatcaaggatccagtttctttttttcttttttttcaccaagactgagaatcactcgatcactcaggctgagtgcagtggtgcaatgatggctcactgcagcctcaacctcacaagtagctgggaccacaggtgtgcatcaccacgactggctaattttttaattttttgtagagacagggtctcactatgctgcctaggctctagtttcttattttctgccatctgccagtcacccaaacctaagctgatgggcatacaacttacccctggccagaggaattggttcatgctcatccaacagcaaaaaatttaggactttcatttgatggttgaagagaagcagttgtctttctttccctctaaagatgactcatgaaattattagtcccatttgctgctgcaattacactacacagacccatgaaaagatccagccttaggatgaaaccagcaccgcagatggcaaaaataaagaacctgggtcattgatgacatcaataaactgctggatcaaccaaactcaaagcccagcctaacaatggactttccaattaactgagccaacaaattccttaactatccaagctagcttgagttgaatattctgggataaaagcaaaccaaatgacactctctaaatcactattatcacttcctgtaaaaggtataagtagaaaagaggaaagcaaagaacagatatgaacagaaaggaaaggaaaaaaaggaaagaagggaaagaaggaaaggaggaaaaagggaaagcaagggaaaggggaaaaggaaagaaaagggaaaggaagaggaaggggaaggaaaaggggaaggagaaggaaaaggggaaggggaaaggaaaaagggaaggggaaaggaaaggggaagaggaagagaaaggggaaataaaaaggaaaatggaaaggggaaggggaagggaaaggcaaaagaaaaaggaaaagggaaaggggaagaggaaagggaaaggggaaggggaagggaaagaggaaggaaaagggaagggggaaggggaaggaaaaggtaaaggggaaagggaaagaaaaaggggaagggaataagaggaaggaaaaggggaagaggaaagggaaagaaaaaggggacaggaatggggatagggaaggggaagggaaaggggaaggggaaggaaaagggaaaggggaaagggaaagaaaaaggggaagggaatggagaaggggaagggaaaggggaaggggaaaggaaaaaagtcagggatcaaagcagaaagccatcaggccacaaatattgagataatgaacaagtactgcagccagaccccaagcaaggtgaaaagctttgtttgtaagggaaaagtcaagggtcttagactccaaaaaaccagggatgagctctaccaagaagcttctaagactttgaaaatgttctccttatttgtccttaggaatactttttttcactttctgctatcagtaaattctttttgaaactgcaaagccgcttgtttcggaaacaaattgaggaaaaatctggacagttcttcctcggcacaagagagggagagagatcgtttccctggcctgcctatttcctcctttgttctcataaaatcacaaaggagaaaacaggcagggcagggaagctggcccaagaccaacaaagactcaattctatctggaaaataagccctagacctccaatgtttctcaggcccggtttcacctcaagacaccaacctcactcaagtatgtggatcctattcctacaaaccagcaggtaaagagcttggaaaaggaggagttgcaaattcactcagtgtccaggttctgttcctggcatttcaaaggacagagattttttttttttcttagcaaacacaacatttctcataaatgccctaccccaccctaaaactttcacagggtttagaaaaaaatgataggtagctggtttctaagaatcaatctgagaaaaaaagtggaaaaaaaaaacagagaaatgaaaggttacatttatcaacatttaggctctaaataaagagaaaatagatacattatatagtaaaaataaatatcaaacaataaagaaatacagaaataacatctctaaccaaaaatacctgaaaagattaaggtttctatcagctctcacaaaaaaccatgtgtaagaaaataatacaaactactggaatggaattcattaaaaagttgatatttaaaaaggaaattaagcaaagcactacactctgtgatatctagtcccaaatgtactctgaaaagtactgcccccactcatgactgcctgacttctgccgacctgtaaccttacgttcagattattcacccagcttctcagtaaactatcgcaagaacaaaaaaccaaacaccgcatattctcactcataggtgggaattgaacaatgagatcacatggacacaggaaggggaatatcacactctggggac

SEQ ID NO: 1241264 - DNA, 4001 bp, Homo sapiens
ctattctctaggacctggcttatcccgaacccatcttttaataaactgagttttttggtgaggatgtatatttttatttagaaaacttaacgtttacaccaatacatattcaatatagctaacctgttttaacagcacatttttaacaatattttccgagttgcttaaatcctaacctgagtccttttccactgtttgaaaacaagcaccacgaagacacctgacaatcaggattgtaaagattcagaatattcgaagacagaagcataggcgtccaagtgatcctctttcatcagatgaatgtttttaaaacctgaaagtcctaagaacacttacttatcgtgtagaccagtaacgtgtccctttaaccacaactctctccacaaaagcacggagttaacactacacaaataggaccctccaactcatctccacgtttccgcggatcttcaggttcctaaggacacactcagtggtttgctggctctgacctccaggcagagccatcagggcaactcagcttttctggacaatctacagaaatctgatgtgctaacttaaaacatacactgatttccccaaaatcaaaaaccctgaagaaagggtcctccgcagggtctaggcattttggcacaaaaacatctgaggggagaggcaaaagaatggcctcggcccctgcccgccccccagggccccaatctggtcccctgacagtaatcacacaggaccctcccgggagggaccgagagcccagcttcgtcccctccgggcgcggcacagcggccccatcagaggagggccccagggtgctccggcaggtcaggcgcgcgtctccacctccgctgctcccgcgccaccttagcgcgcgtgacgggacctgtcaagagccccaggcctcgccaggccggggagtggacaggcgccggcatcccccaccacgccacggcggcccggaaagtctcccagggctgcctcgcggggaggcgccggggtccgggcccaggagcagagccgaggcgggcagacgccgggtccacaggccgcgctgtgcgggacgacgaggcaggcgaggccgcgcccttcgtcagcgcccgccaggcccggacgcgcggctcggggccatggccggcacgcgggcctccgcgcggaggcgggagcgcggccaggcgacccgctccccgccccggacacaaagctgctccgcgggagcccgcctcacctgcagcacggggcgccgcgggccttcgagaaccatcggaccccgctccggcgcgcgcgtcacagcccaggcctcccggagccgcccggcgccgccgcccccgccgccatttcctcgcgctcgccgtcgcctcgtccccgctgtcaggttactccattcacctgggcctgcagcagcctgcgccgcgcctccgcctcgacccctcccgccggcgcctgcggagactgcgcagcgcccggctggccggcagccagcgcacggcccgcggcaacggcgcacagccgcttggagaatcccactggctcccgcaccgcccctccgcgcccccacgctccgctcgccccgtggcggcatgagagcgagcctgtgattggacagggcctggcggtgaaaggttaatcccggccccccagccactcaggagcagggagacagcgggcgcgcgcgcggaggccggagaggcgtttgcggcccagcgcctggactggaccttggcgttgggccgcagttgcccggagtttttggggcccccgggaacccgcgcgccgaggccggctaagtttggcagactctctgagctctcggaattcgactgcctccattgttgctccttctggcacccacagaccgtaacgtggccgtaattgtttcccggagagcttagcttccctctgagcacctccctcccctttttaaagtaccttcccactcgcctgcgtttcctcgcgttagtggtgcaggggcctccgcatttggggaaataacaaacacccacttccgccccccaccccaaccgggatccccagataatgagaaatagatggtggccctctgtttgtaagctgttcatttgcataggtcggaaccgcgcaccacagcttgaagctaggaattaaaatatcggtgggaattaaataagtggctggcttaaagaacatcttcttaatttatccccaaatgtagacatctcttcagtggaccccctgataggccggtttgctccaggtgaggtgtgctcacagcaactgcaaccgtgtttctttcagaccatgggcgtgagcagaacctactatgcgcccctgctgcctgggctgtgctgttcagtttggggccaccagccccacatggctcctgagcacttaaagtatggctagtcggaatcgagatatatgcattctttaccaaataatgttcaaaaaattgttacatgttgaagtgataaactttttccatatattgggataaaagttttatttgtttattttttagtgtgggttctacagaattttaaatgtcacctgtggcctgcattatattgccattgggcaggctgatctagggcttgcatgcctgtgatccttaggtgcaccctgtgaggtaggtgctttaactgtgtgcaccctgtgaggtaggtgctttaactgtgtgcacattgtgaggtaggtgctgaaactgcttcctgttttttttttttttttcttttgagacggagtctcactctgtctccaggctggagtgcagtggtgcgacctgggcttactgcaatctccgcctcccaggttcaagtgattctcctgcctcagcctcccgagtagctgggattacaggggcacgccaccacacccagctaatttttgtatttttagaagagacggggtttcaccatgttggccatgatggtctcgatttctgaccttgtcatccgtccgccttggcctcccaaagtgctgggattacgggcgtgagccaccgtacccagcctgcttcctgttttaacagacgaagaaatggaataacttccaacaagtaagtagccagtaagtgaacaactgagatttgaacccacgtagtctggctttgaggctggtgtgctcagtcattactgtgctaaaattttgataatatatttactatgaattggcttaaggtttcacttgaaagtagcatatttatgggcaaaattaggaagtaggatgctcctggcagacccatgtatttaaaaaagtagtttcttatatgtcaagcacggtgagcatgtcatacctttaagaccccagtcatacatataaggttttctttgtagctaggaattaaaatatcggtgggcgttaaataagtgtctggcttaaagaacatcgtcttaacttatccccaaatgtagatatctcttcggtggactccctgataagcctttatgagaaggacagcatctcagtatgggggtaggcactggactctattggcagtggaaatttgtgggctggtacaacttcagcccctctggttgccctcttgcaatctgtcaagactagccaggctgcttgttccatcagcaggtatacctgatttttttatttttttaattttatgtatttgtttttttcttttttgaggcagagtttcactcttgtcgcccaggctggagtgcaatggcgcaatctcgtctcactgcaacctctgcctcctaggttcaagcgattcttctgcctcagcctcccaagtagctgggttacaggcatgtgccaccacgcccggctaatttttgtattttcagtagagacggggtttcaccatgttggccaggctggtctcgaactcctgacctgcctcggcttcccaaagtggtgggattacaggcatgagccactgcgcctggccggtttgtctgatttttatcaatttcagtttttatttttaaaataaatagtatatccatattattcatttatcagaaagcctataaaagatacacagtggaaaaagatgtccctcacacctgtcc

SEQ ID NO: 1241265 - DNA, 4001 bp, Homo sapiens
gatagcactacaagtactgtacaacccactatatgacaaaatcactgtcaaataagaatcatgagccacatcaaaagacaatgtcttctaaaaccaagacaataaagctcaataatagcaaaacaacctagctacccaactcacacattgagccacgggcaaaatacagcagagcagtcagggcttacccttcaaacatgagatggaagcataaaaagtaaagcaggcccttactaaaaaggattgtaggaaaatgtcttttctccccaaattaaaatggactaactgttctcttcttaaaacagcattttggtgccgtgagtaaatctataaacctatgttaccatgatcaatgtttatagtgaccatgttaaaagcaatctttagttttttgtttttttatctattgagttttatggaatatgccctaaaatgaagttttgaaataattgtgtatgtatgtgcatgtacacagcacatattacatataatacacacgtgccacaggtagctttaaagtagactttgcaaaataaactggctattccagaacctaatttccaaagatatcaataatattgaaaattactattctctaggacctggcttatcccgaacccatcttttaataaactgagttttttggtgaggatgtatatttttatttagaaaacttaacgtttacaccaatacatattcaatatagctaacctgttttaacagcacatttttaacaatattttccgagttgcttaaatcctaacctgagtccttttccactgtttgaaaacaagcaccacgaagacacctgacaatcaggattgtaaagattcagaatattcgaagacagaagcataggcgtccaagtgatcctctttcatcagatgaatgtttttaaaacctgaaagtcctaagaacacttacttatcgtgtagaccagtaacgtgtccctttaaccacaactctctccacaaaagcacggagttaacactacacaaataggaccctccaactcatctccacgtttccgcggatcttcaggttcctaaggacacactcagtggtttgctggctctgacctccaggcagagccatcagggcaactcagcttttctggacaatctacagaaatctgatgtgctaacttaaaacatacactgatttccccaaaatcaaaaaccctgaagaaagggtcctccgcagggtctaggcattttggcacaaaaacatctgaggggagaggcaaaagaatggcctcggcccctgcccgccccccagggccccaatctggtcccctgacagtaatcacacaggaccctcccgggagggaccgagagcccagcttcgtcccctccgggcgcggcacagcggccccatcagaggagggccccagggtgctccggcaggtcaggcgcgcgtctccacctccgctgctcccgcgccaccttagcgcgcgtgacgggacctgtcaagagccccaggcctcgccaggccggggagtggacaggcgccggcatcccccaccacgccacggcggcccggaaagtctcccagggctgcctcgcggggaggcgccggggtccgggcccaggagcagagccgaggcgggcagacgccgggtccacaggccgcgctgtgcgggacgacgaggcaggcgaggccgcgcccttcgtcagcgcccgccaggcccggacgcgcggctcggggccatggccggcacgcgggcctccgcgcggaggcgggagcgcggccaggcgacccgctccccgccccggacacaaagctgctccgcgggagcccgcctcacctgcagcacggggcgccgcgggccttcgagaaccatcggaccccgctccggcgcgcgcgtcacagcccaggcctcccggagccgcccggcgccgccgcccccgccgccatttcctcgcgctcgccgtcgcctcgtccccgctgtcaggttactccattcacctgggcctgcagcagcctgcgccgcgcctccgcctcgacccctcccgccggcgcctgcggagactgcgcagcgcccggctggccggcagccagcgcacggcccgcggcaacggcgcacagccgcttggagaatcccactggctcccgcaccgcccctccgcgcccccacgctccgctcgccccgtggcggcatgagagcgagcctgtgattggacagggcctggcggtgaaaggttaatcccggccccccagccactcaggagcagggagacagcgggcgcgcgcgcggaggccggagaggcgtttgcggcccagcgcctggactggaccttggcgttgggccgcagttgcccggagtttttggggcccccgggaacccgcgcgccgaggccggctaagtttggcagactctctgagctctcggaattcgactgcctccattgttgctccttctggcacccacagaccgtaacgtggccgtaattgtttcccggagagcttagcttccctctgagcacctccctcccctttttaaagtaccttcccactcgcctgcgtttcctcgcgttagtggtgcaggggcctccgcatttggggaaataacaaacacccacttccgccccccaccccaaccgggatccccagataatgagaaatagatggtggccctctgtttgtaagctgttcatttgcataggtcggaaccgcgcaccacagcttgaagctaggaattaaaatatcggtgggaattaaataagtggctggcttaaagaacatcttcttaatttatccccaaatgtagacatctcttcagtggaccccctgataggccggtttgctccaggtgaggtgtgctcacagcaactgcaaccgtgtttctttcagaccatgggcgtgagcagaacctactatgcgcccctgctgcctgggctgtgctgttcagtttggggccaccagccccacatggctcctgagcacttaaagtatggctagtcggaatcgagatatatgcattctttaccaaataatgttcaaaaaattgttacatgttgaagtgataaactttttccatatattgggataaaagttttatttgtttattttttagtgtgggttctacagaattttaaatgtcacctgtggcctgcattatattgccattgggcaggctgatctagggcttgcatgcctgtgatccttaggtgcaccctgtgaggtaggtgctttaactgtgtgcaccctgtgaggtaggtgctttaactgtgtgcacattgtgaggtaggtgctgaaactgcttcctgttttttttttttttttcttttgagacggagtctcactctgtctccaggctggagtgcagtggtgcgacctgggcttactgcaatctccgcctcccaggttcaagtgattctcctgcctcagcctcccgagtagctgggattacaggggcacgccaccacacccagctaatttttgtatttttagaagagacggggtttcaccatgttggccatgatggtctcgatttctgaccttgtcatccgtccgccttggcctcccaaagtgctgggattacgggcgtgagccaccgtacccagcctgcttcctgttttaacagacgaagaaatggaataacttccaacaagtaagtagccagtaagtgaacaactgagatttgaacccacgtagtctggctttgaggctggtgtgctcagtcattactgtgctaaaattttgataatatatttactatgaattggcttaaggtttcacttgaaagtagcatatttatgggcaaaattaggaagtaggatgctcctggcagacccatgtatttaaaaaagtagtttcttatatgtcaagcacggtgagcatgtcatacctttaagaccccagtcatacatataaggttttctttgtagctaggaattaaaatatcggtgggcgttaaataagtgtctggcttaaagaacatcgtcttaacttatccccaaatgtagatatctcttcggtggactccctgataagccttt

SEQ ID NO: 1241266 - DNA, 4001 bp, Homo sapiens
aaggagtactgggtctgtaaactggctcaagtctggaaattgattgaggggccatgattctccgtttttataattcaaattagccttttgtccattcaacctagaagttttctgcttgtatgaattaagtaggaatgcagtaggcttcctatcaatttcacttctaggaacaccatgattaattagccaatgccagagctctacacaagtcagattattctgattgctgctttgtctctactgtccattacaatagctacatccactttgcctttgatggttgagtgctgccacttggcccctgccaccttgggatcccattattcccattgtacttaaattttatagttgagtgactgtggttctcactgttagatctgacatataaagaagagcaattatagggctcttcaaagatgcaggtgctgccctcacacatctattttgcaaggcattggtcaagggtatatcttctggaccctcccagctgggataagtaggtctgaagtaactaatccactccaccatcccaatctccctaagcctttggatcccttcctctacattaagccaaggaagatcaggcatttctagctcgctcacagtgtgccatcttttaatctatatttcagctaaccaagcaaataaactattagaacatttttttagctcccagagctgcaacattaaatgcagagttcctacttagtgggcccagatcaataaattgagcctgatccaactctgttccttccaccattaactcataccattaatgttcattcccatgcctgttctccagattgctgtttatataaattaaagaactcaaacagttctttttgaatgtagcgcacctcctcatgagtcacactctcaacctcacctctaggggcctgctaggactttagttataggtctagaagcaaacaggggtgttgggggtagctcctgaggagaatcaacgttatttttcctggcaattgcctcaggggaggccatcgctgttgcctcaggcagcatagggtttatctcctcagacaaaggtggaaagactaatggcagcatgggtcgaggcggggatgtggccactactgggaatggggaagctgttccttctggcaaagaagtttcatcacagtttacaaactcagcgtccccagcttcatcagggtcctccaacacatccccattccaaatttcagggtcccattcttttccagtcaatgccctcactttaacagtagacacctggtgaggctgtgcatgcacctttcactgcaggtcagccactcgtataatatgagcttgtgtctgtttttccacaatttcagctctttctctataggagatgagactcactgagggcaatcttagcagatttgaggctcaatatctgcttttgaggccaggagacagaatccctgaattcatcattttctttcattactttccccactgaacttaggaggaacaaatcagcttcattatgttccttgattctccacatatggtcaaaggtatgatgtacagagtcactaaactccttacctctcatgagctgtgaatcaggagtggcaaatgcattaattttgcataactctctaaacagttcatgtcaagagctatcactgttcttcacactattagaattagagtccttagcatttttggttataatcatattaagcagctaactctagaaaccctaaaagcaatgaaagaacttcatccttaatattatgttcctctagaatcactcctggtaccaaaatctgtattagtcagggttctctagagggacagaactaataggatatatacaaaggagagtttattatcttacatgatcacaacgtcccacaataggctgtctgcaagcttgaggagcaaggacagtcagtctgagtctcaaaactgaagaacttggagtccgatgtttgagggcaggaagcatccagcactgaagaaagatgtaggctgggaggctagaccagtctcacctcttcacgtttttctgcctgctttatatttgctggcagctgattagattgtgctcaccagattaagggtgggtctcccttccccagcccactgactggaatgttaatctcctttggtaacaccctcacagacacacccaggaacaatactttgcatctgtcaatccagtcaagttgacactcagtattaaccatcacatactacaatatttgaccacctcactctcaagaaatgttccttctaattaataaatcatccatgtccttttgccctgcctccttcagaagtagatattagctttgtttttgccctttccaataggcctccatattctaagtgatttcatatcactgttacattccataggctgaattacgctccttcatttagcctctttcttacaagaccaatttctggcattaaaatcatgtttctagtattcctctaatatcccactatagttgtgaaactgaggaatggtcccaagatttgaattaactgatttttttcaagacatgagtataacagagagactaagatatatgttgaatgaggtggatgtgttgtgtgatttaagattaatattggatctttaacttaaagaacaattaggttaatttcatcaaaatccttctattatgagtggttatatattccagatgcattcctagcaagcccatgaagttgcttttagtcatccaaactctcaagaaattattaaataatatcatctgtgacttctatatttagaatttaatctataaggttatgtaacaaattgaaacaaatgtttcctaagtgagagtaaacaagacttttgcgtaagaacaaatgcaggggacaccatgatctctagcctatttacaaaagttataaaaattacagatactttcacatgcctggcagattttataccaactgactgactactgtaaaacagcaactgcattactccatcctacgacagccaatagaggtgaggctgtccatcccaacccatttctccttcttaagtaacaataaaagataagagtccaaaatcagaacctgttttactcaagccagttgatgtagtcataactaacaatgacacaagagacctgggagctcacgttagaaaggatgcattttcaattgcctgtaaaactttttcaacatatcatcgtcaaaaagatttcattctttctactttatgtacactatttttggccaggtttctctaactaagcactattgacatattgggttggataattcgaggctgtcttgtacattgtagaatgtctagtagcatccctggtctgtcttcactagaggccagtagcaccaccccatccccgacccagttacgacaatcaaaaatgtcttcaatattgtcagatgtcccctggcaaacaaaattatccctgtcatttagaacgcatattaatactaatcagtacaataaattggctgaaatgggataagttaagaaaaaaaaaagcagaggactaaactctcttttacattggtcttgctttaaagaaaataataaagttgtaaagcaggccaacaaggacaccccttcacatgaaagacaggcttttttaaaagaataattgggagtttattttcaatcagccaattttgtggccaaaggatagcctgttcatcttttacatcccttcaacccttctcactgtgggtttctggtgatgagaattttaaagccaatctgtgatttacatagattaccatgatgcccaggacagggaggcattcacagaagttctattcatatatgtatctagagcacacagaggcaatgtttctgtattagacacaagcaatttcattaatttaagtggccaacaggcagagttttaattccctggatgatctaggagtggaggtaaggagaaaaggacttaaaagaggccaactgagatgcctttcccctgttttcaccccaaaagagaaatctctgttctttctacagcgatgaaactcagtgatat

SEQ ID NO: 1241267 - DNA, 4001 bp, Homo sapiens
cctccacctgcctccaaattgccttccactaaaacaaaccattaaaaacttcccattcaatgtatacttttgtggaaatgaaataatcaattcaatatctacttttctagatctcccgtcctcactgacatgcacaatataaatgagtttttactgttagaactttgagcaccaattcatattctcataaaagaatttccatctactaataagagctcttactattcacatttttaacaacaataaacacaaaccctctttgggttactatcaataataaagacgtgcattgtggtaaaatttccctagttcacaacagatattttcttcttgaacatctgattttcagaagaacaatcctgtcctgaattctttgtaattttacaagttacttcttctcttttcttggcgcatggttttagttttctagtgtttatttatggaggatgcattcccttgcgtctctattatttcgagttccccgtctctggttctaaggtgctgcctgcctaaaacacaccacttcactgaacacctggcttctatattcctctaaaatacagatgtacagttgctttttctggcatcttgggcaaggtcccacaacacttttagggaaaccaagattgtctattttgataactacttttgccaaaatagttcattcttctcaagcctggttgagggggtggaggggacctttagaagtcatatgggcatagcaggtgggggaaaactgacaaaagaccagggcgaaaatcatcctctgtgcccctgaagatcttagttgaaaatgctctactaacatctctcaccagcaaaaagcctggaacacagtatttttcacttagaaactaagatcactacctctgattttgagagagcagcccctgggcactacctgagcaggtaagggagaccactgctctaatgctcataacagctctgagatttaatgaatcacagacccatcatctctttctagggcaacgtattttatttttgagaaacaaagtaaaggaggcttcccttacaaatgctggatttctgacagctagttttcagacttttctttcgcaagttgatatctagtaactcaggatcactgcctgaaaatcgcttccaaagggttcaaatttgaatcaatgtagaggaggtggcacacagctgcttgctttcattaactcttacctctaccagaaaccaagcagctatgatgcccaatcacaatttctatgaccactttcttatcttgtcaactctctgagagttctgagtagcatttctcatttcttgcttttcagtacccacccctcgaacatacttcctcagtgtacctcagcctcccatcaagcaaaaaatcaaaattccagtttatggcaagagcagaataaatgcagcagtctcctcttctccatcattttctgacttttcccaagttatcgtaccagcacaatgccttctactcccaaatcacagcaagatattaataacccttagtagaaagattccttattaggtcacacagagtcattatggcttaatagctgtcaccctcccaagctaacctgtgcaacaggtgtggaaagtaaacttagaggctcacttggcaaccccacaaatagggcttcacagctctccccccaatgctcccaatggcctctggtccccagcatatgagcccctgcccctgtagacctagggagaagcccttctcagctcagctcacctgtttgtaggcatcgaggaggaagctcttccagacgcagcgcagtccctctgaggtcagcatgcgccgccactctccgcgagtggacttggagcggctcaacagcagcaccacgtgcttgagcagaatgaccgagtcatagagagccaggaagaggcagttggagaaaaaaactggcagaatttgcagtgtgatcagcaagtctacgctgaggatgcccatcttctctgcctcctgagtcagttcccttgtgcgctctggttccccttcaccctcttatttaaaaggggggtggtgataaagggggtgggggaggtaagggggaaggttgggggttgggggagaaggggaaaaaaaactaaattaaaaggaagcccaagttgtctcctctttcaaagaagcagaaatggcaagactaagtccagtctctccagcccagcagttggagtgtgcccatcaattcattcaattcggagctgctgcctttttttttttttttttttttttttcaggatttaagatgttaaaaaaaaaaaaaaaaaaaaaaaaaaaaagctggcgtactcgtccctaatccagttacctctgtcagagtccgttaaagacaggcagttctactttcatttccaagcacctatgagactgtggcagagattttaaaattttctttagcctttcattgtctctatgctctttaaacgtagcctgtttctttcttgaattgccagagttttttttttttttaaatgtgctttaagggtagttttttttttttctttctttactccgttttacacacactttctgtgcttctctttctcccagtctcactctctcccttccccaggagcgactgactcctcttttttctcactctctgtctttcccttcttgctatctgtctgtggtgcaaagtgcctctctctgcagcccagtgagtctccctgacgccttttatacattccctggctaattgctgcaatagagaagtgaaagcctaatcttggtaaagatcttgacgtcattgagaaagagggctttactttggccaggattgcagtgaatagaaaagcaaaactcgacaactttttttttttagaaggggttggggagagacagtggaattttgctttgtgatttaaagagagaaaaaaactaatacccttgacagccttcaggaaatgcttccaaactttgggaaaagtaatttaatataatgtgcagattgatatggccaacactctctcttctgattatcattatcattaatttatgaggggttttggaaagaaaggatcctggaaggcaggtagaaaaaaggaagagttatcacaggcggtctttgctctgtttcttggaaaatatgaacatttatatacaatctttatacctttataccatgactccaaccctttgtaagatctgtgacctaggtcctttaaatttttttgagtcattatcttatttaagaaaatgcaaaatgagttgtaggtggaaaacttgtaaactatttgagtaccatcccagcatttctttaaagcttcttgcagaaacttgaatacaggtttctttttagttttacccaagcttctaatgaaaaaaaaaaaaaaaatccaagttcctccagacagggaaggagctaggcgacattcttttagcttcattttgcagataaaattaaaactttccattgaatagcattaagaagccataaggctgagaaattattaatgaaagctctttaaatttggtgtttcacctgcttctgttagcataacccctaagagacctgatactttaaggaatcttcctttttgtttgaaaaaaattttaattaaatgtatgggaagttaagagccgactgaattggttcaaggtgccacattgaccattgttcattggcttgcctctcccatgagtctttaggacaggtatttaggcagacaatgctttggcagaatggcatgacccccactttattctactttttcatcctgtgttacctaatagatcactgagttttctcagtgatagatactgagttttagatactgggtaatagatagctgagttttctatgtagccagagcttaggcataagctaagcagtaggtgcaagcttgtggttagcgtattgcgtattttttccatgtggctaaaaccttcatgatcacagaaataatttaaaagcctagacaagagtcattaatttgtcgtcctgttagctgaattctgcatattaatgcattttgtttggttggcaggttgcttt

SEQ ID NO: 1241268 - DNA, 4001 bp, Homo sapiens
ctagatctcccgtcctcactgacatgcacaatataaatgagtttttactgttagaactttgagcaccaattcatattctcataaaagaatttccatctactaataagagctcttactattcacatttttaacaacaataaacacaaaccctctttgggttactatcaataataaagacgtgcattgtggtaaaatttccctagttcacaacagatattttcttcttgaacatctgattttcagaagaacaatcctgtcctgaattctttgtaattttacaagttacttcttctcttttcttggcgcatggttttagttttctagtgtttatttatggaggatgcattcccttgcgtctctattatttcgagttccccgtctctggttctaaggtgctgcctgcctaaaacacaccacttcactgaacacctggcttctatattcctctaaaatacagatgtacagttgctttttctggcatcttgggcaaggtcccacaacacttttagggaaaccaagattgtctattttgataactacttttgccaaaatagttcattcttctcaagcctggttgagggggtggaggggacctttagaagtcatatgggcatagcaggtgggggaaaactgacaaaagaccagggcgaaaatcatcctctgtgcccctgaagatcttagttgaaaatgctctactaacatctctcaccagcaaaaagcctggaacacagtatttttcacttagaaactaagatcactacctctgattttgagagagcagcccctgggcactacctgagcaggtaagggagaccactgctctaatgctcataacagctctgagatttaatgaatcacagacccatcatctctttctagggcaacgtattttatttttgagaaacaaagtaaaggaggcttcccttacaaatgctggatttctgacagctagttttcagacttttctttcgcaagttgatatctagtaactcaggatcactgcctgaaaatcgcttccaaagggttcaaatttgaatcaatgtagaggaggtggcacacagctgcttgctttcattaactcttacctctaccagaaaccaagcagctatgatgcccaatcacaatttctatgaccactttcttatcttgtcaactctctgagagttctgagtagcatttctcatttcttgcttttcagtacccacccctcgaacatacttcctcagtgtacctcagcctcccatcaagcaaaaaatcaaaattccagtttatggcaagagcagaataaatgcagcagtctcctcttctccatcattttctgacttttcccaagttatcgtaccagcacaatgccttctactcccaaatcacagcaagatattaataacccttagtagaaagattccttattaggtcacacagagtcattatggcttaatagctgtcaccctcccaagctaacctgtgcaacaggtgtggaaagtaaacttagaggctcacttggcaaccccacaaatagggcttcacagctctccccccaatgctcccaatggcctctggtccccagcatatgagcccctgcccctgtagacctagggagaagcccttctcagctcagctcacctgtttgtaggcatcgaggaggaagctcttccagacgcagcgcagtccctctgaggtcagcatgcgccgccactctccgcgagtggacttggagcggctcaacagcagcaccacgtgcttgagcagaatgaccgagtcatagagagccaggaagaggcagttggagaaaaaaactggcagaatttgcagtgtgatcagcaagtctacgctgaggatgcccatcttctctgcctcctgagtcagttcccttgtgcgctctggttccccttcaccctcttatttaaaaggggggtggtgataaagggggtgggggaggtaagggggaaggttgggggttgggggagaaggggaaaaaaaactaaattaaaaggaagcccaagttgtctcctctttcaaagaagcagaaatggcaagactaagtccagtctctccagcccagcagttggagtgtgcccatcaattcattcaattcggagctgctgcctttttttttttttttttttttttttcaggatttaagatgttaaaaaaaaaaaaaaaaaaaaaaaaaaaaagctggcgtactcgtccctaatccagttacctctgtcagagtccgttaaagacaggcagttctactttcatttccaagcacctatgagactgtggcagagattttaaaattttctttagcctttcattgtctctatgctctttaaacgtagcctgtttctttcttgaattgccagagttttttttttttttaaatgtgctttaagggtagttttttttttttctttctttactccgttttacacacactttctgtgcttctctttctcccagtctcactctctcccttccccaggagcgactgactcctcttttttctcactctctgtctttcccttcttgctatctgtctgtggtgcaaagtgcctctctctgcagcccagtgagtctccctgacgccttttatacattccctggctaattgctgcaatagagaagtgaaagcctaatcttggtaaagatcttgacgtcattgagaaagagggctttactttggccaggattgcagtgaatagaaaagcaaaactcgacaactttttttttttagaaggggttggggagagacagtggaattttgctttgtgatttaaagagagaaaaaaactaatacccttgacagccttcaggaaatgcttccaaactttgggaaaagtaatttaatataatgtgcagattgatatggccaacactctctcttctgattatcattatcattaatttatgaggggttttggaaagaaaggatcctggaaggcaggtagaaaaaaggaagagttatcacaggcggtctttgctctgtttcttggaaaatatgaacatttatatacaatctttatacctttataccatgactccaaccctttgtaagatctgtgacctaggtcctttaaatttttttgagtcattatcttatttaagaaaatgcaaaatgagttgtaggtggaaaacttgtaaactatttgagtaccatcccagcatttctttaaagcttcttgcagaaacttgaatacaggtttctttttagttttacccaagcttctaatgaaaaaaaaaaaaaaaatccaagttcctccagacagggaaggagctaggcgacattcttttagcttcattttgcagataaaattaaaactttccattgaatagcattaagaagccataaggctgagaaattattaatgaaagctctttaaatttggtgtttcacctgcttctgttagcataacccctaagagacctgatactttaaggaatcttcctttttgtttgaaaaaaattttaattaaatgtatgggaagttaagagccgactgaattggttcaaggtgccacattgaccattgttcattggcttgcctctcccatgagtctttaggacaggtatttaggcagacaatgctttggcagaatggcatgacccccactttattctactttttcatcctgtgttacctaatagatcactgagttttctcagtgatagatactgagttttagatactgggtaatagatagctgagttttctatgtagccagagcttaggcataagctaagcagtaggtgcaagcttgtggttagcgtattgcgtattttttccatgtggctaaaaccttcatgatcacagaaataatttaaaagcctagacaagagtcattaatttgtcgtcctgttagctgaattctgcatattaatgcattttgtttggttggcaggttgcttttttgcctttaaaaaaacaataatcaaaaaagaatgcctttaggttccgtgagagcagggattcttgtccactttgttcactgctacctccccaacacctagaacca

SEQ ID NO: 1241269 - DNA, 4001 bp, Homo sapiens
ccctccacctcccagccccacaatcagcagctctgcctaggactcccctcacttggggacctcaggctctccccccacctctctttccccggactccatcaccccaacgtcattccccaggagtctcagctttttctctctccctggggcgctgcgaacctcgccaatgcctctcaagctatcttcctctggtcccaaagcagacaccccaacttccctcccatttaaggtggttacctcacggaaacccagagcaccctccccctcaaggtttaggtgctgctttgaggcccctgcaattcagaactagctcgtggtcaagaccagttagagatagttcgtcatcagcagtggggctcctgtgcacccaaaacaagcgggggaaactaccctgcccacccctccccatccacgacatcacttcccctaccagggacaggaaacagacacaaaagcaacagggaaccccctctccgcgcgcgacaggtgggtgccaggcaactagctcagctgagctgagagtctcctggaacccagctgcgctcagggcgcgcgggcgtggccaaggtctctgtgcagctgcgggaagcaccgggccaaagcacttggctgagggcacgctggggagggggtgtaagaaaatgctgtagaggcaaagtcctgggggcacacggacaagggcaagccatatcccgcgctcaaaagaggatttccagtgagccaggcaggtgtgaatgagacagttacagaagcagagtcccagggaggtaggggagattgttcatgtggctgagggtgcagactcagtctgaaatggtggctcagcacatcagtgtcactggggcctcgccaagcgtgacttggtttgaggcgcttgcacgtgggcttcgaaggctcgaaggcccagcccaccaagttcagtcaattgtccgttggatgtttacaccctccggggccgagcgccgtgcagttgctcatcatagcgttccaaccaagtgcgcagctcagagacctggtagccgtcggggccacggccgccctggtacataatagtgccactctggatgacatagagacgctcgaagtaggcgccataggccgagctgctggagttggccatggtgtcgaggaccagagcgcagccgggtgcaccttgctgcagtaccctcgctgcgctgacccggtcctccaggctccggtgctgtgggatgatgtagggagagtccgtggtgacccagccgtcggaggggtgcgcttcctcgatgtagatgatgaggaagtcgacgtcgcgctggtacttagtgaccaggcgctggaaggcgctcatgcgcgccatgaacggtggtcaggtgcagctgccgaaattgagaaccagcgggcggttcccttgcgcgtagtcgaggatgtgctggctctggaagccgtcgggcagaaccacctcggagttgggcgccggaccgccctcgtgcgcctgcttgaagaaatccaacttctggccatgccacaccgccttgagcgacgccagggtgcacaggcggttgtcgtcggacacgcagatgggcgggtcatcgggaggcacctcctcgccttcactgttgagctccacttcgggctcgggctgcccccggcggcggcggcccaggaaatgcttgcggatacacaagaaatcgagaagccagagcatgaaggccgtgccgaggaagcgcgggaagagcacgaggcacgaggcggtctgggcgcagagcctcaaggagtgaagcagcagggagcggagcatggtggctgcaggccccgaagccccctgggacccctcgccctctccgaccaccaaccgcgacgtggcctggcgaggcatctgggcttcagcagtgcagggagttcaatttatagcggaggcttcaattggcgggagactccacctccggcccggcccgcccccttgcaacttgagcccggagggatcacccagcagcgcggccaatgccctagaaatcttgggctgagggcgggcgcaggcgggcggagggcggagcggccgggcctggggccggtgggggcgggcccgggccccgcagccagctctcgggggcgggggactccggcagccgctgccgctggggaccgggagcccgaccagggacctgggcgtccgctggggaggtcctccagctggcgcgagcgctgcgcgccgccctggtccccgccgcctggctccggcccgcgcccccctcgccgcgcacctgagccgagctccccggcggccgccgagccgcgccggagctccggttcgcttcccgcgcgccgccgccaacgccgcccacgccgctgccgctcgtgcggggccgctgcccaggtgccgcgggaggccgggtccgcggccgccgcttcggtggccccggctcccgccccaccgaggacgcgggccagcgaggaggcaactttgcgttcccgccgccttcctggctcgcccgcgggcgccgctcgcctgccggagcccgcccgcccgcctcccgcgcgcgctcacactcgcgcctcgcacacggccgccccccgcaccgccccgccacgcacaccgcgctccgcgccccccgccgctgcccgaggctgccgcgcgccgccccagcccgcgccgccctggccgcgcccgccccgtcccatctcgttccagcggggcgccgcggttcctgggtcagcggccgccggggccgggctgagaggtgcggagggcagagcccgcgggcgggttaccgccgggcgccggagaccggagagctggggaaagcggcgccggccctgcgcccccagccgacccgggcgcggggcgccacgggcgtggggcgcggggcagcgggcgcggggcggcgccggccccgggcggctctcccactaggggtagctgttgcctgaacgccggagcgctcccctctcgccgcttgcctcgcccagcgcagccccggccgctgggcgcacccgtcccgttcgtccccggacgttgctctctaccccgggaacgtcgagactggagcgcccgaactgagccaccttcgcggaccccgagagcggcggcgcgactcaccgcggaggcgcccggacgcgtcaagtgcgtactttcaaccgtaaatgggtgctgagcgtttaggggtgcggggcaactccctaactcgtggggccctggccggccctgccgcggcgtccgagaccttctgatccctcgctgcgcgcggcgcggggttggcgacttgggctcaggggcggcggggcggggaggtgccttgacctagggacccagaggccgggagcaagtctcctttcgccttggactgcagtgtcccccagggcaaggcctgaaccaggtcgcgagggtctgtctcccgtctggggagctgaactgcccgagacactgtcgcagtcgcggggacttgtctggagcggcggggtctgagcccaagtcggaagccgccgccgccgccagcgtcccgtgcgcctgccgccccgggaccagccgcgaaacttcttctcgggacggagacagcgctcgccgcccgggccgaggtaggagctggctgggctcggtagagcgcgggcgaatcgctttcggcagcgaaggaacgtgtcgggagaagccaactgcaggaccagggccccagcgggcgcgcagagacgcctgccttgggcggaggtccccccctccggttttcgtggctctggtagggccctctgtcccgtgagctcctcactggacctgaggctacaggcttcagcaggtcaagcgcccgagtgtgcctggaggattggcggcggggtggcatgagaaggtggcccctcttctccatctcccagtcaggcgatttctctgctgtctggggcaggggcgcacaccccaggaacttactacgtagagggaagccagcctggtctctcccccttgcgtcagtgctcctaagctgcccctcaccactctgggtaggggtctttcaggtgggctagggaattctccttgg

SEQ ID NO: 1241270 - DNA, 4001 bp, Homo sapiens
gcacagggcaaagtatgtggaaaggaacaaggagcttccatgctctctcaggtagcaccactgtttaggaaccttcatgtattcacctaagaagctctccaaacacaggtgtttttttttggtttttatggcagcttcattacataagcatgagtgattaaatcattgaccactggtgatcaagtcaaccttcagctcctctcccctccccagaggttgtgaggtggggctgaaaatgccaactctcgagaaatcctgccttggtctgtctagtgaccagccccaatcctgaagctatttagaggcatccagctatcagtcaatcattagcatacaaaaaggtaccactttgaagactccaaggattttagtagttgtttgccagaaaacagaacaagaccaaatatatagttcacaataaccctatcagtttgctccattattttcatccatacaagaaatcatacagtttaggccggcacggtggcttaggcctgtaatcctaccactttgggaggtcgaggcaggactgcttgagcccaggagtttgagaccagcctgggcaacataacacgaccccgtctctataaattttaaaaaagaaaagccatacacacacacacacacacacacacacgcacaaaatcatatagtttaattggcacatgcctttttcttggaaagatctttgagaatgtattcaagcaaaacaaaagaggacaataaagacgacgtcagtagatccaactagggagaacaaagaaaattagaaagtttgagggggtcacctgtgtagctggtatagagaactaccaagccaaactggagaaaggatactgattctcagaagtcttggcagttaaaaaacaaaaacaaaaaaaggtaagggggaggctctgtgatagacacactatggtatattcttcaacaagaattaactaaatccactagaaaactccagataatagaaaaattggcacaagtaatgcaatacattgttacatgattctaagcaatcaacaaaatataaaaaacgagaatctgtctgacctgcatgctaataacattctcctctaagacccaaggaaagtgacaatggactgtgcttttcataaagaactgtcttctactatttatctcctgcaatattaattcgctaaagattgaagaaaaattaagacttatgtattaaatacaggatagcactatccacagcaagagaaagagcgagcgaggacaacattaaaggtacaattatcagaataaccctgaaaggtagttaactattatcgctctcatacagatgaggtcaattaactgctcacattagcatatctaaaaggtggtgaagctgggatcccaagcaaggcagccctggctccacacacacctaaattttgtttggctgagtggcgtttcctccagcttgaaagtccagaatgcgttaatcttgcttgactagaggttctcaaccgggcgtttttagttgccatgggacctgggaagagctacgggaatttaatgtcggagctagtgaagaacagtttcaccccaaaggtcaattacgccccggtggtgaaacgctgactattacagaggtcagggcaaacatatggactcttctaaaggctcgcattatcagcttcgggaagggcaggtaacacggtcctaaaggagcctgcctctgacttgctcccgctcgcagcccccggtcctcagacccttctagaccttcaacggaagcgggccagtgttctccgtccagctctccagcacccacctacctgagccaccttctagcgtgaaacctcaaccaaacaaaaagtaaagaacactcggtctggacgaccaccgccgactccgaagcaggaaccctcacaacccgagcctccacgaaattcaaacttgccgcaccgagccgctgattggaggggctttaaccaacacttccggggaagatcccaccccttccactcaacgaggcttgcgattggtttgctccgtgcgatatttgaattgattgaaaggtgaagggccagttcaaaagatgggtgagagagggaaaataggcgggaccgcgacgcgggatgagaaggagtggagcagtcggggcgctcacgtcaggtgaagggcgggagtgggcggtggagcccgaggggtgaggctgggtccctggcaaagctgggctgcgggaaatctcccccagagctcgcaaggctttttttttttttcttttttcttttttttgagacaaggtctctgtcccttaggctggagtatagtgggcaccgaccactgctcactgcagccttgagctgctgtgttcaaaccatcctcccacctcagcctcccgagtagctgggactataggcgcgcaccactacgcctggctaactttaaaaaaattccgtagagacagggcctcactacgttgaccaagctggattcagggctttttaatgtccttgtttagtcacagaatctagcagaccttcttggaatgttttctttactagacgttttaaagaaaaggcttaccccaattatcaaatccttacatagtttagcgttacttttcaacgtcgccagcccccctccccttttttttcttttttagttcattttttgttgaggcgaagttttcgtatacagtgaaaataatagtttttcccccccagtggacaatttgatgagtttggtaaatgtaaacagctgtgtaactaccacccaatcaggacgtagagcatttccatcactcagaagagtggcctgtttctttcctgtccatctcccaccacatcagcaaccactcctcttatttctagcactataaaaatgaaggtgataggtactcttttgggtctgcgtgaaccagaagttagtagtgtttgttattgagaggcattccattgaatactttatgcattcaccagttgatggatttgtattgctttcaatttttggtgatgatgagcaaagttgctataaccattctcgtacaagtccttgtgggcatattttatttatcttgaggaaatacaggagtggaatttctgggtcattctgggtatgtttaacttaaaatttttttttttttttagaagcagggtctctccgtcccccaggctagagagcagtggcacaatcatagctcattgcagccttggcctcttgaatagctgggactataggcgggtgccgtcacccatgtctaactttgtaaggaattgccaagcagttttccaaagtggttgtaccattttacaattcccaccagccacatataagagttccacttgtttcacatgctttccagcacgtggggttgtcagtctctaatgttcacccttctggccaggcactgtggcttgcgcttgtaatcccagcactttgggaggtcaaggcggggggatcacgaggtcaagagatcaagatcaccctggccaatatggtgaaatgccgtctctgctaaaaatacaaaaattagccgggtgtggtggtgcgcgcctgtagtcccagctactcaggaggctgaggcaggagaatcgcttgaatccaggaggtggaggttgcagtgagctgagatcgcaccactccactctggcctgggtgacagagtgagactccatctcaaaaaaaaaaaaaaaaaaaaagagactgagaatggtggctcatacctgtaatttcagcactttgggaggccaagatgggagaatcagttgaggccaggagttcaagtccagcactggcaacatagcaagaccccatctctaccaaataataataataataataatacaatattagctgggcatggtggcgcacatctctagtcccactacttgggaggctgaagtgggaacatcactggagcccaggagtttgaggttacagtgagctatgatcgcaccactgtaccctagcctggacaaaaaagtaggaacctgtctcaaaaaaaaaaaaagaaaagaaaactattctgctattaagaaactctgatg

SEQ ID NO: 1241271 - DNA, 4001 bp, Homo sapiens
ttctgtggaaccaaggacccttgggggtctttgcacagtggcagccggtggtcctgggaagtaaacaccagccacctgaatgggaaaacttaaagagaaaacatgccaagctgagggggccgacttggaggggccccgagatcccgggggagtgctgcgttttgccgcagtggcctgcagtggtcccacctgcccccccacctctgagaacgcagacaggagctgtggctgccccccccccgccccccccatctccccagctcgccccaccagttttctgcaggggcccggaagctgtttgctgcagcgtagtggccaagccccctatttttttctgcctgacttcacgactccccaggcttctgcgtggcccctacaagctgcctctgaggagccactctattacctgcaaacattgtcatcctcgcagaatccattttgggggttgcaggccgggaagcattcagcccctgaggtacaagaaaggttatacaattcaccccaccaggccccaggccaaggcaaaggctgtcttcgcccacacagcccaccactgccctcgagggcaccaacagccctcttgggtcctaccagcctggcacacagtaggcacttcctatccgagcatggatggggctcagtgcactcaggaaaaacatctctgccacgttcccagcaatgaaatgaccacagtacactctccctcgttcttaggagcaggagaaacaccttctcctcggactcccaaaagcaaatacgacacctcaagtcctcctaacagcggggacggggaccgtggagggaaatatgttgagccctgggcatgcagcctgaccgtcacttttgcaacctgagctgaaaagaggagcagattttgaggtgttcaactccgggaaagcccagacaggttcacctggtgggcgccccagtaaggcgtctgcattctttttaaggttcatccctattaagccgggcacccaggtcaaatcttccctctttcccctaccccagactcttcgcattaaaaaaacgatgacgacacagggttttgcttagcgggctgaggttgcaacaacactgcttagagattctgacactttaacaggcacctactgtgtgcatttactcaaccagctccccagctttctagacagcccccttacaaccactggtgcaatgagtgggggggcgctgcaggaagggggcaactctctcgctgtcagagacagatggccgctgcagacagaagtgtcgcagcccctcacctacagaaacgcgccacgcaggaagggctcaggctgggcttctctgggaattgggggctaagacggcaaagtcgtcccccactcccgccccgagacctgttccagaacgctcacacagggacaccccaaagttgcaccccagagtattttcatagaagactccacaacagcaccccatttttccatacctccttgctcagcgcaccgacacccctctggcgccacttctgcagggcgggaaggggctgggggtctcacacatcccctgcgccctgggacccctgggacgggccttggcatgcgagcgtggtgggtagggcgagacaggcacagcgcggggcttagggctaggcgggacgggcggagttggggctcacgagacggggcgtgcggggcaccgggcggccggcggggagtcgcaggcttccccagagggggcgcgagccgggccgccggggaactcaccataggtgctgtggccgaaagccagcaggagcaagaggacgcgcaggagggcttcggtcgcggtcatctctgggcggccggggtcgcggtcccgggagcggtgcgggcgcgggtccggctcctggcgccgcactgggcttctggttgcggacgcgaaagggggcgcgggcgcgcagcgaggggaaagccagggctgcaccgggctgcgcgctgcgctctccaccgccgctgccggggagctgccgccgccgccgcgcgcgccgcccttttcgtaccgcctcccccctcgcggcccccgccccccgcccccgcctccgtgcgcacggggccggcgccggccagtccctgtgaccccctcccctcgcagggccgcccccgaccacggcggcgtcccagaagcccgctcgcgcacacgggtgcactcttggctagacgggcacaggtatcccgcgagcgtttggtacacgttccctcacactgtacagcacgcggccgccgcgcacatacaggcctgcctaggacaagtcgcaggaatcgaacctgggccgcagacctccccggagagcacaaatccgcacgcaggaacaccgaaacacttatcgctgaagtcccgggcacacgtgcaatggttagatacccaggaaaacacaaaggcgcactatgaagatgtgaactaagcacataattacacacgcacacagaaaaacccccaggaaaagcccgacgccccctgtacccctggccatgaagacgcagaaaaatgcagttgccccgtggcaacccacaccccgcaacggaaacgcacacggcaactcaaacacactgtagcccagacgccgtatagacacagtcctaggtggcagagggtcaagcggacctgcggttacccaaccatgggcatcctcccccatgtgccgaccccctgcacacagacgcttacgcagagccacctgcacacccaaacacgcaaacacacgtataaacagacggacacccgtgcccgcattcagtcacacccacccccgcacacacagcatctcagtcagggccttagccgcgctgaaacacaaatgcaccgactcttacgcacacatgtacgcacagccatgcacctgatacccacaagcacacatacccagctgactcgtggtcacacacactgacaaaaacatatacgcagtccccacacacacacgatcgcatctgtctttgtccacagtggcatgcatgggcagcctcaccaatgtgctctcacatacacacaatagcactccaggcactcggcacgtattccagactcactgggagaccttctctgaggggtcgcccgctggagaggtggaggtagaggatgctgattgccagagaccctcttcctctgcagagctcccagggagagggagtgctcctcagacacccctcctccccattgcccccggcttaggcttagagccctgctggagaggaaagctctgcacccctgcacccagtctggatgggggaggctcagaaagatagggagggagaggggtaggaggggattaaagatatttcacctcctgggggaagggtcccaggcgtcccaatctttgggtgggtcgtttaggatacttaatttgcatatattaatttgcatacatatcctagatgcagggagtgggtgcccacccagctcgcggcctccccttcttcacagtgctgcaggggggtgtgatctcaccactgtgaacctggaggctggatgctttgacctcctggccctctagtccagccctggcaggtctgagcacagatttcccatcttagccatagatgtgggaaggcaggcccatgggcatccccaggcccaccacccctaagtcagtgctccagtaaggcactcgggatgggtacagggatggacagagaccagagctgctctgggctggctccaaggaggctggagggaaactcccagcccctggtggaagatatcccttccctgatgttatctgcagaatgcccagataggtaggggctgctgggaacggctttggggacaggctgtagggagcagttggggtgcccactgtgtgcctgccacatgcccttgcattcctgtgaccctactttcttccgtggactctttcctcaagtcaagaaaccaacttcagtgatggaaggtcctttgcccaaggcccttggcctagaacgagagtgtctggctgacaggcccaaccctgggtgccaatgtccactgcatggtgatcgccaaggtcttcctgaccaggg

SEQ ID NO: 1241272 - DNA, 4001 bp, Homo sapiens
acccctgttacctagaacagtggctggcatatagtaagcactcaataaatgatctgttgagtccatgagtaaatgagaacatggtgggttaagagttcaggatgggtcaggtagacctggcttatcaacagctgggtgggtgaccatggccaaggcttttaagctctcttgtcttgggttatgcatttgtaaaatagagaaaatactttttactgttttgagatgattaactaaaaaattcacagaaagcactcatataaatgcttggcacaaagaaagcccacaacaaggtcaactcattcaacaaatacttaggctaggcatataacagaaaaaaagctatggatgacacttttttctttttaactgctaggataaaatctaaactccttcagtctctataccatcttctatctcttgccactctctcccttaaccaaaatactccggccaaatcaccttttttccagctcttaagttctgccaacctcttttcttcctcagggtctttgtgaatgccattctctttctcctgggcttcactgggttagctccgtcacattctgctagccataacttttttttttttttttttttgagatggagtctcgctctgtcgcccaggctggagtgcagtggcgcgaactcggctcactgcaagctccgcctcccggcttcacgccattctcgtgcctcagcctcccgaggagctgggactacaggcgcctgccaccacgcccggctaattttttgtattttttagtagagatggggtttcaccgtgttaaccaggatggtctcgatctcctgacctcgtgatccgcccgcctcagcctcccagagtgctgggattacaggcgtcagccaccgcgcccggccatggccataacttttaagtcacctcctcaaaaagggctcttctgtccaccctcgtttccttctcagcagttacaaaaatttgcctttgttggcttgtttagcaactgacactatccaactagcctaggagctccacgagggcaagaactgtacacttctgtatccactcctgtatccctagcgtctagcacagtgcctaacacagtagaaactcaactacgagctaaatgaataagcgatagctcgtgattatgtagcattgcgtctcactactctctgaaccaaactgtctttaaatattatgagaaacacaggcacccccgagttcctcacatactgctctgcccaggaggagagcattttaggtgacggtaagggcagaacttaccaggcagggaacgtctccctagagggcagttcccctgttgagaaagaagacattatcgacgtcacccaagatgaaaaaaaaacccagctttttcttttaagtacacgctcaaagctgtcccagtggtggtgacaggtgaatctcgtaactccgaaggtaaatgcaacacaccgtgctggcagacccaatcaacacgctgggcctgccaaactatctcaacttcccaacgggactcattaatacccactgattttaacagagcaagacgagacgggcgccgaatcccgccggaggactccgccgcgcctcctccctaactctgagtcaagtatctggacgggcgcggctccccagctcccgcgcggagggtggggtacagcaggaaacgttccccgcaggctgcctggagaaggcagggggccgctgggctccgcaaaacggtcccgagggcaaccacggccccgggccgcccagcccgcgcggcctccgcgtcccagtgcccttggtgcccggcccggccggcgcgccgcgcccctgccttccaggccgcctctctgcccgccaacagactcctcacccgtcggggccccggctcggccagaccgtaccttctggaaggcggagagcgagcggctgaacgcccgagacacacagcgggatcgggacagcatcacggcggaggagccgagggcgggcggacaccggatatagggccggacaacaaccggaagtggggcgggccgcagtacccgccgcccgacgaggggtgttcggagcgaaccactggcagggggtgggcgcacggcggcgcccagtatcccggctgcagcgcaggagtcccgctctctggagcaggcaaccctaaggcgctcttggggccctccgcactgcctgtcagcctgaggtggttctcctgaaggtgtatacgactgtcccgccaccacattgcccccggggtcaggccttcccctacccttccacagaactggctctgagcttggcgcccttctctcttgggacccgagggcaccgcgccgttccgcctctgtaccttgggaagagagcaaaagaggggcacggacattgaactgaaaccttggcagacatgcatgcctgatcttacacttgtgtggcctggggcagatgacattgccccccacccccagtctcaggtcccttaactattaaaaaaaaaaaaaaaggcacttgttacttccctgtcttcctaaccccgagtcaaagaaacagaatcccaggaatttctaaatcccattgcctttttacgagtcggatatcttcaccaactatagccttatttctcaacagcttctgatctccccccaacgcaaattccagccaaactaattgttccccatacatcttgtgcattttggaagttgttcgtttgtcaccctatccctagaatataaactcccagctgtttttttaagaaacaaggtcatagttcactggagcctcgacactctgggctcaagcgatccctctgcctcagcctctggagtagctgggactacaggtgccaccatgccaggctgacctccccactttgagtgtgccattcttcccgctgacttgaagtgaaagcatatagcatccccttcccctccttaagtattcaggccccttgagtattcacctttaaggctcaccttcctaatgaaaaagatgtgctttaaacctctggctgaattagtaacacataaatgtatgaatgaatgaatgaaccacttggtgccgttcatgatgatttctttatctgaggcattttgcctggccctcaggacctttattttttatttttctaattaatttatgttttaatataaattgagacggggtctcactatgttgcccaggctggcctcaaattccatcaggacctttacagtgccttcactcacctgaaccctgaaagcactgccactgaaattctggaaggatgggccaaagtcctaactagaaatagagaaaacagctctgccctgctgctacccacaattaactcctcagtagctttcacctgaattatttgaaaagctccctaagcagttctaagcctccgctctcgctttctctagcccatcatcctttatatctgtgtcaaagatccttctgagcctggtgtggtagctcacgcctgtaatcccatcactttgggaggatgaggtgggtggatcacttgagatcaggagttcaagaccagcctggccaacatggtgaaaccccatctctactaaaaatacagaaattagctgggtgtggtagtgaatgcctgtaatcccagctactcgggaggctgaggcaagagaattgcttgaacccaggagatggaggttgcagtgagccaagattgcaccactgcactccagcctgagcaacagagtgagacttcgtctcaaaaaaaaaaaaaaaaagaaagtaaagaaaaaaaagaaatccttctgaaatgcaaacctaatcctgtcactcctctgattaaagtctttcattgcttctcctggtcggataaagcaagggagataaagtttatctcccttgtaggataaagtacaaactcctcaacttggccaggcacctgataatcaggcctctgattatgttctgattctctccccacattctcacagattgtgagctttagtcaaaccacactactggccatagccttgctgagctatttgcatgggctgtttcctcctcctatttgcctagg

SEQ ID NO: 1241273 - DNA, 4001 bp, Homo sapiens
atttttaaagtgagatgggatatttcaaatatgaggactctggaaagaactgttacctccaaagaatcgttgtttacaccataataccactctctccaatgtccatggctctctggagattttgccagttctatcactgcattgtttgaagaaatgctaatcacaggttctgtggtactcaatttattctctggagcaaattgcaaaaagaaggaataaactaagtcttgtgcggagaagcgtaatttgtaccagaggggattcaaatctccttgaagactttgcggctggatccgaggcacctgaatgagcagagtcaaggtttctttgtcctgattacacagtaacggaggacacaaaggctccccgctcttggtcccgggaccacccatggcgcaggctgagcgctggccgcccgtgccctccgactcctcgcgtgtttccacactgctatctccgcgcgcactctctcttcccgcagaagaaccccacgccaggctccgggaggacaaacaaggggagcctccgccaccaggtgagttttctcctccaggagatggctcctccacgctgcccggcggtgaccccgcgtgcctgctcaagtcctgctcccccggcttggggacacgctcctctccagctgcggccggcggaggcgccacctccgggtcgcccagggtggtgaccccggagcccgcagccccagccacgcaggtatcgtggcctccgtcctccgcgcgactcctcgcgggtcccgcctccccctcgcgagcggaagcgcaggcctggccgtcagttccggaccggtccgcggactcttccggcgcggcggcggcgacggcgacagcgggctcccggcgcgcggccggcagcaccactggcagcgtaaccaccagctgccgccgggccttgttgaattgtgccttgccgcggccatcgtccactgggtacgggagcgagagccgcagccggtagtcaggtttcctcgagtcgaggcacagcagctttctcgttacctccagcgccgcctgctcggccgagcgcaacagcggcagttcgatggtgatcaccagctcatggggcacggggctcggggctgagtccctggagcagcggtaatcctggaggtccacgtggtggcgctgcaccacgctgtagcgaggctcggtgggggcgggctgcaaggccgcttccggaggggagggcgcccggggcccgggggctgccgggtactggtaagggtaggggaagtccgggagaggacccttcggctccccgtcaggccttgcggggatgaccccgggcaggggcgtgcgcagcaccgcagcctctggggtccccttatacttggccttcagggtcttggcattcctgcggtccagcttcacgccgaactgcttctcgacggcctccagggccgtggcgtccagcatctggcggaagccctcgtgccgccgggccagcgcaagcgcgtctggatggaagaccacgtcgtagaccatgtagcggctgctgctgcgccccgcgtactcgcggccgggcgccaggctgtagggcagggaccagtggctgccaggagctgcgccccggtcgccaccggagccgggccggctgctgggcgcgcccaccaacgcgttgctgcagacattcacaaagcagcgccgcgccccgtccaggctggtgcgcagcacatggccgggctccgggtgcacgaaccgcacttccaccccgcgctcacgctctagcgcggtgatctccgcctcgtagcgccgccggttctccgggtcggtgagctcctcggcgtactgggagaacattcgccggaactccgggtcctggaaggcggaggtgagccgctggacctcctctccgctcaggtccaagtcctccagcgacgaggaggccgccgctttggccatactgtcctgtggctcctcgccctcgggccaaaggcgatcagtctgacactgggttgggggatccgcctcagagtttctgggcagcgtacagtgacgcggtggaggtcggtaacggctggaaaattgagccttgagcagcgcgtgcttgttgtcatagttacaccactaacattcgggaggaggggtagagatcatggtggaataggccgggcgcggtggctcaggcctgtaatcccagcactttgggaagcctaggcgggcggatcacgaggtcaggagatcgagaccatcctggctaacacggtgaaaccccgtctctactaaaaatacaaaaaattagccgggcatggtggcgggtgcctgtagtcccagctactcggaaggctgaggcagtagaatggggtgaaacccaggaggcagagctcttgcggtgagccaagatcgcgccactgcactccggcctgggcgacagagcaagtctctcaaggaaatcatggtggaatagtggaaatgccagaaatagccctcttagattcttcaaaccaacccaccaccgtactttgttttgttttgttttgtttttctttttttgagacagagtctcgctctgtcacccaggctggagtgcagtggcgcagtttcggctcactgcaagctccacctcccaggttcacgccactctcctgcctcagcctcccgagcagctgggactacaggcgcctgccactacgcccagctaatgttttgtatttttactagagacagggtttcaccgtgttagccaggatggtctcgatctcctgacttcgtgatccgcccgcctcggcctcccagagtgctgggattataggattacaggcatgagccaccacaccaggtccaaaacctttttttttttttttttttttttgaggctgtctcactctgtcacccaggctggagtgcagtggtgcagtcttggctcactgcaacctccgcctcccgggttcaggcaattctccctgcctcagcctcccaggtagctgggattacagtgactcaccaccacgtccggctaagttttgtatttttagtagggatgggatttcaccatgttggccaggctggtctcccactcttgacctcatgtgatctgcccacctcagcctcccaaagtgctgggattacaggcatgagccaccgcgcccggcctaaaacctttctaatgtgcatatttttttgacccaaatgcccttagagtatttgacacaatactcttagaacattctcaaggtgacatcatttatgattctaaaggtttgagaagaatctacaaattcaacaatggaactgattgagcaggttttggtagagccacgcaacagagttttgtgcaaccattcaaaatgatcatatggaagtatatttatttactggagtaattatttattcattggtaattggtcaattcagtgatcatttttctattctcagcaacatttaacacagttgatgttggcattacctcagtgacaagacactttccagatttctcttctgtctcatcactctcatagttttgctctgtaggtatctacttcttttcaacttctacatggaaatgccccaaaactgggacccaatctcttacccatctatactctccttcagaaatatatttacactcacaaatacttgtcttagactcagattttacactcctatatccagctgcacgtttgaggtgtccatttgagtgattaatgcataagctactcaggcttgaaatgaccaagatcagaactcctgaatcctcttttcccaaaccactgccttatcttatggtctcttggaagcattcaaagcagttgactgccccttcgaaacacatttttctcatgttttgcagaactccaagctctcccattttcctcctttatgctcctgccagttctgcaaatgtgggagttgcccaaggctttgttcatcagccctcttacctaatcacatttcttccaagatgtcttatccaagcccatagttttaaatgccatctgtgttcaaattagtcctttcaacagatatttattgtgtgcttattgc

SEQ ID NO: 1241274 - DNA, 4001 bp, Homo sapiens
aatacagtcatgagctgcataacaagtttcagttaacaaccaaccacatataagacagtggttacataagattgtaatactgtaacttttctatgtttgtttgtttgtttatttgagacagggtcttgctctgttgctcaggctggagtgcagtggtgcgatctcagctcactgcaacctccacctcccaggttcaagagattctcatgcctcagcctcctgagtagctgggattacagccactcgccaccatgccccgctaatctttgtatttttagtagaggcggagtttcaccatgttggccaggtggatcttgaactcctgacctcaggtgatctgcccgcctcggcctcacaaagtgctgggattacaggcctctgggattacaggtgtgagccaccacaccctggccgcttttctatgtttaaatacacaaataccttgtttcaactgcctacagtattcagtatagtaaaatgctgtaaaactttgtagcctaggagcaatagcctacaccatctggtttttgtaagcatattctatgatgtttgcaaggcaaaactgccaataatgtgtttgttagaatgtatccctgtcatcattaagtgacttataactgtactggttctgattctctatttgaagattttcaacaatcaccatggttcatactttcataaatatttaggtctgagcctttcttcacctgaatataaacctaggttccagaacttttaactttccttggcagtgattttcagctaactgcttggggaacaaagtaaggaaagcaggggggaaactactttttaaagagtggtatttcatcttgttgagggcaggcatgacttcctcatcatttccatctcctgggctcaatttctgcccacttatatagcactggaatcacaaaaagaagacaagtaattatgcttcttcttcataaacatctctatccagtaggacatcacatactttgctcaatagctctggctgggtctgcaatccttttcaaacgactagttagaactaccaagtatgtaagcaagagagtgaacacatcaagtaagagttgaggagcatctctaggtaaaaccattacttcataaagagctctcattggatagacagctggtagatttcaaacctaaggcaacagcatttctcagtgtggtgggatgccctccaattttataatcacttgaggtgtgttgtcgaaatgcacattcctgaaacccccaatcatattaaaaattcacaatctgcattccaacaagcccatacctatgcatactgaaatttgagaatcactgctctaatatatccatcagagtgtgctttacagtgtcacctaataactgccctcgtagtcattcagaaggcaacctgggtacatcacaggttacgaaaactgctgcaatccgtgttatacagaaccctctggtaaccagcccctccctgcatctcgacgggggggtcactaaaattacttctatgtaaagagatatctttatctacactctccttcccatcacccttcccactccaatacgctctttttagagaatttcctgctcttcgccctcccttttctcctgtctgagtccctccaccttaacccaacctccgatccaccccaggccgccctcaccacagaccacccccggccagggcttctctttcgcctcgggcccctgactccacagagctagcgtcagctaccggctcccttccgctgttcaaggacccccagaccctcaacactccacagtcacccttttccactcccaatcttctctcagctttggctacgcggcccgaaaggtactcaccattccggcggttgctactgtcactgctctggttgctagggcccgcggggtcagtgcgcgtgcgcacttctcggcgctctcggcggaagccctatccccggcagcggtcctttctctccgccctcagggtggtgcgagcggggcattgtgggactgcgtggcggccgccggggtcctcccgtccggctgttgctggctgcccttttgcttccttaggtcttaaccccgcacaggagtagtcaggaccgaaagcaatttcagctgatctgtagtgacttgtccgcctaaagttaaaaaccttaaaacgtccccctaacaactacccttttcataaaataatgttcttaattcctttgccctaacgatggcgtttcccacccttttccggacgaggggagaataagcggcttgctgtaatttccctctccatcccatcccactgagaataccagagccaaactccacccattttatgtttctttaccccggatcctccagggagccagaggcagctgaaagctcggttccacattttaaatatcacaaattgttggttttaatcaccagggtgtctttttttccccacctaccaaatgagctaaaaattattaacaataataataattcatagagttgctaggggtatggtgaagtagggacacacaaatacgctgctgtttataattgatacagcctttctggaaggctgttggctgttcaaaaacttttgcaccctttgtgatccagcagttccacttccaggactttatcctgagcacagagatgtatgttcaaagctttaatagaaaaaaaaaaatcaactcaattatcaacaaaagagaattggtggccgggactggtggctcacgcctgtaatcctagcactttaggaggctgaggagggcggaccacttgaccacttgagcccagcctggccaacatggtgaaaccccgtctctactaaaaatacaaaaattagccgggtgtggtggcacgcgcctgtagtcccagcaattccggagcctgaggcacgagaattgcttgaacccgggaggcggaggttgcagtgagccgagatcgcgccattgcactccagtctgggcaacaagagtgacactccgtctcaaaacaaacaaacaaacaaacaaaaagagagagaaaattggttagtagtattgaacatccaatgcaataatgtacttacactaaaaaagtacaattgacttgctgaaaggcatctattcacatccaaagatagtcatatttcaagtaaaaatagaagttaccaaacaaaatagttggtacgattttcctttaaaattatacatagtggcctggtgcagtttgttcatgcctgtaatcccagaaatttgggaggccaaagtaagaggatcccttgaacccaggagttcaagaccagcctgggcaacgtaacaagaccctggctctgtaaaaaataaaaattagcgaggcatggtggtacaacacccatagtcccagctactggggagactgaagcaggaggatcatttgaggagtttgaggcttaggtgagctctaattgtgccattgcactccaccctgggcaacagagccagaccctgtctctaaaacaaaaaacaaagcaaaaaaatggaaaagttatacatagtacacacacgtatataaacatatatctaaaaggatattatgagggtttaatgtttgctgtggactgagtggtggtacaccaaaattcatatgtagtgatctggtaagtttaagttctttgatactttctgagatgtctgggggatacctaaattttaagctttaaaaccggaagggtcaatttctatgtttattttttaaaaaactgtctatgggactattggataggtttcaaaatcttggtacacttcacataaagaacattttgagttccagattctcaaaggttaaaaacattcacacagaaaataaaagaattatataacttggacccttcttttgttctttcatatcctacaaaatgacaaaatagattccaaaacctgttcaccagagaatgtgtgggtctgcttgctcttatttcaggcctggataaaataagttgaaagaaagtttaaaaatagtattgaaggccgagcgtggtggctcacgcctgtaatcccagcactttgggaagc

SEQ ID NO: 1241275 - DNA, 4001 bp, Homo sapiens
agggtacggctttcccaggaggaaacaaacctggtgcacatgtgaaataggttctctaacttgagtttaccaggtggcatcagcccggttatgtgatttcggctggaaatggggaaactgaaaatcagttgtgggttcggtagaaacagcatcagcggtgttgcagcgaaagcaaccggcagcgaggatgcggcgaagttacgcccatttattctgccataaaacattttctttcttgggtgaaacgctgtggcgttcaagcgcagtgtatccgagcttccgagccagaactgaagccaggagctcctatctgatcagcctcagcttccaacgtcctcttaacggcagctttcatataaatatatttgaaacctggggccttcctacccctttccctatttctgatgggcgacgagctggcgcaaacacgtccgattctccctgtgcattcctttgcgttaggaaccccctaccgtccccgggagcgaacctggttttcaactccaggagtggccaggggtgaagacgagaatgcgctgaattaaaagaaccagggtcgacagcggccacgcaccagggagaattcggcatgaaccgccccccacccgacctgcacctccctctgccacttcgcctgcggcttcgtccgggcggggaagtcccggtcgaaggggtgaggaccccccagcccacctcggatacggagggagccaccctctgccgacatcacccaatagcacccctttcagagcgacactagttttccgaggccacccctggctccgcgatcgcgagcggacttggcggcttaacagttccactgactggaaggaaggaaggaaggaaggaaggaaggaaggaaggaaggaaggaaggaaggaaggaaggaaggaaggaaggaaggaaggatgaaaaggaggaggaaggcaggcaggcagaaattggctgttggacccggggctggcccccgcgagtcctcgcccggcccgccccactctgtccaggatctgggcaagcgctcaaagtctccccgaggcggccagaggcacctgcccctcgcccggccgggagcagacgctgccccctcgggccaggagccccaaaaccgcctctccgcctgcctcagcgcctcacccagaggtggcgagaacaccattcataagacctgcggcttccctgcctccaaatccaccccaagttaacccgagtcgttaatccactaaagccagctcgctcgcaaatacacgagcagacacacgctcgatcgcccggagcgcctccgagatccgggggctgccggggaaagcccggggcgaccacctgggccccagcacgcccgggacccgctgcttcccccgcggtgctccaactccggaaggtttgcacaaactccccgcgagcgatcggaaggcgaagagcgccctgcaaactccggagcctccgcggtccgtccgctggacccagcggacccagcggcggggcgggggccgcgggctcgggggcgcggggctcggccaagtacaccgaggcggccactgcccgacgctcgccccccgcccagcagcccccgaagccgcgctccctgcccgcgaggcgggggactccggggaccgcgccgtccccgagctcccgcgaccctcctgctgtagagcgctcgagcgccgggcttctccgcctgcaacccctatatctggctctctctgcaatttagcagaacacaaatgtaacaattttcttcttgttaattgcatctcctgacatttctgcgcgttgggggaaaaaaagaagatgaagaagtaagagctgaaagaagagagaagccccgccgcggctggaggcgcctgcaagcgcaatgctctggcagcgctcgccacgcagaaggcgccttttttttcatattgaaaccacgcggaatatgtacattttttagtcttacttacgctttcagggggttgtgaatgacagtcgccattttgctacaatgtaacagaatattgtctcagagttctaaaggttcgctcaggggaagcgacgggccaatcacagcgcgggataccggcccgccggccaatcggcgctgctggtagctaggtgggcggggcctgcgccgtggtagttattaggagagctgtcaaagcccagaggtcactcccttttgtagagcccgagagccagcaggtcttaaaggggcagtacagcgctggtagctccttttcgggctggggaaagtggagacgcacgggagagtattatagtttggtttaactccctacttttctaaataactgcagaagagtttgcgctcccggacagaaatatttaaatattgccagcaagccactgaatcctattcattagcctttggctttgcgtatcaacatttttaatcccccaaagggtaaatccccgtgtttcagtgcaaaagttggaaggctgccgtttcgtgttaacaaattactacatgtgctctgccgtttgctaatgctctgggtcctgccgctttttaatattcttattcccgaagtgttctctttatctcggccaccttcctctctcgcttcttggaactgtcgctgctgttcctggcgactccaggacagcaactcaccctccccctggaacgtctcaatgtcaggctcgctccctcctgcagccagggctttccttacgtagtgcaggggggttactctgcgcggttccccgctaccaccccttcggttcttccctctacaccagaaacttccaaaatgctcagattcctgctaggtggtgggacctggagctctgatctttaggcttaggggtagggaggacttaaggcaacctttggaaactttctactgctaggaagcaagtgactaggcagaagttgtagagcctggactgggtgttatcagggtccctttagaggagtggcacacgcgattctggcgtcacctttcactacttagatagaaggtggaaagaatttgctaatgaataatccgatgtgacccgaggcgtccaatgagtctgtgtctgcttcaagtcagtgtgaactcttcactggcgagcccctgacaaaattgggagacttctgcgaagtcaggcttccactgggcaccgggaagctctggggggatgaaatcgcattaaatcgcgaatagggtaggggcctcgttagcatacagaagtctggctaccattccaaagctgtttaatcagatcaaatagctaagatagtgggggaggggtggcaaggggagagaagttgccaaattgccagttcttcaaagctatgccctctcgcttccttttgctcctctcaagacaatgaataaaataaaataaacattccagaattttaagagttcaactacatacactattagatttacagataaacagaacgtggctgaatcactatgtttttaaaagatttgaaatctttaactcctctctgcgtatttaagaagcagaattgagttctatagattcctttgtaaatcctttgcatagcatcttggcagagattacagtttgaaaaagttatctccttttccaaaattgaagtttgaaaaatcccttctttactaatttgacaagaaattggttcagaagcctatactttgcctgaggtgggccttgacatcattgaaaagcaagaactgtattctgacccaagaagtatgagtttgaattatcagttagaactcccaataacctctttgaggtatcaaagacacaacaattcagattagtagacgacaacgtattttcttacatgcagcctgataaaggaggaaatgtagagcatgtcctgaacaagatttacaatgggggaagagagaaaaaacaaatgtatattacatattaaagaaaacacatactctaagcatgtacatatcatttattgtgttaaggcctggatgcagaaaccagcataatctctaactacctaacgaacttgaaaatgtcagatcagatttattgattggattggaaaatagtgaattaaagac

SEQ ID NO: 1241276 - DNA, 4001 bp, Homo sapiens
atatgtaagaaatgagggtaactctcatacatctttgctcagacaatgtagctgctaaattaaataatatgtaatacacatttacacatcatacatgtccaccagtgcttttgaattctatttgtccagatgtgactgcttggttgtgggggccacctgccgtgtcccctttgtgatctgatcagtgcaggcggctcctatttctgcctctaacaccctgttgggcagtaataagatgttaaaggcgacaacagagagagaagctgggctgtcagcttcagagaggaagggggtgaagggtacaacaaggaagaaaaagaaagggagttgaggggagatcaaagacaggcaggaagaaagccaaattgctaagagaggagatgtggcttcaggagcttgggaccctaaggaaaaccccaaagcaatgagattcaaaattgtgccatcccatcaccccagctaattgaattattgaatgtcccacgtggaaaaagctagtacagtgaaaaatagcccatactcagcgtaggcagagccctgcataggtgctgctggaaatctgagcttgtttcttcccaacacattaactaccaccactttatccccccatcctgaggaaacctttgtgtgaccattttctgtaggagacgtccgtggtgttggcttttttttttttggagggaagagagagactcagaacgcacacagagaaaatgctaatgtcgttcagctctgtttcattgtcaggagggacacatgaggataaaaacatagctctccaaaccattctccccgctacccctcctccctgcaccaccaccatcccttcggctggatgtgtctctgcactttgttctaatttatcccatgcataatttattcacgtgtgtattgtttcctgatcagcaacttttaaaaacaaatgaaatatataagatgttttattaaacaagttatttttaaaaaaataaaggcagatggtgtccctctcccaataacaacgtgtgtgctcctgcgttaggagttgtcaaaaactgtccagggtgtgagaggctgggctggtcagtggtattgtttatacccctttactcacagggaaagggtctgggaagcagaaaggaatagctaattataaatgaccaagcaactcccacctagaaaaagcaagcaggggcgttgtgtgtatgctagtgtctgcatgtgggtggcaacacaattacaaatacatcacgttgcaactgtttctaattatacaaagtacaattcagaactaattccactaaccggccagaattccgccaccttctttcccgcgtctgtcccttcccccacccttaaccccaccctacacagactccctccccaaacacgcaccctactgtgatccaaaaaaccctggagcgagtaggggaacacaagcttagagatactgcgcccgcccgcgcgaaagcgggctcccgggtaactagggtacggctttcccaggaggaaacaaacctggtgcacatgtgaaataggttctctaacttgagtttaccaggtggcatcagcccggttatgtgatttcggctggaaatggggaaactgaaaatcagttgtgggttcggtagaaacagcatcagcggtgttgcagcgaaagcaaccggcagcgaggatgcggcgaagttacgcccatttattctgccataaaacattttctttcttgggtgaaacgctgtggcgttcaagcgcagtgtatccgagcttccgagccagaactgaagccaggagctcctatctgatcagcctcagcttccaacgtcctcttaacggcagctttcatataaatatatttgaaacctggggccttcctacccctttccctatttctgatgggcgacgagctggcgcaaacacgtccgattctccctgtgcattcctttgcgttaggaaccccctaccgtccccgggagcgaacctggttttcaactccaggagtggccaggggtgaagacgagaatgcgctgaattaaaagaaccagggtcgacagcggccacgcaccagggagaattcggcatgaaccgccccccacccgacctgcacctccctctgccacttcgcctgcggcttcgtccgggcggggaagtcccggtcgaaggggtgaggaccccccagcccacctcggatacggagggagccaccctctgccgacatcacccaatagcacccctttcagagcgacactagttttccgaggccacccctggctccgcgatcgcgagcggacttggcggcttaacagttccactgactggaaggaaggaaggaaggaaggaaggaaggaaggaaggaaggaaggaaggaaggaaggaaggaaggaaggaaggaaggaaggatgaaaaggaggaggaaggcaggcaggcagaaattggctgttggacccggggctggcccccgcgagtcctcgcccggcccgccccactctgtccaggatctgggcaagcgctcaaagtctccccgaggcggccagaggcacctgcccctcgcccggccgggagcagacgctgccccctcgggccaggagccccaaaaccgcctctccgcctgcctcagcgcctcacccagaggtggcgagaacaccattcataagacctgcggcttccctgcctccaaatccaccccaagttaacccgagtcgttaatccactaaagccagctcgctcgcaaatacacgagcagacacacgctcgatcgcccggagcgcctccgagatccgggggctgccggggaaagcccggggcgaccacctgggccccagcacgcccgggacccgctgcttcccccgcggtgctccaactccggaaggtttgcacaaactccccgcgagcgatcggaaggcgaagagcgccctgcaaactccggagcctccgcggtccgtccgctggacccagcggacccagcggcggggcgggggccgcgggctcgggggcgcggggctcggccaagtacaccgaggcggccactgcccgacgctcgccccccgcccagcagcccccgaagccgcgctccctgcccgcgaggcgggggactccggggaccgcgccgtccccgagctcccgcgaccctcctgctgtagagcgctcgagcgccgggcttctccgcctgcaacccctatatctggctctctctgcaatttagcagaacacaaatgtaacaattttcttcttgttaattgcatctcctgacatttctgcgcgttgggggaaaaaaagaagatgaagaagtaagagctgaaagaagagagaagccccgccgcggctggaggcgcctgcaagcgcaatgctctggcagcgctcgccacgcagaaggcgccttttttttcatattgaaaccacgcggaatatgtacattttttagtcttacttacgctttcagggggttgtgaatgacagtcgccattttgctacaatgtaacagaatattgtctcagagttctaaaggttcgctcaggggaagcgacgggccaatcacagcgcgggataccggcccgccggccaatcggcgctgctggtagctaggtgggcggggcctgcgccgtggtagttattaggagagctgtcaaagcccagaggtcactcccttttgtagagcccgagagccagcaggtcttaaaggggcagtacagcgctggtagctccttttcgggctggggaaagtggagacgcacgggagagtattatagtttggtttaactccctacttttctaaataactgcagaagagtttgcgctcccggacagaaatatttaaatattgccagcaagccactgaatcctattcattagcctttggctttgcgtatcaacatttttaatcccccaaagggtaaatccccgtgtttcagtgcaaaagttggaaggctgccgtttcgtgttaacaaattactacatgtgctctgccgtttgctaatgctctgggtcctgccgctttttaatattcttattcccgaagtgttctcttt

SEQ ID NO: 1241277 - DNA, 4001 bp, Homo sapiens
cgggaggcggaggttgcagtgagccgagattgcgccattgcactccagcctgggtgacagagtgagactctgtctcaaaaaaaaaaaaaaaaaaaggataattattttatttattatttatttttgagatgaggtttcactctgtggctcaggctggagtgcagtggcgtgatcttggctcactacaacctctgcctcccggattcaagagattctcctgcctcagcctcccgagtagctgggattacaggtgcccgccaccaagcccggctaatttttgtatttttagtagagacgggatttcaacatgttggccaggctggtctcaaactcctgacctcaagtgatccgccggccttggcctcccaaagtgctgggattaccgcgcctggcaggttaattctttagataggatggcaaaataaaataataaaatttcaaataaggaaatcaagacctcacaaaaaatcatgacaaaaataagaaataagaaaagtgaatttctgggaaaggagagagataagaatacaggaatttctatgcttatatttccaaattagcacagggcaacagattctgattttagaataatcacccacacatcatatagttcacgggtactatttacaataagtaggcggggtgcggtggctcaggcttgtaatcccagcagtttgggaggctgaggcaggtggatcacctgaggtcaggagttccagacaagcctggccaaaatggcgaaaccccgtctctgctaaaaatacaagttagcgtggtagcttgcgcctgttgtcccagctactcgggaggctgaggaaggaaaattgcttgaacccgggaggcggaggttgcagtgagccgagatcgtgccactgcactccagcctgggcgacagatcgagaattcatctcaaaaaataaaataaaatataaataaataaaatataaaaaataaaataaatgtaaaataataactaaaattgttttaagtaatgctagatctgggaccgaattcagcagaaaaggcgagcgaatgagattttgctacactgaagtttctgagtatctacaaaagtcttaattatgaactaatttttttcttacatttcaacgtactccaaaaatacgtcagaggccttaaagaaaattttatttgtttttgtatgcagtgggggcaggcggtcttaaaaagtaaagtatgtatgaaagtagaaggaactcatagtgacataaatgttttaaattctttggagaaatgtgtttgataaggcaacattgttataaaagtagaggtctttgtttctcagttggaaattggtcaaaacttttaaaaggcttcttgaaatagaattgtttcttaggaaatctcatttctatgctaagaccaagtcaacataggggggaattcgacgcgatctgaggcgtaagtcaaagcagatcatgaactcttgcagcaaacctgacctacaagcttgcccccgaccagcatagaccacgagctgcaaggggtctgagacagtaaggcctgaagttcaccgaactcagtttcaaatacctgtggtccccccaagaagggagacacgctcttcctctcgggtgctacaactggcgctggggaacggtgatgctggaccgaaaagacaagcgcagccaggcaggccaccgcggccagcttcaagctgacccggtatccccgcggccggaccgccggtctcagagggagacacagagcggacgagtcaccgagacaacgcggaaaaaaccgccccgcacgccggaggataacgagagctgccgggctgacgttacctccacccactgggccgcgacgtccccatcggctgggcgaatttgcagccgggcgtgcaggcactgctgtaggagcgcccgggcctgaggaatccggctaccctcagccatggcttaagccagcgccgcggccggacagttactaggccatgtgtcgctggcccctccctcgacgcgctggcggggcagacgaggcggggcacgacgaagggcctgcgccgattgcccagtggccccgcccttaggagggcggggcctcggactgactctcgaatgtcccggatgtgcggtcttggaggccggcgtagcgctaagcttctcggcagcacctgcccaactctgtagaaggcgctcagtgtatacttttattaaacgattgaaaagactcgttaaatctctttcctacaaaccttttaagaaacatttttcacctcagaaagcttaggttccaactgttgaaaaattttaaatctgcttgatttaaattcatgttatgcccatatgaaagtaagtaaacaaataatcgaatcataaagcaagcggagatggaactaaaagctatatatacatccttcaaaattttccttattccaatcaataaaaacaatgctgcctcctctatcgggaatgccataaattattctgattccacagttgtgaaaaggtattggtatgctatacgaatacacattctttagaagatatccttgttaaaaatgttcttatccaagaaagtatgattgttaataacttagcccgctactaatacaaaaataaaacagcttattctgatgcatatgacgtaaattctgtgatgcattttctggaagtacatattagaatgtaaataaaactaaacaagggcttgattttctttcccatgtaacgtattccttaaacatgcatcagattagcatttatttgtctatgggcttggatggtttagatgaggaataatagtgttaccctgattgcattacccaggtcattgatttgggctcagttgacacaatgtgcctatacattcggatctgttgtttaaaaagatgacatcactgacagtgttgctatccatacaaagtagtgtgactgaagaaaatagtccatgcataatcaacagtcctttgtacacaaaatcgaagctgcttgtttgctggttatcttgcagccaggtttacacttttagtaaaaacagaaagcaaaatctcacatgatctctgattgttgcattgcagggattccaacagttgttgacatttgtctgcaaagcacagacaagttgaattgcttcatgtctgcacctttatgtcattataactactgagtctcttttctctccggctctcagattcagattttacaggcctgaaagaaactttgacatacaaaccattagctatgtcccagaataagaaaagactttggtgtccatttgtatgtggctgcaggaaatagggaggtctatagagaataggttatgtggttcgcagagatctttctacagagagggtttctttaacaaattgggaaacccttcctgtgagtagaatagatggagtatggatggtaatggttagcttctcaaaaatcactaattactttaaaccctcctattgagtgaggatctcgtggacattgctgtaggtactgtaataggctgtggctcacttattttttacttctatttgcagaaggctatagagagtggccaccaaagacagcatttcctttctgtattttattttttgaacacttagtttcattctgcaaataatttaagaaggaaggacatgcatgcaataaaatagtaaaatgtgaattaaagcattagaaataaagaaactagaattatgtcagtaagccacaatgggggaaattgaaaacaggtaagacagtggttctcaactggagtgctgagatgatatagtatgcagcaaaattttcacaaatgtataactttaatttttgttataaaacaattatgttcattgtatgtagtattgaggtgctgtaggttgtacaatttgtttcaagttggaactaaaggcaaagcatagcattaagttggctttacaagaagatggtggttcactggaatgtgagagagctttgccttgtcattgtatgagaaatcattgagcagagataattctcaaacacctacaatgctgaaagtgtaccatatggataggg

SEQ ID NO: 1241278 - DNA, 4001 bp, Homo sapiens
gtgattatatctgggtcaaacaattcccagtgatttttactttagctgtatagtacattttctacaatgactatatgttttttggaaaaaaaaaagagtagataaattttttttttttaacttttgtggcttccacttaggaatacataatcccaaacatcacagtaaacaaccctcaaaaacattaatactctaaatatgctcaaatggtttatttgccttgaacattccacgtggatataagaaaaaaatattcttttacaccctgctaatctctggcaggaaaccaaggctacagggaagcatcttctgagtaagaatagcctttgaaagaaacaaaccatcagaaacacagtgtgtgttaaggatggggcagacagtacagggtctctcactgagagaaccatacagttttttgaaattttaagaagcttgttggcaaatatttttagacaatctccaatccctagaggctaaccttggacatcatccttaggttcttagatggacacgccacacccaaagtggttgtaatgggctacaaagtggttgtaatgaatccatgagaaagcctgcctgcaggcaagccccagacttagatgaatgtaaccttgctggtgggcgatcattatttgaggagacagctggaacacgctaactctagcctcttccccctactaggtgcctaacctgaatctttttttttttttttaatctgtaaaattagactcaaatattacagggttatcattaacatcatcgaagcattaaacaaatatgaggtatgatcagtgaaaacaagcagtggatggggagctgagacactgagtctagtctcaggactaagattagctggtgaccttgggtgaaatcacttaacctgagcctcagtttcctcaggtgtaaaatcaggatacacccgttcagcaaggatgctgtgagagcatccacctacaacagtgatgctcgcaggcccggggctggcaccgtcgctctgtgggcctcggcctctgggtccccacaaggcagggctgggacacccgcccgacctcctcccgaaccagaaccccggctgcccccagctccgcgggtctgcccccgacacatccctcccgaaggccacttggcttggacacaaatcgaaaccgaaaagctcatgtgacactggaggcagggatgcggcctcgcccgctctcagcccagggagacgctgtctccacccaactcggccatcttgagaggcccgagcagacaaagcgaccccattgttttgggtgacggcagacggggacccctttcccctccccgcgaccaggagcggggcgccctgggggctccgggccgggcagtgggtgtggcgagggcgagccccgggcgccgcgccggcctctgcggggcgtctgcggccctggggacccggccggcgggacgtctgcggccgccgggctctgcccatccaggggtcatctgcagctgccgggctcctcccatcccggggacatctgcgaccccggaggacctggcaggccctgcattccgcgaggcctggctctggcgaccctgccctccgcggccccgcacctttgagcgtggagcgctccaccagcaccgtgtggacctgcgggtccgaaaggaacttgcgcatctgctccagggcgctcttctcctccagcgccgcctccagcgcggccggcgcctcgccgccgtcctccagcagcagcggcaccagcttgcgcaggtgcttctgcagcaccgacacgtccgccacattctgcacggccgacacttccaatccggccgagccgtcctcgccgccgccgcccccgggctccgacatggtgtcgcgctcgggaccttccaggagcgatgagaaggcggccgcgactcagcgagacagccagcaagagacagaaacggccgccggaagccggaccgtccgctagcccaccgcagactgaggagagcgggagccggctccgccctaaaggcagccactgccaggtggccccgccccgccccgccggccgcagccgccgcagccacccgcgctcgctcgcggccttagcgtcacggcgccgcgcgtgcgcggggggcgggcccggcgatgtcgccgcgcgcccttctgggacttgtagtctcggcgctggtcggggcccgcagcctccgcactgcgagtcctaggagatggggacttggctcaacgtcctggctcggcgcccgggcttggcgaggttggtcaggggctgcgtctgtcttcttcactgctgtggacgcagcgaatagcacacagccagagaaactttatagtgaatcagtgatgttattggcgagagctaacgtttagtgagcgcttagcctgtgcccggcgttgttctaagccccttaacctctcattaaatgttctctcattgaatgaatgaatgactacgtatcaggtaccaaaatataggcacgacagatgtgttattagatatagaccgggagattgaggatacttttcagagggggaggagatgaggggcgtgctcagagagtcccattgccaggctggaaacggacagctggggagggggccttcggggcagtgtaaggttaagccaggaatgacaccttcactgtacgtaaagccaagctgtgatgggatctggttcctaatgacaaaaatcattgtccccgaggacgctgtgaggaccaagagggagacctactgagaacagctacctccagcaatggctctcctccagccccctagagctggcactgtcattctgtgggcctcagtatctgggtccgtacaaggcaggggctgggttgcctgcccaccaagtttccccctagttcggacccaccacgacctcctcccctacaccatgactacataagagccagaatccaggctgcccagctgggtgcggtggctcacacctgtaatcctagcattttgagaggctgagatgggaggattgcttgaggccagaagttccaagaccagcctggtcaacctagcgagaccctatatctatgtgtatttaaaaattaagaattttgtaaaataataaaaataatagaatccaggctgcccatctttgtagtttagagatggtaggttcttctaaggggtagtaattggcctttgaaagttcacattcataacttctttcttaagttgggtggagagagggaagccaatggcgttttttttttttttggtttttttgttttttttaaacatcaaagtgcactgtcagagtgccgagtcctgattggtggaatgatgatggtatgatttgattctcccaaatcatctttgaaaaactgtgaaacatacaataagcttattccttgcctaattaccggttgctgggtcccagggggttgctggaacacggagactaatcagatgattcttgtctttaaggagcatgtggaagaggggacagatgaataccccatcttcctgctctccatcagtccgccctggtgtgatgtgcctaagcagttccgagtaatcttcctggaaaaaataaataggcaactgcgatgagtttgtgcaaggatcctaatggtaatgaataataataacacaccactgacagcgaacgctgagtgttcactgcgtgctaggcaccatgcagagggtttcccctcacatgtactttaggggtagaaagagggacaaagaggaaagtctattaggtgcagatctgtgaactctgaataggccatccaccatctgagactcagaaacctgcagggacctggccgatgggcaggctgcatgctggctgcaccatgagtcagcaccagactgggagacgcagccactcagggatccaagggactcaaacatctgcaacctggccccaggccaagagaacaaactgcaggctccggatttgcggccctgtaggataggctcaaaatgaaacatgtttgttatttctaagtggatgggaactgaaagaacccgaacaatcagtgtacaaggattcatgaatgga

SEQ ID NO: 1241279 - DNA, 4001 bp, Homo sapiens
taatacctgtagggttgacaagcaagagcaagccacacaaacatgatgctcatgctgcttgctgtgctatgtgtagtcttatctttgacccaggagtctcatgtcttcggtcagctaccgtgaaacagttaacaggctacaatgtattagtttataaacagtgtaaaattaaatactgacagacacctctctaacactaatctccctttttaaaataataaccatttggctcagagcctacaacaggcaatactgtctgataacattgttttgtttttataatatttatctttacagttaccttaccagtggcaactgtcacagaattataaagcttccttaaaaaaatgatacaacagtcctggctccgtggctcaggcctgtaatcctagcactttgggagcccgacgcaggcagattgcctaaggtcaggagttcaagaccagcctggccaacgtggtgaaaacccatctctacgaaaaatacaaaaaataagccaggtgtggtagcgcatgcctgtaatcccagctacccaggaggctgaggcaggagaattgctggaacccaggaggtggaggctacagtgagccaagattgcaccagtgcactccagcctggctgacagagtgagactctgtctcaaaataaataaataaataaataaataattgagacatacatatatacatacctcctttcacagacaggacccattaactgaaactctttttcacagggaatcctggtatctatcctcactcccaacaaaagaaatcttaacagcagtctgatttcccatgcatccaatgtctccccatgacaatatgaggaaacattgttcttttgattttttttttttttaagaaatgaggtctcactatgttgcccaggctgttcctttactaccaggcttaagagattctctcgcctcagactcccaaagtcctgggattacaggcatgggccaccacacccagccaaagttgttaatgaaagcatggctttacagaaagcttctttaggcagaatgaatgttttaaagtttaagaataggatctgctgacagcttaagaaataactaaatttgtgtggaaatatctcggcaaaacagcttcaagtttccctggtagaataaagcccacccttctggaaatcccacgaaccttcttctgtgcctatctcaggtcaatattctctacaatgctctgccaagaaatatatactttatcttattacccttattatactataagcctctggaagacaaggaccttatgatttatctctgtagctcagagcgagcatacaacagtccctgtcaaaaaataaaaataaaaaaggctgttcaatattcccttatttctgtttatggcagtttagtcttcaagatggacacttcacattaagtcctgtgagcctcacaacaaacatagtgtgttatactatgttatataggttatacaattatgttattatagttcaattttacaggtgagtaatcgaggataactgacttgccttccgtcactctgctactaaggtgtagagacaggtttcgatctcattgcttttgaagatttacacgcggtcccccgtgattccggaatatccctcttcctacaggcgacatcggcaccgcctccccccgggactgcgcgaccccatcaggaaagccctttggcttcgcacaagtaacaggcacgacaggctcccgagccgctagggtctgcgtaggctcggcaggcgcaacgaatggaggcgaccaaagccaggcctcgacccaaatcctcgggggccagggtggggcgggagcccacctgctcaaagccggctcctcgtcgctaggctcttcaaccgcgtaggggtcgtagtcatccggaagccggttcatggtggcctgcagcggcctacaccgtccacaagcaatttgcagcgtctctgtttacactgcaagtccagtccctaaagcgcccctgacgccacttccgcctgaacgtcccagtcccccttgcgcgcccgcgcagaccgacagcaccgagggaggcaggtagaaggcggggaaggggcggagcaggagcgaaaaggggcggggacgggacgggggcgggtcttaatcccaccatttttgttttgttttgttttttggagacggagtttcgctcttgttgcccaggctggagtgcaatggcgcgatctcggctcaccgcaacctccgcctcccaggttcaagcaattctcctaccgcagcctcccgagtagctgggattacaggcatacaccaccacgcccggctaattttgtatttttagtagagacgggggtttctccatgttgaggctggtctcgaactccggacctcaggtgatccgcccacctcgaccttccaaaatgctgggattacaggcgtgagccaccgctcccggccaatcccaccattttcttccgcagcttctgcttacaggaaaatagcagctaccttgtcaccaaaaataataatgatgggcaccctcataagtgacagtctctgaggtgaacatgctacatgcagcgtctcatcacctacgaagcaggaatctagacgctgagggacacacagcccgaaatccaataagtcctcagacaccagcacccacatccctccaacctcgcctctaacccttatgccttccacaccatgaggctctcaacctctccttcacactgttcactcctcagtctgactgcggcctcaacaatctacgaaaagttatcttttctcgtcatcttcccagtccccacttttgctcagccctcaactgatcccactcgatacctgaggagaacaggcagatgacagccacttgagctccatcgggagactgtttctaaccctgtttctgaaccaggaactcgggttcctgcctcctaccgagacactgtggcactctctaaaatgtggagtagctgtaataaatctactcctgtattatgctttacagtgcaggtcttagtttttcttttttctcatttcttttgaaatggcatctcgaacaaagtccaccaatccctttacaaaagaatgaactgctcctctgtgtgtacttcatagaaggtggaatcggacagaagcaggttagtgacagttattcctgaaatacaggagcagagtacagtctgttgtggtttcccggattccgcgcctagctcagccaattaagcatgagacataggccattgagccacttagtagttatgcgagtggatagattggtatgtagagggaaagaggtctgctgtaaagaacaacacttgtttgtctgtggggaaagaaaagcagaatacttgagatgaaagttggcatacaaataggatactatcgccagtagttatattacaaacattatcggcctttctagtgtgaatgaacattagacacattattgtcattcctagtttaaagttaaggttgcgtggttggatttttccactatctttttctaatttttctaccatttggagaccgtaggcatttgggcctgtcaccccttggatgggttcctagtttgtttacattttcctgaaccctcctgagcgcccgttcttggtctaatccccagtcgtgatgattccacacttcctcagccgcatgttgtcttgcctcattcatgagctggtcagcgtttcgtctctttaactgacatgttccccagtgctgtttgaactgttgagtttccgttgctggctgagtgcgttttgtccttcacgtaaccttcgctggtaaaaataagcccatgtgatgtccaccagtggatgaatgctggaccgagagccctagcttctggatccaggtctaggcccttcatctgctgctctgtggcccagggcaggtttgcttgacctctgcctcagttctcgactctaaaggacatactgacctacctcacaggggtgttgtgaggattaataaatgttggtactctgctttggaaatgtgaaaatgctgtgtaaatgttaagaaatac

SEQ ID NO: 1241280 - DNA, 4001 bp, Homo sapiens
gaagcttctgctctctgtgtacctattgttgtacttctcccagtgacactcgagtactttgagggcacctggggcccatacatatgcatttctatatcggtcgctccccttctcattgatgcatgcacgctgaattttgaaccataagctatagatgaacatatgaaagctcttgcctttcagagcctctttttctctcatgaggacatcacatttgtactctttgaattctcgacttggacttaagtaatgaagttttatgaattctctccagtaaatgttgttactgtatacacacagcctgcaaaggatgcaaagcagggccaagagtatgccccaaatctttagagaggatgtcatctcagtcaccacgtccacctgcgtgtctacagggaagagaaagaaaagcattaaccagactatactcagagagctgagctccaccttaaaattcctttccctgccaagcaggtacttgggcactatattgctatttggttccatattagaagatgatgattctcattaaagaatacagtttctgggctgggcacagtggcttatacccgtaatcccagcagtttgggaggccaaggtgggtgtatcacctgaggtcaggagttcgagaaacaccgtggccaacatggtgaaaccccatctctactaaaatacaaaaagtagctggacatggtggctgtagacccagctactcgagaggctgaggcaggagaatcgcttgaacctgggaggcggaggttgcggtgagccgacatcacacctctgcactccggcctgggtgacaaaagcaaaactccgtctcaaaaaaaaaaaaaaaaaagaatacagtttctaagaactaaaaatatgctttagcctgtgagagctaacacaaatttggaaaatatagataaagtaccttttgagaatttcaaatatctcctgtctaccctgtcttctacccaatttgaggagccaatcactatcgagctctcttttaccaaataagctctcaggagatcatgtgtccaatagaaaaatgacattttaagcgtattgtctgcaaagtggaaaagattgttgcattttaagggaatgtagaagatgagtaactacttgggaggtggttcctaggcagaaggcattgattctggaaaccacagcccaggctgcaattgcacttctctgaaaaatgatgtttttccaaccttgacttccttataacactttccccaaagtctgggtgaaacatgtgatcattattaactatcggcatcccttctcagaggccatttccctaattactgctattacaaatgatcttcatttgttagagcttattgacaatgccatcataaaaggacatcagtttagaactgttgctgtaatcaatcaggcaccaaaactaaaacagtcccccgcagagctactgtggtcacagcataggatgtatggtcgtttgaaaaagttatctctttaccagctatctgtcctcatttgccatgaggagtattcctggccctactgaacctctagcctgattcatagctctgagtatcggtgtcctcagataggcctaatcacagctccctacagacctgcaagagtctaatgagatgcaagcatgtgagagcacttctaaagatgtcaaatgcccacatcaggcacagggttcctcatctgtggaaccctgtcctggtgataaaggcctacacaagatagaagagtaggatgcaagcagctttaatgcactgtgcttaggaggactggcggtgaaggaagggaggggcagggaaaagcctgtatcagtgggactgaggctaaccagaattcagacctttgttttccatgatttggatccttctccattgtttgctatctaaaagttcaatcagcctccttccagtgttcctggctgtcccccgagcaacctcagcagagcccttcttaccctacttggactctgagttcaggtcactgattgtagtggggatcagcatgtggatctgaagagcagagtctgcgtcctcctccttttctcagagccctggaaatctacagcagtggagaaaggaatagtagggggagctgcagggctccagctgattggtagccgaggtggtgatggggaacagccttattatgtgaacttgtccctgtatcgtttcatctggaacacttgggctcactcaaacagtagcctcgagcaaaggctacaaacatcaaaggctgagccctgggtacaaaatgattgcaagaccctaggtgaccccagaaaagggttatctggtgctatcaggagacaaccagagacttagctctgctctcaattctaacaaacttctggggaagtccctggagggttatgctatgttacatgggaacttcactgaggaaagccaccttttttttttttttgagatggagtctcgctctgttgcccaggctggagtgcagtggcgagatctcggctcactgcaagctccgcctcccgggttcaccccattctcttgcctcaacctcctgagtagctgggactataggcgcctgtcaccacgcccagctaattttttgtatttttagtagagacggggtttcaccgtgttagccaggatggtctcgatctcctgacctcatgatctgcctgcctcagcctcccaaagtgctgggattacaggtgtgactcgctgtgcctggtcttttgccttttttttttttttgacagggtcttgctctgtcgcccaggctggagtgcagtcgcacaaacactgctccctgcagtctcaacctgccaggctcaagcaatcctcccacctcagcctcttgagtagctgggactataggcatgcaacaccatgcctggctagttttttgtattaatttttgtagagacagggtttcaccatgttggccaggttggtcttgaactcctgagcctagctaagcctcaacacatcagcctctaaaagtgctgggattacaggcatgagccacttggtcaggccagaaaatcacttttaatgttgtgaattgtgagaccttcattgagaggtgaaagaatatctagtgaacacagtggccaaatagctatgaatgattaggtagccagtatctgaaatttctctactcagttttttaattataacctttagctgtttggtgacactgtactgcttactattaaaatgtcacatagcctggccatagtttctacaatgctactatacgtaacatctgactgtgaagtataggtcacaaggtgctggctaagttgtttttcaggacctcaagattcagtcctgaactcagctcaaactgacaagaccacaacttcttcaactgagtttgtgcaagtgttcaatggttacctttaacatcacagccggaattttccaccatattttccatgccaactccccacaaattggcaaatgtgaccaatactggttcatcaacactagtcaaagttacgatttatgaataaagtaagactcttgcaaatcttttctaacaacacttccaaaggctgctcctagccaaaccaccttagttgattttctcactgggccaccttattgttggaatgacagaaggttcagtttatatccagaacttatcttcaaacccccactcctgtgaagcagtccttgagtaatagaaaatcatgtgctgatagactggatggacgggagatagtcttagagcaggttctgtgcatccttctactctctaggtctttgggggacaggggagagcaaaacaggaacaattctgggcctctgaatttggatgatttgagaggcgattctgagggaaaatcagttttttgtcatgtgcccacacatccagagctctttccaacaaatgtgcattgtctattgaagacaaattcaagtagtgactcaatgaatgtagagaggtgggagagagaagccacctgagccaatgtatgagccagtgtttctcaaatacttgatattccacttttaatatggaaaaaaaat

SEQ ID NO: 1241281 - DNA, 4001 bp, Homo sapiens
atgcatttcggaagcgatccatccagttgtcactagtgcatatatgctcgattttgtaccatgagatatagataaacatgtgagagctcttgtctttcagagcttcattttctctcatgaggacatcacatttgtactctctgaattctcgacttggacttaagtagtgctgtttcatgaattctctccaagaaacttctttgctctgtacaagcagtgtgcataggatgcaaagtagggccaagagtgtgccccagatctttagagacgatgccatctcagtcaccggggccgcctgcgtgtccacagagaagagaaagaaaagcattatccagacaatgcccagagagctgaactccaccttaaaattccttccccaccaggcaggcacttgggtgcaattttactatttggttccccgatgagaagatgctaattctcattagagaatagagtttctaagaactaaaaacacgcttcagcctgtgtaagcgaaacacataattagaaaaaatagatgaagttcattttgagaattccaaccatctcctctcatccctctcttacacccaacctgaggagccaatcaccctccagctggctcctttttaccagaccaactctcaggagatcatgtgtccaaaagagaatgatattttaaggtttatgtccttgaagtggaaagggttgtcagattttagggaaatgtagaaaatgagtaactacttgggaagtggttcctaggtaggaaggcttcgattcgctaaaatgacagcctagcctgcaattacttcttgcctgcttctccaattacttaatgatgcttctccaatcttgacttccttataacactttctccaaagcctgagtggaacgtatgttcattactaactacccatattccttctcaggggtcattcccctaattatcactattacaaatgatcttggtttgtcagagctgctccttgaaaatgtcatcataaaataactccagttttgaggtttttatttgtttatttatttttgagacagagtctcactgtgtcacccaggctggagtgcagtggcacagtcttggctcactgcaaccttcacctccagggttcaatagattctctgtctcagcctcccacgtagctgagattataggtgcctgccaccacacacagctaatttttgtattttttttagtagagacaatgtttcgccatgttggccaggctagtatcaaaatcctggcctcaagtaatctacccacctcggtttcccaaagtgctgggattctcaggcatgagccactacacccaaccagaattccagatttgaaatattcctgtaatcaatcaagcaccaagactaaaagagcccccacagtggcttctgtggtgatagcatggagtgtggggatctttttgaaagagtctaccgtttaaactagtgctctgtcctcatttaccatgagaagtgttcccgcccttactgaatctctaacctgattcacaactctgagcattggtgtcctcagatggacttaataatagctccctacagacctgcaagtgtctaatgagacgcatgtatttgagagcacttctaatgatgtcaaatgtccacatcagacacagaacaaagggtcggtacttcctatctgtggaaccctgtcctgatgataaagacctacagaggatagaagagcaggatgtaagcggttttaatgcattgtgtttgagaagactgggggtgaaggaagggaggggcagggaaagcctgtatcagtgggactgaggctgaccagaattcacacctttgttttccatgatttggatccttctccattgtttgctatctaaaagttcaatcagcctcctttcagtgctcctggctgtcccccaaacatcctcagcagagcccttcttaccctactcagactccaagttcaggtcactggttgtagttgggatcagtgtgtggatctgaagagcagagtctgagtcctcctttcctcagggccctggaaatctgcagcagtggagaaaggaatagcagggggagctgcaaggctccagctgattggtagtggaggtggtgatggggaatagccttattatgtgaacttgttcctgtatcttctcatctggaacacttgagtttattcagacagtggcctcaagcaaaggctacaaacatcaaaggctgactccagggcacagaagaagtgcaagaccctagagtgaggtgaccccagaaaggggttatctggtgctatcagtagacaacgagagacctggcttctgcactcaatttctgacaaagttctgggaagtccctggagggttatgctatgttacacagaaacttctctgaagaaagccacttataacattgtgaactgtgggactttcgttgagaggtgaaagagtatctagtgaaactggtggccagatagttatgattaggtagccagtatctgaagttttactaggcagtttgttattgtcgatgaaacgagtcagctgggtgtggtggctcacgcctgtaatcccagcactttgggaggccaaggcgggaggatcacctgaggtcaggagttcaagacctacctggccgaggtggtgaaaccccatctctactaaaaatacaaaaattagctgggcgtggtggtgggcacctgtaatcccagctacttgggaggccgaggcaggtgaatcgcttgaacctgggaggcagaggttgcagtgagccgagatcacgccattgcactccagcctgggcaacaggagcaaaacaccatttcaaaacaaaagaaaagaaaaaaaaaagagtcaaactctgtaaaatatttgaagagatttattctgagccaaatatgagtgaccatggcctatgacacagctctcaggaggtcctgaggacatgtgcccaaggtggttggagcacagctggttttatacattttagagaggcatgaaacatcaatcaaatacatttaagaaatacattggtttggtccagcaaggcgggacaactcaaagctgatggggagtggagggcctccaggccataggtgtatttaaacattttctggttgacaactagttttgtctaaagacctgagattgatagaaagggaatattcaggttaaaataaagatggtagagaccaattctttcgaagtcttatagtggctgcccttagagacaatagatgacaaatgtttccctttcagatcttaattaatatctttaggattggaaggtctggaagaaaaatatttagctatgttaatagagattctttacagatgcaaattttcccccacaaagaacagctttgcagggcaatttcaaaatgtggcaaagaaacatgttttggggcaaaatactttttcttgtttgtctggtaatgttatgccagagtcaggttggaaagtaaaacatgatatacagggttaaataaaactcatctgatgagaattgatgatttgtagggcatgactccccagaccccttagataggaatttgggcaagataaaaaaaatcagagtttagtcctcattaacaataacctttgctgacgctgtagtccttactgccttagtaaaatgtcaggtagcctagccatagtttccacaatgttcctatatatcacatctgactctgaagtatgcatcacaaggtgttgacctaattgtttttcaggaactcaagactcagccctaaactcagctcactctggtcaagaccaccagcccttaaactgagtttgtgtgagcatcccatgggtgacctttccatatcacatctggaatttccagcacgtttcataccaactccccctaaattggtatatgcaacgaatattgtttcagtaacagtaaccaaaggtttcacttatggataatgtaagatacttgaatgtattttctttttctatttatttatttactttggagacagaatctccctctgtcacccaggctggagtgcagtggagcaa

SEQ ID NO: 1241282 - DNA, 4001 bp, Homo sapiens
tgggccctaattaactgccaagctgtctggtctaatgagagtgagggatggcattccaggctgagctctgagtgcttcctttgcttgatggtggcagctcaatttcttgaatctggacaatatcttgactctgactaattccagcttaacaagaagggtgttgtctctcgaatgaatgtaacaggaaagcagaaaagcataaagacaggggtgagcaggaaacttgccctactcaagcaggaggttcatggaggctcagctcaactctcattattggtgaattggtgcaatcttttctggagagcaaatatctaacaaaattttaaacgtacatattccatgacctagcagttatacttctaggaacttattccacagatatacagccacaaggacataaatgtgtgtatcattgcagcaatgttggcagaaaaaaaaaaaaaaccccacctatataaccccagacaggaacctggctaaaaagaatatgcaaccatattttaaaatgcagtagtggtgtgtgcttttaggttgatatattgttaaatgagaaaagcaagttaaagtaggcacaatatttacccatttatgttttcaataaaagactatgcatatgtatgtcatggatagaaaatttcagaattacacaaaaaaactgttaatggtaatcccctaggagtgggaccctctggtaggcggcgagcggattttatgctcaactttatacctttctgcactgttttaattttttgaccgtggatgtattttataaacaaagcaacaaaagtaaaacgagaaagagactatgtcatgtcctatgtaaatttctcctgttaccaacactcccctctcagtcttccctcttggcacctctctagcatcttgtatttatagtagttattagcagcctggtggtgagataggcttgtgtagactccagtggaaaagatttctacttcatctctgggctgaggtgttaagaggaagctaaaattcagcactggacacatctctgaaattgcttataaagcaatttataaacatcctaagctagccctgtgaacttttcttaggatccattcacctttgatcgtctaccccatccccaaatatataagaaagctctaccttggagggcttgtacccaaacagcattacaacagcagttttaaagtcctctctgctgagatatcctttgtgatcttcatcacatgctttaaatacctgaagaacattaaatagctttagttaatgagacagaaatggtttatttttattactagtttattatacagtttggacctcgaaaatctaaaacttggcccagcggtagagtatgaaaatagaatttcattatcccaatattaattctcaagaaatcttaaagatggactgaaattttcttaaacatgggctgaaatttccctcaaagtgcaaacgagttaaccgctaggtgacgcaaattaattcatttaggccactgagataaattctacccaaaattcagtcctggagttaggaaggtgaggcaaaggggctggctttgaaaggcgggagagatgcagactcaaggttaccattaatagactatatagagagaaaggagatggaacttggaggtagccgtagtcctggacggggagccaggagccctgcagctccaggatcagtcattaaccacgaccctttggacaggcagcccaggtcttatctgcacacccggcagagtgagacccagacacgggagaggaagcgagaggcccaggccaagctgaagtccgaggctcagtcgccctccggaaacctacttccacccacttcctgtgttccgagggactggcttcccacgtccgcgacctggctctggcctcggagaagaacatcgcgactacaacaaccgagccccagcaacccaaccagctaccaccgctttcccagcctggctggcagcctaccgcggccacgcccaccgcggctcaggaagccgaacttcaccgcgcaactccgacgtctcctcccattggacaacctgccagccactcgcgttaatcccgcagggctattggccagagtctttgtttaattacgtttccttggagccgccctggcagtgaggcgcccaggcctgcccccagcacttggctccaccccctgactgtcccttaactcgttgagcgcggctggaaatccaagcgcttctaggtgctggttcaatgcctggttcatgatttatttcattctctccctccatcttgcaataggttacttttaatcatttagatctatgacactatgctaaacgttataggagacaaaaagactgtgaacaaacaagaagaaccaaacgaaaagagccaagtccaggattctcgttcagatcagcaagtcattgggatcgagctcctagggcagctactacatctgttatgtcctcaagataatcccagcacctagcactgtgcctggcacaaagtagatcttcaatgaaagaacgaaacgagccgttatatttacacagatgtatttcactcagtcctctggaagagatgcctagtgtgaaagagattccaagaataaataccataaacagcaccgagcccaaatcccacagcaaacatccttattaaaggcaaggaacgtggggcgagttccttttctcagaagattttacgagaacgcaactgttgcgaagaaggaacagacattcgaggttctgagtccaatgggaactcatttaactttttattttgcagcagatttcaaagtctgcacccagcccctcccaggacacaggtctccttgcagctgcctttaacctaagcgtatcctctctccactttaaaccaaacgccgctgcatggagccctgggagcctgagccatgagaatcctgtaaagagggtgagtcttgctattagttaactagagcgaagttaggggacgcctttctggttctcctctcgttttaagaagtctccaggaagtaagccaagagctaggagagaccaggtttccccagccccgtcctgggtaaacacccggcgggctttaggacccagcggtgggctctccggaaggggaaggggccgggcctcgaggcacaagccgctgccgccagggtttgaactgcgcgcatgcgcggcggccgccgaaggggcgggatccgaggcaagcgttggttctgtgcgcctcaggtacgtgttgggcggcagtgggcgcggactcggtgcggtctctcgcgggctgcggtcgggcccgggatcctgctcctggccgagtcgcggtgcgcgggctgctggggtccggcagggctggaggcggaccgcgaggaagcggcgcggccgggaagatggggcagggtcgcctcggccccggggcctcggtttcctccgatcacagcgcctcagggggcgcgcacgggcgctgcggagacctgtgtcctgccggggcgcggcgctaggggcccctgctcgggtttttattcccagacctaagcttacaggtgcgtggtcccagaaagtgagtaggaaagcgcccaccacgtgccaggcgcttaagctttctgtgctcggtttcccagtataggaggacggtcacggtacgtagtatagagttgtcctgagggtgaagcgagtttacacttggtgaggcgcttcgaatcgtgcctggccggccccaaatgagcacgcagtaaggttagcagctgctgccgtcacttcctcacgttctgaatctgctccgtccccaacgccttcagcaagagccctctcacttcctttgtcttcaacccattctccgcagagttggagcacacagctgtattaaaaaggcaaatcgaaggccgggcgcggtgactcacgcctgtcatcctagcactttgggaggccgaggcggctgaatcacttgaggttaggagtttgagatcagcccgggcaacatggtgaaaccccgtctctacaaaaatagaaaaattagccgagcgtgatggtggatgcctgtaat

SEQ ID NO: 1241283 - DNA, 4001 bp, Homo sapiens
ggcagcccctcatagctgagccactctgaacccacctgagctgttcatgcaacctacttgggtcaagagaatatattaatacttattgtgcatcacaacttcacagtaagtatgttctgttgacacaaatagggcggagaggcatgacatcacagggtccctggctttgctgggctttcaatctgacagaaaggcacagtccactcatgaggagaacagctgggccctaattaactgccaagctgtctggtctaatgagagtgagggatggcattccaggctgagctctgagtgcttcctttgcttgatggtggcagctcaatttcttgaatctggacaatatcttgactctgactaattccagcttaacaagaagggtgttgtctctcgaatgaatgtaacaggaaagcagaaaagcataaagacaggggtgagcaggaaacttgccctactcaagcaggaggttcatggaggctcagctcaactctcattattggtgaattggtgcaatcttttctggagagcaaatatctaacaaaattttaaacgtacatattccatgacctagcagttatacttctaggaacttattccacagatatacagccacaaggacataaatgtgtgtatcattgcagcaatgttggcagaaaaaaaaaaaaaaccccacctatataaccccagacaggaacctggctaaaaagaatatgcaaccatattttaaaatgcagtagtggtgtgtgcttttaggttgatatattgttaaatgagaaaagcaagttaaagtaggcacaatatttacccatttatgttttcaataaaagactatgcatatgtatgtcatggatagaaaatttcagaattacacaaaaaaactgttaatggtaatcccctaggagtgggaccctctggtaggcggcgagcggattttatgctcaactttatacctttctgcactgttttaattttttgaccgtggatgtattttataaacaaagcaacaaaagtaaaacgagaaagagactatgtcatgtcctatgtaaatttctcctgttaccaacactcccctctcagtcttccctcttggcacctctctagcatcttgtatttatagtagttattagcagcctggtggtgagataggcttgtgtagactccagtggaaaagatttctacttcatctctgggctgaggtgttaagaggaagctaaaattcagcactggacacatctctgaaattgcttataaagcaatttataaacatcctaagctagccctgtgaacttttcttaggatccattcacctttgatcgtctaccccatccccaaatatataagaaagctctaccttggagggcttgtacccaaacagcattacaacagcagttttaaagtcctctctgctgagatatcctttgtgatcttcatcacatgctttaaatacctgaagaacattaaatagctttagttaatgagacagaaatggtttatttttattactagtttattatacagtttggacctcgaaaatctaaaacttggcccagcggtagagtatgaaaatagaatttcattatcccaatattaattctcaagaaatcttaaagatggactgaaattttcttaaacatgggctgaaatttccctcaaagtgcaaacgagttaaccgctaggtgacgcaaattaattcatttaggccactgagataaattctacccaaaattcagtcctggagttaggaaggtgaggcaaaggggctggctttgaaaggcgggagagatgcagactcaaggttaccattaatagactatatagagagaaaggagatggaacttggaggtagccgtagtcctggacggggagccaggagccctgcagctccaggatcagtcattaaccacgaccctttggacaggcagcccaggtcttatctgcacacccggcagagtgagacccagacacgggagaggaagcgagaggcccaggccaagctgaagtccgaggctcagtcgccctccggaaacctacttccacccacttcctgtgttccgagggactggcttcccacgtccgcgacctggctctggcctcggagaagaacatcgcgactacaacaaccgagccccagcaacccaaccagctaccaccgctttcccagcctggctggcagcctaccgcggccacgcccaccgcggctcaggaagccgaacttcaccgcgcaactccgacgtctcctcccattggacaacctgccagccactcgcgttaatcccgcagggctattggccagagtctttgtttaattacgtttccttggagccgccctggcagtgaggcgcccaggcctgcccccagcacttggctccaccccctgactgtcccttaactcgttgagcgcggctggaaatccaagcgcttctaggtgctggttcaatgcctggttcatgatttatttcattctctccctccatcttgcaataggttacttttaatcatttagatctatgacactatgctaaacgttataggagacaaaaagactgtgaacaaacaagaagaaccaaacgaaaagagccaagtccaggattctcgttcagatcagcaagtcattgggatcgagctcctagggcagctactacatctgttatgtcctcaagataatcccagcacctagcactgtgcctggcacaaagtagatcttcaatgaaagaacgaaacgagccgttatatttacacagatgtatttcactcagtcctctggaagagatgcctagtgtgaaagagattccaagaataaataccataaacagcaccgagcccaaatcccacagcaaacatccttattaaaggcaaggaacgtggggcgagttccttttctcagaagattttacgagaacgcaactgttgcgaagaaggaacagacattcgaggttctgagtccaatgggaactcatttaactttttattttgcagcagatttcaaagtctgcacccagcccctcccaggacacaggtctccttgcagctgcctttaacctaagcgtatcctctctccactttaaaccaaacgccgctgcatggagccctgggagcctgagccatgagaatcctgtaaagagggtgagtcttgctattagttaactagagcgaagttaggggacgcctttctggttctcctctcgttttaagaagtctccaggaagtaagccaagagctaggagagaccaggtttccccagccccgtcctgggtaaacacccggcgggctttaggacccagcggtgggctctccggaaggggaaggggccgggcctcgaggcacaagccgctgccgccagggtttgaactgcgcgcatgcgcggcggccgccgaaggggcgggatccgaggcaagcgttggttctgtgcgcctcaggtacgtgttgggcggcagtgggcgcggactcggtgcggtctctcgcgggctgcggtcgggcccgggatcctgctcctggccgagtcgcggtgcgcgggctgctggggtccggcagggctggaggcggaccgcgaggaagcggcgcggccgggaagatggggcagggtcgcctcggccccggggcctcggtttcctccgatcacagcgcctcagggggcgcgcacgggcgctgcggagacctgtgtcctgccggggcgcggcgctaggggcccctgctcgggtttttattcccagacctaagcttacaggtgcgtggtcccagaaagtgagtaggaaagcgcccaccacgtgccaggcgcttaagctttctgtgctcggtttcccagtataggaggacggtcacggtacgtagtatagagttgtcctgagggtgaagcgagtttacacttggtgaggcgcttcgaatcgtgcctggccggccccaaatgagcacgcagtaaggttagcagctgctgccgtcacttcctcacgttctgaatctgctccgtccccaacgccttcagcaagagccctctcacttcctttgtc

SEQ ID NO: 1241284 - DNA, 4001 bp, Homo sapiens
tgaggaactaaaaggaatttggggccaggtgcggtggctcatgcctgtaatctcagcactttgggaggctgaggcggatggattgtttgagcccaggagtttgagaccagcctgggcaacatggcgaaaccctgcctctacaaaaaatacaaaaagctgatgtggtggtgcgtgcttgtagtcccagctactcaagaggctgaggtaggtggatcacctgagcccaggaggtcgaggctgcattgagccgtgattgtgccactgcactccagcctgggtgacagggtgagaccttgtctcaaaaaaaaaaaaaaaatggagtttggtctgagaaagaaccaaacttgaacctgtcctcaaagggtatgggaggacattgggtggctctgtgcttctctttccagtctctctccgagagtccccactgagaagggaacagaaagcaggtgacggcctcgcttccctgggaatcttaggcaggacctagaagagggtggaaagggaacaaagctgcctggattcagactgcatagactgtagaacagaaagcagaggtggggctgtagagcgctcctcccggtgttaggactgagttctgtccaatggagccaagcctctgggccctgccattgcaggacagagttgttgatggactgattgatgatgggtgtgaccactcctgctctatcccccagcagcccagctgactggtgagggaatggccagcctaatgtaggtggcagagagcctctgtgctctctgggaggcctcctcccactgtcccatcatgccagctgtctcctccctttgtcccgatccctggaaagtggcctgaggctctggctgacatcacctcccctcctccctctgtcttctctttcttgatctccctcctttgctctatctcccttttttccttatccctcgtctcgagatgggcctcctggggtcgttcagcctctcgttttccgttttccgtgagccactaggtcctttcagccccctccaaaccttttacttgcctcccaaccacaagcctctgccaaccaccagtggccatctgttcccgcccaaaaggagcagataggactcgggctacgcttgccccttcccctccattcaggcgcagcctctaggaagaaaaaggagaatggggagggggcggggaagaggggcgagcccggagccaggaggagcaggggatgaggagtgagagggagaagggaaacaaaagtgagaggagggggacacagcctcctggagaagaaagggaccaaggagagagacaaagagagggcagaaataaagtgacaggagcgcagggcaggccgtggaggtctctccccggcagcctccactccctggtggactcaccgacgtggcaatggccatggctttggcctcccgcgcagcctgcctcaggccaggctcggttttgctgacttcagcggtggctgccccgcaccatggtccgcggcctctagcccccagctgtggcgcctgagtcgtggcctccgccaaggttggaggaggagaaagaaaacccacaaaacttcccaaatgagaggcaggctagccaggcaggaggaggagcggggcgggccggggcgtcgctgcgggacggcatccaagggcgcgcgctgcgtgctgtccccgcggcctcccgggcgccaccggctcggccaggccccgggagctgcccgccctaggccgcgggggcgccccgggctcgcaggatccgaaaattcccttcccgggccggggcgggtgagcaggcgggcgctgggctgcgctcgacgcctctccaggccgctcaggagagcctcgagggctgggagaagccgccggggcggttgggctggacgagcgagtttaggggccaaccgtctccacccgccggccgcgctgcagagcggtgctcccagggctggggtctgcggcgaccccgctgggaggaagggagagcgagaactgagacgcttgccccaagttgcctggagccaaaggcccccgagagcgtggccgtggggctgggtcgctggagtggccgcttcggcccagacactcgcacccccggcggtgcggcggttttcacgcgcgcactcactcagcgcgcccgggggtctgaggtcgccgctacggcgcctcgccccgggcagcagcaaccagcacgcaggcacccctggaacaggcgggactgccttcccgacgcgcggcctgcgcccaggcggcggaggggcccagcccccttccagtcctcggctccagggcgcagggccacgagctcccgctcccaccctcggcccctggcacccggcgccggctccgccgccctctctcacacgcacccttggcagggccccgcggggcgccccaaagcttgggggcagctcccaggtgtctctgggaagggaaagaaaggccacaaagcaaaagaaggagcaaagagaaggcgagggaggagcaggggcccgggtcctgtggactcgcctgggctgggagtggggacactgagagggctgcgaaggctccgggggtcgcgcgtggcccgcaggctcacccctggcccgcggctgcccttccctccccttcctgggctcctggcccctctcagtgctgttcctttctcctcccctcaggccctctcctctcccgcgcagggctccgtcctggggattaagagaaaggagggaggggaaaggggaggggaagggaaggggcggaggagaaagagggacgatccttccaaaggcgggtgttgagtttcagctcaggaccctcgggtccaactgcctgtggtaccccccacaccccccacccccgtcccgccctggccctgccccagtccccggcgccttcctcctccggactccgctgcatgcctcgcttgcggtggtccgatcggctttctccgggagctttcctctccccgccacgcccccgtctccccggccgtccccgcgcctctcggcctccctttcattagccccacatctgtctttcccatgggagggagcgcgcgccttccgcccagcggggcccttagcagagcctctccaatcctcggcgcctcccctacacagggttcgctgggccgttcttgcggggcacaggaggggagtctggcgctggacatggattctggccctagtgacaacatgaagcagggcgtctggccccagaactgcaggcgggcaggttgtgcggcctcttacactcctctgccagtctgggcctgtcggcctcctcagcctggctcactcttgctgctatgaggagaggattgggcaggaccgctggcacaaaagttgctagaactcttccagaggagatgggatctagccccaccaggagtttccactgaaaggatggtgctcctagccccctacagctcctctgccctgggataactccttagtgtgtgctgcttccctggaccttccctctgggacacacacatcagggcctctcaggcttgagtgaagcctgccttcttccatttttgaggttcctggtatttaaaaagcaagatgacaaacaggattgaaagctgtggtatattttggatgtttacattgaacaaattaacgcttcaaacacatacaatagagaatgactctgtgcataaccttatttggagacaagatcagaaatgtaatataaggcccttggtgaacttgaggccctggacagataaccttgcctcaatattccacaggcccacacatctaggcatttcctaggagagtgtggtcaggacacctgccccagctccttccccactgtattacctgggcacctgtgaagaaacctctgctggaagggtgtggtggagcctatggggtggaatagggagagattctgggataaacatggggatggggataaactgtgttggctctaggctggctctccatgatggaagactcctgaatagattccaactccactgggatggtagaggaacttttaaatttccagggagagctcctgcttcccag

SEQ ID NO: 1241285 - DNA, 4001 bp, Homo sapiens
gaaagcagtatcttctaagatttactttacttgggtgcattaataacgatgctttcagatattctattcatggcctcttggcttggaagttgtacggcaaactgtgactccccactgcactcatccacctccaccccttcactcccacacgtttccaatcctcaccacttagcctttattcagagtgttcctctcagcgtattagagaaatgagagaacaatggtctgttctgagacaggatcagtcttgagactgatttgagaaatactatatttattgtcaaagagtggtacataggtgagtgttcatcttccctctcatgccggtatactctgcttcgctgtttcagtaaaagttttccgtagttctgaacgtcccttgaccacaccataagacaagcgcaagtcactcagaattgccactggaaaactggctcaactatcatttgaggaaagactgagaaagcctatcccaaagtaatggacatgcaccaacatcgcggtacctacatgttcccgtttttctgccaatctacctgtgtttccaagataaattaccacccagggagtcacttcctgctatgtgaacaaaaacccggtttctttctggaggtgcttgactactctctcgtgagcacttaactggttgttttgagtggactttgccatcaattcatagttaggaaaaggaaggtggtggtgcagggctcagcatcaggagagaattttcagtcaagaagatggtctaacaatgtgctgggtcccagggggcagaagcagcattcagaagtggagttttaccctttcacacctgcccaactccacaaaccaactgccacatggcaaaatcacaactgcctccagaattctgagtgcttttgtagaaatctcttctgaccacaatgaagggcagtattaggtggctttaaagtaggcatttaagatcatgaggacacgtgtgtctcagatgatacacagtgtttccaataccctttccctcctttggatctttgagaacctcgtcttaaaatcggaccacagccacagcttgtctggcttttgtcacccacaagagccaatatttcaaagtcaacagaaggtcatcatcatggttcacctgagccccttaacgttgactttcgctcagaggagctggggcgaggggtggggggaagcagcgagtagagacaaaccaggctgacttcttggttaaaaaacaaagttcgcttacggccctgggaagtcgacatacaacggactccgagtgcctcccgtccccgcgggagcagctgcggcagggcgccgagcgcgtcctaccttagacctctccttgacgtagtatttgcccagccggctcccgcagtagaggaccagcctgtcgatgagggacaggaggaagctgatggcctcgcagccctcctcgttgcccccgatccacgtgatctggtcgccccgcaggtgtcgcttggagacgccggcgcgcggccccgccagctggccgtcccgcagggccccggtgcagtgcagctgcttgacgcgctccaggacgcagtcgcccaccacctcgcccaggaagttgtccaggtagcagaagcccacctcgtgcagacagggcacgatgtactccagggcaattttctccaggtccagcctcatgatgtgtcccaggggcatctcgcccgcagaatcgaggtccgggatccccagcgtgcaaccagagagggaacgatctacacgagcgcgaagccgaggcgcggggagcgtggcccggggttcagaaacctgcggctgccacggtacccgagccgctgcagcgtcggggacaagggaaagtttctcgcaactctcgggagaagggatctgccttcgggaaccagcgggagtggtgcggagctccacgacccgtttccggactggcccggcgagcagtgcggcgcaaggagtcggagggcgccttttggggatgggaagccaccactgccgcgactgcggccagactccgggagacgctgaggtccggcccttaagccggccgactccgcgcgtcacgggctccgccccgggaccgcctccgggaccgccctttcccccgccccgctgccagtcacccccgcctgctctgcccctccgcgaaggatcccagagagcccggcgccaaccttagttgtttgtgaccaggggagcggctggaaagcagactgaatttttagaatgcgctggatttgcatattgttttgcataaaatcacataacaaacttgaaaacctggatcccacactgaaaatgtaaatagaattaactgccacattctgggttggtcacctcatagacttttgagcaaaataataaccccaaaaacgaatatatttattaagcagtggtcttgttctacctttaccgggtgtctttccttatttaccccattcctctgctgtttgacccagttcaagccactgagagattaggaggtatctagttttaactaaaattaatgcattaacgaatatttccctcagcccctactgtgtgcaaggcactatgtgcttgaggagctggggatgagcacaatgaagaaatgctgagtcatatctgattgaactctgcaaatggtgtattttgctttgcttgatgttttcctctacttacctttcaagcttcctattaaaatatgatgttccgaaattctaccttccaaattaatcacatgcttctgtaacagtcagaggtatgtcccccaaaagatacactgtattctaggtctctcacttttcccacaagcagctgtactttcacaagagggacagacaccactgagaagactttggttatctacagataagctgatttgctttatggagttttgattccctttcctactgaacaccagcgatcagaatcaggaaaaaattcataaattgcatgcaaagctatttgtacttctttaaaaaaaaaaaaaaaggaactgtattttttttatttatttattctgagacggagttttgctcttgttgcctgggctggagtgcagtggtgtgatctctgctcaccacaacctccgcatcccaggttcaagcaattctcctgcctcaggctcccaagtagctgggattacaggcgcccgccaccatgcctggctaattttgtatttttagtagaggtgaggtttctccacattggtcagactggtctcgaactcccgacctcaggtgatccgcccgcctcgccctcccaaagtgctcggattacaggcgtgagccaccgtgcccggcctatttgcaccttttttacttcatatgagtgcacacttgggttcttcatttaagttgaagaaaagaatgtacaggtttttcgggtattgtttattgtggaagcaaatttctacagctttttcacttttcttcttcctccagcagccctctcctctctgcctctgaggggagaaagggaatgacatccaggacaagaacaaagaatagaagaggaaaggtgctgctacaagttggaaagaagcagacagaggcacgtggttgagtaagaacctgggggatggtgaaggagagcagtcaatggtggagtgcttaagaaactttgatgaaacttctagttatattgagagaggttctctgccaagtcagtgattagttggcacctttggtattacctttgagcaggaggtacccctccttggggtaaaggccatcactgctcaaagagctcttgtctaaattcccaaggcagctccatgatgagaggagaccatcatccttggaaccccagtgtttagcacatagtgaatggctaataaatagttactgggaactcaatgtctgaccctgagccatagcagcctccacttgggattcagtatgtctgggcttatctggaaggatctatttgcaaaaggggctggggagcctccccaaagagaagtcactggaaaagagtcaagcaaattagcctgacccagcacaaaagcttagaggccagtggagggagaactt

SEQ ID NO: 1241286 - DNA, 4001 bp, Homo sapiens
tctccttacctggcagaaaggagcacactctgctacaatgacatggaatttcctctttcgggcagcctctttgaggaaggcctctactgttcgggagaagccaatggtcatgatcacctcattggagtgaatgtgctccagagcctgggctgcaatgttctccattgtcccttctgtaagaacggttttgcaaaaaaaaaaaaaaaaaaaaaaaaaaaaatatatatatatatatatatatatgaaattgctatatcacaaacacacattacgcgtatacggaaaaagatgtctgcccttcacatgcactgcccacctagcagaccctggtaccacagggttaatgtgcttaaagtgaaatgtcacaatttctttttttttaatagagacagggtcccactatgttgcccaggctggttttgaactcctggtctcaagcaatccactcaccttggcctcccaaagttgtgggattacaggtgtgagccaccatgcccagctatgtcacaatttcttaaaagccccactcctctgggattttctgcctgccctcttccagaagtacccctacctatgaaccacctctgtcactacagagctccttacaactgattttgaagacagtagattcagccaaggaatggcaatctgggaaatcctaaagtgctgagaatagggtaaagagagcttcggcctaaaagaagtcttcctccaaaaggtggccacaacacttctacatgagagagactggccagagaagaaaaaatgggggagcaatttggaagcagcttcttcatcctctgattacaatgaatatctgcaagtcacttggaccgcaatgacaagggggatagaaatggtatacgtgtacgtgtgtataaaaattcagatagtgaaggaggtctatcgaccttggctctctagggagttcattttgtttctttacaatgaaaataaaactctgtcctaatagagtctgttccactccacagatctgtagtctatcaagggttggtctgtaaggaaaagtagagaggattactttggtcctgtcacctgttgcaacatttcctaatcaggaaggaggacaaacctctgagaaccagaagacagctaatctcccatctctgctaatgaacaaccttcagaggcttctgttcccttatgtgcctgtgaccagtcccattttcccagcgatcaggcctcttacccagctccactagcagctcattaatcgcctcaatgatgttggactggagttgggcataatggaagctgaaatcctcgtttaggcctccggatgtcaacagtttgtgcagggactcctgctgatcactctcgtcgctgcgtccatggagtctatagaggcaacaagacccaaagagagaggtggggaggagtggtcaggcaggtaacaagggctgttcagctccaataaagtctccgagcaggtagaggggcccgtgcaaaaagtgtcactggatccaaccaggagcccaggacgtgagcctgacctgccatactcctcccggataatcttgagcactctccgcaccatgttgcccacggtggtctcggagggctgagcggccgtcatcctcctgccctctctgcggatcagctccatcagctcccctacagtccaaaagagagaggataagaggagccaacgcgaagtgaggcctgggaaattttcagccctgggatcgggaacagacaggggccaggttcgccggcggaggcaggccggcctcacccgcgttgctccagcggtggtccgtgatgatctggcgcagcaaccctagggtctcccgagccatttcctcggagctgcgcggcccaccaccccgcttcagggtctccacgaagctctcgatcctctctgacaactccgagcccttcgctgcggatcccggcatctttaaggtagctgccttcagccttcaccggcggaatccacacctgccagaccacacagtttgcacttccggggcgggcgaggtcggcttccgctgtgaggggatggggggaaacctcaagtttgagtggaagccggctacgcccttcgttgccgatctcccgcccccttcctctgcctgagccaatcagagacgtggggctcgggttgttcagttataaccgggcgtccgcgcgcccccgcgcctcgggggctggaggatcggaagcggcctttcttggctcagccgacggtgaacggaagtaacccgtcaggcctgtagagggtggctggtcccgttgctatgggagcagcaagtctctacgcgcccctcaccgcgacttaaggctacactgaagaagttgcggcactccctcctgtcttcccagctcggtgactgcccgagctgtcactcccgagtgtcagctgacactgacgctctgaatgcatgtccagggtcggctgccccttgggcagacgtctcacttttgttctgttacattgcttggtaccgtttgcgcctgtgtctaggaggttcatgtctctgaaaacaaggacgatatcttttgttgcttttgtattctcaaggcctaacacgtctaacagaagacggcgaaattagagatgaggaagattaaggagattcaaagtgggagccaatacagaagcaaagatgacatcctctgatttggacagaattgtcctcctacagagaggccagagagtataacataataccaagagttaccatttacttaaagcttactggttcttgggcactgtgtgtgaattgtctcagttaataaggtctgaaataggtcctcttatccccattttacagattgggaaacagacccacagaatttaagcagttaataaaggattgggttcatacttaaatccaggtctacctgaacccaaagtatgtgtgtaatagaaatctctatttccttaagataaattcttcaaagtggaatccataggcgagcacattttagacttttgttacaattaacaaattgccctccaaaaagattatgtcaataccaaagttagccaaaggtagtacaaagaaaagaaaattacagattaatatctctcatgaacatagaagcaaaaattgcaacaaattattagcacatcaaatcctgcaatacataaaaaaagaataatatgtaattacaaagtgaaacataaacctggaatgcaaagctgattaaacacttaaaaatcaatgtaatatgccatattaacaatctgagaagtaaaaccacatgatcatgtcaattgatgcaggaagaaacatttgacaaaattcaatattcatggtacaaactctcagaaaactagaacaaaagggaacttcctgaactcgataaagggtatctacaaaatcctacacctaaaaatcatacttcacagtaaaagattgctttctccctaagatcaggacaaggcaaggatgtctactttcaccactcctatttaaattatacgtgaagtcctagcccttgcaataaggcaagaaaaagaaaaagcatacagaatggaaagaaactgtccctgttcacagaagacatgatagtgtacacagaaaatcccagagtcaacagcaacaaaaacaaaacctcctagaacataagtttagcaaggatacaaaaactatatttctatgtattagcaatgagcatcagaaattgaagttgaaaatacagttgctctaaaaagccataaaatatgtgtcaattttgctgtgttttagtttttatttattgatttgtttgtttattttgagacagggtctcacactgttgcccaggctggagtgcagtggcatgctcactgctcactgcagcctcaacctcccctggctcaaataatcctcccacctcagccttttgagtagctgggactacaggcacacaccaccatgcctggctaattgtgtgttaatttttaaatgtctttaaaattgtatcaatttacatgctggctagcatttaccatattatagccaattttggatattgtcgttattttttca

SEQ ID NO: 1241287 - DNA, 4001 bp, Homo sapiens
ccaggcgcagtggctcacacctgtaatcccagcactttgggaggccgaggcgggtggatcacttgaaaccaggagttcgaggccagcctggtcaacatggtgaaaccccatttctactaaaaataccaaaattagctgggtgtggtggcaggcacctgtaatcccactactatagtggctgaggcaggagaatcccttgaacccaggggcagaggctacagtgagctgagatcgtgccactacactccagcctgggcaacagagactctgtctcaaaaaaaaaaagaaaaaagaaaaaagaaaaaaaaaaaagactcttacctaagtaattaagtatagagtgggaaacaaactagcaagcaaataattacaatacaaagtactatgaaagggcacagtgaagcaatgaacaggaaaggtggaacagaaatactaaattataatacttccttaagaacaaatgcttaataagtactagcgtaggagctaaactcaagtaatccgacatcaaatccagaatgtctttaacccacagaacctcaatatcacaacatgctataatactcttatgtgttctgatgtaaaaagtatcagccacctttcaaaatatatcaaccaaactccaggctaatttcaaataccctgcatagtcagttattttgcatgacaaatggtaggtaggacttctttctcaaaacagtgcatggtcaaactgctataatggatatagaagttcacattcctttccaaaatatattatgtgatggggacaactctcgtgataattctaatttggatctaacacgtattaggaatgctctctgaatgctagttcttggtataggagtgctacataagtaaagcttttatttcatcattatagttgaaaaagaaagttatcaccgaatctctacaaacattactgtgcatgagacaactacatcttttggcaccagatgaactaagaataggtagcaaagttctgtacaagtcacccccaaactattgacagagattgttccttgaataacaactcaattgaggggaaataaagacttctctgctatactttttctcgaagaaaccatgttttttgcttaataaaaatttaaaaagcctaagttttgaggataaagagacctcagcatgactgtgtatttaacccgaaaatatatccttatcttaggttttagttatgcttaactaacatagttaacctaacatatgcttaacacagttctattctcattgtcgccaaaatacgacaaactgatagtaacagtaataaactcaagtctcatttagttttggttcaaggggtgactcattcaattatcagatgaaaaactactcggaccccgctctttccaacacggtgcccgtcccacaggtttctcaggtaagaggccagtttggtttccactgagacgcaggggaaatttttggtagagctgttggggcggaagaaaagatggaattctcaagcctggaaaaagcaaagtgctcagcgtcctgagccggggttaagagttacggtgtcacagcgttctcctgagaccgccccatcgtcatggcattctcactttcggcatattgtagaggctgtacaatccactcggcccactttccttcacgagattcctctgctcgaacaacgatgcctctggaacacaggatgacctacacggagccggcgaggaggcccacgacagcgcgggtggtggcggtgctgtccagccacttcccgcgcagggacgggaaagggaggtattagcccggggcctacccgctctcgaacacccatgtcactggacacaaaccaaagtgagttcctggagaaaccgagcttgggattagtcacctgaggtatgtgtgtgattcccgcactggagcccagagccgacttcttcaatcacagagaccagacttgcttccccctcaccggccgccgatcctcctcagcgtgcgcttcgctcactccaccgcgcatgcggaacctcctcgcatgcgcaagcgctgaacgaatagaggcccctcttcatcattaaccatagagtctgggtcctccgagaacaaggacgaatgtagatcatggaaggacctgaaaagtactgtttctcgctatcttagctttagctaagtaaccttcaaggcgcgagaaagacataggactccgattccttgcctctgaagaatgaatcctctttcaaagtttcagctaaccatgagatggcgctgtgaccaaagacgaaaggtggagaaagacaaggcgtgcacgcttcgctcctagtctttggcctggcgcgtgccgcgtattgcgcagccgcagggaagctggatggggaggggttgggaggcgaaccggaattgaggggtggttccgcggtgcgcgcgcctcgacatccgggcaacgcctctgttctgtcctcccccttcgtcgcctgtgacaaccggaagcggaagtgaaaatgggtgtccctgctgcctcttagcaacaagaggggtcaagtgacacaaccagctgactcccgtagaggaagacactgtggaggccagttctggagctattgcagcctcggttgcccggccggggacccgagccgaaaagttatcgtcagaatgtcgggcaaagaccgaattgaaatctttccctcgcgaatgtaagtaaaggaatgggataagccgctttcacaggtttaggaacccggagcgcggtcccttcagaccctgggccacagtgagggtccttgtttcctgggaggatcctgagcttttcccaggttcttttcttgagtctagggcgaggcttcctgacggcctcttcgcgcattcctcctgagtgaatcaggctggacgaagcgatcccagccggtaggaaaaggcgcccggccggcgggcttttgtggaggtctgctgtctttattcattaatggattcatccattccacatacccttattgagccgggcactggatttatataactgaaccgtcgccacctctgccctacagagctcacagtttacgtagccagacattcgtctggaaaggccaaggaggttttaataaatgctctgagaagggaagtttactgaggatatagaagaggtccctaagccaaagtggggatggaatcgaatcgccctagcatagccctcggattcgatcttggatccccttactcattttccaagatcccgccaaatgtcacctgctgtgagaggatatccctgtgtttctgaggcactgcttttgctctctcaccgctgcaccttgttcagacctgtgttaataccggtcatcacgctgtaaagtagatatttgtttatgtgtctttctctcccactagactgtgggctctctccaggatgaaagagtgtcttaatccatagaaggtccacaaaaaaatatttcttgaaagaactcatgcttgggaatacgctcagttgtgggctgcctttcttttggggcctgaattctttgtcaggaaaatggcatatcactgtaggtgtttggctagtttgtaaggaaaattttgacgttttctcaaatgtgcctaacaacttgctccctttctcctcctcatcctgtttatttttatttagtttgttgtttgtttgttttaataagagacagggtctcccaggctggggtgcagtggtatgatcagagctcacagcagcctcaaacccctgggctcaagtgatcctccggcctcagcctccctggcggctgagattatagatgggagccaccgcgcctggctttccctttttcttttcagtgaggaagcagaaaatcagttttgaccctgacatttagacccttttattgtggtcctatctctgtgggggtgttttgttgtttttcctcattctgtcctttgagagaatctgaggatgcttaaaataaaagttatattcaaacctgaagcccagatttctttctgcccggtgactaaatagctcttaatgaaatgaagtttttaaattttttaccttc

SEQ ID NO: 1241288 - DNA, 4001 bp, Homo sapiens
cccctgacaaatgcaaacttcaaaattctacaaaaagagctatcaactaaattgaagagcagtttattaccttggcaatcagacggggcatcttgtagcgatagaactggtctgacacgctgcggttgacattgacagacattttggcttattagtggctttatcaataagatgaagagatctttgattgcaactttttggtatcttctgtctggagaagaagggatgacataaacgactgcaagagttctcggtctctgacatgaaaaaattttcgccactgaggctgtaagcttcttgcttgtatgctatgtttccccaatacaggtaccaatggctgcgcaacagctctgaaagaaaaagggaaagaacacacaaaaatccccccaggtttaacatcatcgctggatggaaacgcctcctttttacatcctagttatgcttctgcttaactccaccttaaaaagcatctgagatcacatgcaaacagccattctcatgtaacacagtacaatctgcgggaacataaaaaggcctccatttcgactaagctgtgactggtagggaaatgcctgacaagaaaacacaagctgtgctgcctcagccgccgtgagattccatcagaccgagggcaatcagcaggtttgcctctgcggccatcctggaagtgctgaagaacgaacccgagccctctccgccgcccaccccgcctggataagcaaacttctcaggcacacccccgttcgtcttcatttttaagggcaacctagggaactgttctctacaactaatcgttgcttcggcaaccatggcttacttcaaagcagcacttccttaaacgcagcgctcgcccacaatttgccattaagcaagagagcgcgagcgaacgccaggctcgccccggcctcccttttcctcgctattcaaatactcggttaaccttcgccctggtccccatggctaccgcgctccgaggcgtttccgcgggggctggcgaaccgggcagctccgcgaaggaggggggcgcgcgaccggggcgtctggccccatccccagcgcgtcccccgagagccggcggccccggagggtgcacagccgggaagcgacacacggccgaggggtgccgggatcgggccgcccccgccccagagcgcgcgatgactcacaaatgcagcagctgaagcctgagtcagcccgagcggcgggcacgcgcgacgcgctcccgccatgccggggagggggcgaggccgggccggggagcgcgcggggagggggcggccggcgcccgggcccgcgcccgcccgccgtccgcccaaactgcgccacacgccgcggcggggtcacgcggcggccgccgccatcttgtgcggccgccatctcctggcccgccgcgcccgcgactcaccgttttcgtcaaataaagacataaacccaacgctgctcgcccgggactgggatgaagtgaggcgcgatataaacccgagtccgagtccgaggaggcggaggcgaagcgcagcgaggagcggccgggccaggtgccgccgccgagcagcggggaggggctgtcccagcgacgtccgcggtccacacccgtcagcgccggagctgggcgacctggcgcggagagacggcgccgtgagccgtgggcggtcggggagtgcaccttccccgccagccagcggcccgaggggtcgagggggcgggaagcaccgggcagggggccgccccttcaccggactcacctctggaatgttctcgctctgactgaacaacgccgccgccgcgctcaagctaccctcggccccagcgtccgccccccgcgtcaggcctcactgcccattggctggaggcctgccacagctcgctcgtcattggttcgcttgcgacgtcaatcgcatctttccgcgccccttctgcttcctgaggctcaactcgcggcctcggcccgcctccagccccggtctcgcttccttcctctcccctccccccgcctttcccagaggtcttcgcggcgcagcccttgggtctcgcgagacccggagtggccctggtggcggggccggggtaccgggggccgttctttgtcggtttgggccttgagggggagatggtggttggtcccctccctcgccgggtctgggacaggccgcggcgtcatggcgactcccgggacgcaggagccatcgtcctcgaaactgctttcgaggccgtgtttttgcggctgccaccttcggggagaggaacccgaccgcgttctccccgcagcgggcgctcatctccctttcccgttctcccgggacgcccgactccgggcctcgaggaatgagttgtttttccaccttaagccccaggcctgggtctttcatcccagggacgtcttctgtttcggactcggggtggattggccgctggcggaacgagtccgtgactcgccagtgaccgcccagggcggtcgcgaggccgcgccgcctcggtgtcggcccgcaacccagcctgcgcgcttagctcagcgcgtcgcctcccgttttcggaagaggaggcccttaattggtttggaatcctggggcctcctgaaggcgcttcgtggtgggttcccaccttctggtgaaggcctccctgctctcccagggttgaaaagcgctatccttcgtgcttctcttgtcacctttctcctagtgggcatcacgtcgagtccaccccctctagtttatgacttgtgaattctttgataagcaaatcgtagcccagagcaggcatttataatgagattccaatgtattccgttgaaaattactattatttaggccggtcgcggtggctcacgtctgtaatcccagcactttgggaggctgaggtgggcggatcacctgaggtcgggaatttgagaccagcctggccaatatggtggaaccctgtctctactaaaaatacaaaaaattagctgggcgtggtggctcgcttgtaatcccagctactcgggaggctgaggcaggagaatccttgaacccgggaggcacaggttacagtgagccgagatcacaccactgcactccagcctggacaacagagcgagactgtctccaaaaaaaaaaaaaaagaaaatttttattatttagagagaggctctcatattttagttctgttgaaactctcccattctttctgaaacttggattttttttgtgaaaacttgagtcttaaaaacacatccatagttcaccctgaagtttgaagacctcacttgactgatggagcgagagccccgctaacctgcactctggtctctaaggtgcagtcatcgagaagtcctgagcggccgtgcaggtttcccgatctggaaaagagaaatgttgctgaggacaggatgaggtagataaggggctgccctttgttttggaccagttgcatttgcactgaggttagaattggcagctatgttgatttttatatcaaaatccaagatcgtgcttccataactaaaagctttataaacaacttaaaaattggcagtgttggtaggaagaaataaaggcacaatccagaattgagaggtgatttgtgtcctttagggcagggacttttataatcccgcagtgtgtaccttggtgtatagttgttaagccaagtgcacagtgccttgtgagtaccagggttcccatcagacaaactagaaaaggggatcccagacatgctgctgctgtttcactgtggagcatgacttagcagtattgaaacagatctgactttttgcttggcagcacaaaaatgatgttattttagaaactctgttggaaagtataggcatgaaactagtctgaggtgagaggcctgccttttcagaaaagttttaatgaaacacgaagtaattagcttttttgtatgtttagtggcacaatttttaatttcgttgaagtttgtaataattttaactgctttttaatatgtgtaccactcatttgtatgcaaccatggacaacttaaaaaaatacttttgtgttctt

SEQ ID NO: 1241289 - DNA, 4001 bp, Homo sapiens
aaaagcacttaccaaatctgtttcaggattctcacattcaggacagagaacaaattttttaatgaatccatccaacatgtcttgcagcttattcgcctcatgagatccattgacaatgtaacggtcattcttaacatcaaactgggtctgtgctcccagctcacaaccaaaatatttggtgggatctatttgaatgaaaaaggagtttggatcgttacagttaactagatctctggctactcactcacatttgtacgaacaccactttttttttttttttgagacaagagtctcactctgtcacccaggctggagtgcaacggcgtggtctcagctcactgcaacctccgtttccggggttcaagcgattctcccccttcagcctcccaagtagctgggactacaagcgcatgccaccacgcctggctaatttttgtattagtagtagactcaggatttcactatgttggctaggctggtctagaactcctgacctcgcgatccgcttgcctcagccttccaaagtgctgggggttacaggtgtgagccaacgcgcccagccatccactctttaaatgcgttcccctggtagttttgtaaactcatggcaaccaataaaccacggttcctcacttaacttgtaaggtaattagctagcatacaattagaacaagttttgcagctcaaagactttgaagactctatccataatatgccctgtggacttttccaagctttacttacacgttggaggccgattaagcgcctttgcaacgtcaaccatgttgactataactgtcttgattccattgcctttgccctcaacctaaaggaaataagaattttagttgtgcagtttcccctgacaaatgcaaacttcaaaattctacaaaaagagctatcaactaaattgaagagcagtttattaccttggcaatcagacggggcatcttgtagcgatagaactggtctgacacgctgcggttgacattgacagacattttggcttattagtggctttatcaataagatgaagagatctttgattgcaactttttggtatcttctgtctggagaagaagggatgacataaacgactgcaagagttctcggtctctgacatgaaaaaattttcgccactgaggctgtaagcttcttgcttgtatgctatgtttccccaatacaggtaccaatggctgcgcaacagctctgaaagaaaaagggaaagaacacacaaaaatccccccaggtttaacatcatcgctggatggaaacgcctcctttttacatcctagttatgcttctgcttaactccaccttaaaaagcatctgagatcacatgcaaacagccattctcatgtaacacagtacaatctgcgggaacataaaaaggcctccatttcgactaagctgtgactggtagggaaatgcctgacaagaaaacacaagctgtgctgcctcagccgccgtgagattccatcagaccgagggcaatcagcaggtttgcctctgcggccatcctggaagtgctgaagaacgaacccgagccctctccgccgcccaccccgcctggataagcaaacttctcaggcacacccccgttcgtcttcatttttaagggcaacctagggaactgttctctacaactaatcgttgcttcggcaaccatggcttacttcaaagcagcacttccttaaacgcagcgctcgcccacaatttgccattaagcaagagagcgcgagcgaacgccaggctcgccccggcctcccttttcctcgctattcaaatactcggttaaccttcgccctggtccccatggctaccgcgctccgaggcgtttccgcgggggctggcgaaccgggcagctccgcgaaggaggggggcgcgcgaccggggcgtctggccccatccccagcgcgtcccccgagagccggcggccccggagggtgcacagccgggaagcgacacacggccgaggggtgccgggatcgggccgcccccgccccagagcgcgcgatgactcacaaatgcagcagctgaagcctgagtcagcccgagcggcgggcacgcgcgacgcgctcccgccatgccggggagggggcgaggccgggccggggagcgcgcggggagggggcggccggcgcccgggcccgcgcccgcccgccgtccgcccaaactgcgccacacgccgcggcggggtcacgcggcggccgccgccatcttgtgcggccgccatctcctggcccgccgcgcccgcgactcaccgttttcgtcaaataaagacataaacccaacgctgctcgcccgggactgggatgaagtgaggcgcgatataaacccgagtccgagtccgaggaggcggaggcgaagcgcagcgaggagcggccgggccaggtgccgccgccgagcagcggggaggggctgtcccagcgacgtccgcggtccacacccgtcagcgccggagctgggcgacctggcgcggagagacggcgccgtgagccgtgggcggtcggggagtgcaccttccccgccagccagcggcccgaggggtcgagggggcgggaagcaccgggcagggggccgccccttcaccggactcacctctggaatgttctcgctctgactgaacaacgccgccgccgcgctcaagctaccctcggccccagcgtccgccccccgcgtcaggcctcactgcccattggctggaggcctgccacagctcgctcgtcattggttcgcttgcgacgtcaatcgcatctttccgcgccccttctgcttcctgaggctcaactcgcggcctcggcccgcctccagccccggtctcgcttccttcctctcccctccccccgcctttcccagaggtcttcgcggcgcagcccttgggtctcgcgagacccggagtggccctggtggcggggccggggtaccgggggccgttctttgtcggtttgggccttgagggggagatggtggttggtcccctccctcgccgggtctgggacaggccgcggcgtcatggcgactcccgggacgcaggagccatcgtcctcgaaactgctttcgaggccgtgtttttgcggctgccaccttcggggagaggaacccgaccgcgttctccccgcagcgggcgctcatctccctttcccgttctcccgggacgcccgactccgggcctcgaggaatgagttgtttttccaccttaagccccaggcctgggtctttcatcccagggacgtcttctgtttcggactcggggtggattggccgctggcggaacgagtccgtgactcgccagtgaccgcccagggcggtcgcgaggccgcgccgcctcggtgtcggcccgcaacccagcctgcgcgcttagctcagcgcgtcgcctcccgttttcggaagaggaggcccttaattggtttggaatcctggggcctcctgaaggcgcttcgtggtgggttcccaccttctggtgaaggcctccctgctctcccagggttgaaaagcgctatccttcgtgcttctcttgtcacctttctcctagtgggcatcacgtcgagtccaccccctctagtttatgacttgtgaattctttgataagcaaatcgtagcccagagcaggcatttataatgagattccaatgtattccgttgaaaattactattatttaggccggtcgcggtggctcacgtctgtaatcccagcactttgggaggctgaggtgggcggatcacctgaggtcgggaatttgagaccagcctggccaatatggtggaaccctgtctctactaaaaatacaaaaaattagctgggcgtggtggctcgcttgtaatcccagctactcgggaggctgaggcaggagaatccttgaacccgggaggcacaggttacagtgagccgagatcacaccactgcactccagcctggacaacagagcgagactgtctccaaaaaaaaaaaaaaagaaaatttttattatttagagagaggctctcatattttagttctg

SEQ ID NO: 1241290 - DNA, 4001 bp, Homo sapiens
ttatacccctgtaaggccctcaacaagacactgtttgccttctttccatacttgcaggcttggctcccttcctgcaaggcagcatggcaaatgggaggatccctgctctggtctgtgccacagtccctgctaagaaagtgggcctagggttcctatggagaaggaggagtcactcctctgcccctcccagacccagaccaccagcacagacaaaagtgctaccacttgcacgtttcctctttgcccagcacaataaaggaattaggacctaccacctactaagtttctgcagctgacacttccaggcttaaagtctagcacgccagctcagtcacacatggtctgacgagtcctctttgcaactcagccccaacccagccacccgtgcaattttgctaattcaaacagctttcccgtttagagaggttgatagccatctcccatctccttttcctactgacgtcatcccacattttctccggagacaaataagggtagagttcctgggatagttttcaggctgcctaagataggagtgcagtggcctcccgagtccaccccacatctcaggctttggacaagtcgtcaaaagtgagagggaggtaatgaaataaatcacctagctagggttaaagggcaaaaagaatttggagactgcagctcagacccagatctatcctgggcatttgcagtgcaaagctgcgttttcttcgccactaccgaggtcttgcacaatagcctgtgtataaacatccacgccaacaatgcctgactgtgcaatcacgctgtaattacaggccggcaggaagctgctgctaggaactgcaccattcaacctctaggacaccccatctcgagtctccacggctcggacgcactttcctgcacacaccaacgtgtccccgccgccgccgctacagttgcagtctcgccactggcccgggccgccagcccctagttactctgcaggaatgtcccaaacttctcagctgttctttaaaaaaccctgcgccacgaggctaccgagggcgacgggaaccaccgtcaaagttcctgcagcacattcctgcagcccttgcagttttaggaaacagaaaagaacgagatgccacagagtccgctggaagcgggtttctgagttttatatagaaaacactcacatatgtacgtgggtgtgctgacagtttttatggctaaattgcaaagtgttaggccttagcgatcactgtcaggtttgggacatggttgggaagggtaaagggggagtcaggagcgattcatttcaagggggcttggggacaattccggtttggttttctgaaaatgcgtagggttgttttcccaaacttccgagctactctgctcttcgtcccaggaaggccaagcaaataaaagtccggggaaagttcctttaacttccttcctgcgccctcgacaagggctgcgaagaggaagaggtcatttcccagggaagcaccgggcaggggccgagagctgcgcccagcctgcagggatggaggcgctgggcggagggctggctgcagacgtaggccccggaaagccccttccccccaccctacctcaggccaacggcgcctggagctggccccgctgcagcccttgctgtttgaagtcccgcggcaaagcggcgacaacaccggcgcagcccggcgccccgaccccggccgccgagctccctccctgcagcaccccggcaccccagcgcccggcccaacccggcccgccacatccgcgcccgcgcggcccagcccgagccccggaacgattccgagccccacgccggcgcccggtggcgggagggggcgccgagcccgcggcttacctgcgtgctggatccccgggctgctcggaggggtgcggggcgcaggcgagtgcggcccgcagactctaactttgttgctctcgggacggcgcagtcgtcacttcctcgcggagcgggcggtgcggcccgggctgtgcggcccgggctgtgacccagcggctcgcgcggtggcgcgcagggccctgcagccagccgccccgcccgcgcccccggctccgcgcgcccctggccccaggcgccgtctccccactctgcgcgccctcggctgcggggtagcgggcagccctgcgctgccggccgcctagcctgcaccccccgccctgggagggaagcctcgctccagccgcgtcgtttccgcgccgaagtgcgatccggggccccgcgctggagtcccctgctctcaggctggtctggaaggtggtggtggggttcagggtccccggaaagctggggttccagggtaaacaccagtacacaaacaaagcggtgggggaggggaaagaaaaagtttttccgtttggtgttggggctaaaagggtcatgtcagaaagcagtgtgctctatgtgttcttaatgcctaaagtgggccttaaaacaagggtccctgtccccacgttctctctaaaagtctgcatgatgtccctcgtcatttctacgggttataagtgagcaagacgtttaccacgtatcacacttctgggggctatttcaacgcccaagctggggctgcagaatggtttctgttctaatcctcccccgcgatttccacctctttacactcaactcacagaaaatagagtctgatgcattctgtgtttcatcaccggtcaaaagtgactttgagggtagggtggaggcctgagaagggcagcttcaggcaatagtaatcctgaaatttatcattgctcaaaataaatgtgctcaccttattaaaaagtacaacggaaagccacctttaagataagtagcaaccaagtcgttaaacagcagtcttcaaggaagaactcctgatctcataaggctggagaaaaaacggggttagcctttgctggtgaaaaaaaaaaaaaaagacattcgaaactgcagtgaagggctttcataacagaaacattagcttcattgtagcttgtcgtggaaaacagggaccttttaataggtggttcaaaagcatcagttagggctcaacaattttccttttttccccaaatactgcttctcctagcacattggccagataaaacctcccccctttcaatgcttcatctttttatgaaaacacaggaaaccataaacttgagtgaaggctttgttcagaaaggtggatgtaagactgatggaaaatgacatttgggaaatgatccccaggtctgtgttaatctctcatggaaagccacagactcacccaaagataggcgtatgaagatcgaagctctcctagcaacatgaaatcctccacgttgcagctgctacgccctagttctgatttttactaagacattaatggcacattataaatacaaaatgtgcaatgcaagaaaaataatactgctttgagaaataactgcatcattagactcaataattaaagttccctgaaattcttcttacatcacgctattgtggggagatggtgaagggattgcccatttcaattttggaataaatagaagtaattccttagtgcattctgcttaaggcaaccaatgagagaatatgttagccaggcttctaaaggcaatcatgtgatactccatatttgctaaaacaagagctgaatattttttttgttccatatgcaattccaaattttcagtcacaatttcatgaatattcagtatttctgcatgcccaggagtaattagcagacagtgtaaatgtgtgaaggcctgacacttacacatacattgcttttttctctatgtaaggtggcagttgctggagtaccagggcaccaagtggaggatgtggtagacagcctctaagatgcgccccctgccaatgatctctgcctccaggtattcatacccttgtataatcctccctccttaagtgtaagctgaatccattgactgagttctgacaaatagaatatggccagtgatgtgatcttacttctgagactaggttataaaaaaaaaaaatgcggcttccatactgg

SEQ ID NO: 1241291 - DNA, 4001 bp, Homo sapiens
atttctctgatccaaaaggggcgtgtgccacacctttggtgggaggctctagagcaagacaggtggtttctcccctcagctgaggccccctagggaggactggcttctcggtccaccttcactaggccttcagtctcaaccctgaagctacaggaacaagaagatcccagatcacctggccaggctccccctgctggagcaagccagacatcccctccctcccccagccgcagctgccaacagggatcccctgcatacgcgggccaccggggcctccgtggccagcctctcttcccccatcccaccgccccccgcgcgaggctccacaggctggcacacaggtcccacgtgggatggtggaaacaggaagcagccaccgtagttgtgaccaacaaagttttaaatggggcatataacttcccctttcatcttctcaccagctctcgctggaggctgggctgggacggacacccggcctccactttctgtggcaggtacctcctccatgtcggcccgccttggggctgaagcctgaaggccccagggcacacgaagttccccttcctcccctagacctttacccagaggccttgggggcaacctgacacacatggtcctgcatgtgcgacttgggaggcgacgtgaccagctccaccaagccggccatatgcagggcccggccgaatcccgggtttcggcgctgccgccaggcaccagggaacacagctccccgcgaggcaccgcgcgggctgggagggctgcggcggcgcgggcgtgcgggggcgcgcgggaggatgacaggtctgaggtgcgcccgcccgcgcgaagcgctccagcctaggcctctgctgactgcatttgccccagttccccaacgcccctgcacctctgtcccccaaactcctggcgtggacgccgcgtccaggcccactttcccgtgcacgctggcaggggaaggggctcccgcgccaagttccctcagctggctagcccctcgccgcgccttccgggcctgggctccgtcacgtcagccggtccccacggacaccacgtttctctccagcggaggaggagcagccggattcccgagccgccgcgggccgccgggtggggagggctttcctggcggggccgcgcccgggtgggcgggggccgcgcgcaagctgcgtagctgcacaaacaccgcggggctgcgctgcacacgcagctgcgggccgagggcgcggaccgcgggggagggggcggcgggctgcaggcggcccccgcacggccacacgcgcccgctccaccgccgcccaggccgcagaagttcgagcgcagcggcccccgcggccccctctccgggccgcgcctgcagagctgcaacccgccgtgcgagcagccacagctcgcgcgccgcctggggtcccctcgccggccccgccgcgtgcaggcctcggccgccggccaggcagccccacttacccagctcttgcccgggctccgggctccgggctcggctgtcccccttccgccgcgggtcgccgccttcggtcgcctccgggactccagccgcctgcacgcactcccgattttaaaaacaaacaggcgccgtcgcctccccgcggcgctcgcggggcttccgccagcccgcgcctcccgaggctgagaagtttgctggcagggcccgggcgggacgcgcgggctgtcaccccccgcttgcgatgcaggagcctcggcgcgccccgcacccgtgccgtccgcctcgcgagcgctctgcctccctccgtgtcacccccagtcctgcgatgcagtgtcaggattgcacggctctgactcatcggttgagctcacagcttgaaaaaaaaaaaaagagagagggcgagaggcaacagcggaggaggaggactctggcgtgctacaaaggattgcacaactcgaggctgggagcgcggagcgcccagcggccggccggcgcgcgcggcaccgcggcgagcaggaaccagctctaccacttcatcagcacaactgtctcggggcggcctcagccagcaggcccggcgccgcccacttcctgcgaccaaataaggccggggaaggcgtccttaaacctcaggcggcggccggggctggggatttccagcagacctcacctccactcacgagtcggtcgccgtccccatcccccgcccaggctggcgcccccgatggctttgctggcgggccacgctgctagttcctttcacaccaaggtcaggaggagacggtgacgaaatgtttggaaacccattgagcctgccaggaaagtgtgtgtgtgatgctggggaaggcacaagtcgctttcttccacaaagaaactctctctggttttggatacggtaaatcatgcacaatcctctccatggcattttattaacagactctccgagtttcactttctggctcaaaagcgtcctggtgcgtgtaaaggttattgagaaactggcctcagtccctagaaaggacccaccatctccatcgcttaggtgaggaaaatctcctggatttaaatctagcaactcaggccagagttgagcggcttttcactccatactcacattttcccctgtcttccctaaatatccccctgatcaattctcaggtccaggccttgatgcctccttgcctgactggtgggaagatggaaaacatttttgcagctcaagaggttggttctggcccccacattcaatggggctctagggccaggggaaagttcaggggagtgtgtcctattcttccttccaagttttttggtggtggtgcagtggtggtggtggcggcggcggtggtggcggtggctgtttttcaaggagatgggtcacaaggagattttcctttgaaagaaaaaccaccgaagaataccatgtgtcctggcagccacttttcaaaacactgtggccagacctgagaaccaggtgcatccctcactttctcagggagaagaggagggaggggcagcagaatatgattctcacacactcactgggcctacagggccagggtggggtgtggaggacacaggcaaaacttggatcttctgcccagaaatcctgccaaacctgcacttgcttctaagggggcatggctttcctgtcctcttccacctctttgctggctggagcacctgcgtacatgtacacctggaagtcacacctccccaagaggagaagggcttatttgcaccatgttatgatagatatgtcaaaataaggaacacttaaaacaatcttatctacaaaatacaggtaattatgccacaggactggaccagaggacctcttgagatcccttccagttcaagatccatgattctgtgattacagtaagtgaatagaggagctagggaaaccaccttctacaaaaaaaagcccgggctccccgatttagcatctgtgatgacagtattgttcctggcagctctcagagcacttctccatacagtctcctgaagagccctgcatgtgagttttatctctctcaatctgtggatgtactgaggttcagagaggttaagtgaattgcaccaggtcacagggcaagccaagcatctgtgacctctctgctcctcccccagaggaaggcagtgagcaattgaggaactgcagtgctcaggcctgcagacccccaagcagaggccagactctcagggctcctggcaaaggatcagggtagagcctttttacttttttcatttgcctgatttcttccctcccactgacaacacatccaagtgagggaagcaaaagcaaagccatttggtctccagtgcccactgctgccaagttcctctgcagacctgtggccatcctcacctcccctgagagcccagcccctgcagttggccttaggccagcccagagtgagcccctaagagcttgtgcagaccagcccagggatgttcccaaccaaccagaaaacctgactgggaagcacattgctagaagagcctgccatcatggagccagggcccagccttcagg

SEQ ID NO: 1241292 - DNA, 4001 bp, Homo sapiens
caattttcaaggccaggggcccagggctgtgtagagggaagatcagaggagtgaggagccaactgtgggcaaaacccatccatttgagctgggcctcccaggtctcataggtgtgggcgcagctgtggcctttccctgtaggtggcctgcggggatcgggcctgctggatgcttgatgcacgactgcttgatgcttgagtgctgtgggagacaggtgctcagatattgctggtgagagtggaaaccaaaggtggtctttttggaaggtaatttggcataaccatccaaattgaaactgtatacatactatacatatgctgacccagaaattctacttataaagaatttatggtaatcataggacagtgtctgtaataaaacactggaaacaacctcaatgtttaaagtattaaataaattagagtacattcatattcagactatatagctgttacggtagatcttggtgtggaaatgggatgatgtcaagtatttattaagtgagggagaaacgcaaattacaaaacagtacctctaattgctccatgtatatgattaatatatatatatatatatatatgtcttttcctatatgtatatatataaggaaactgccttatttttgaagttgctggttgggatttctctgttctttcagcccctgggggacacctcagttaaagcaagatcagtctgttggccgagagtggtggctcacgcctgtaatcccagcactttgggagtccgaggcgcgtggatcacctgaggtcaagttctagaccagcctggccaacatggcgaaaccccatctctactaaaaataaaaaataataataaattaaaaaaataaaaaaaattagccgggcatggtggcgctcatctgtgatcccagctactcgggaggctgaggcaggagaatcgcttgaatctaggaggtggaagttccagtgagccgagattgcgccactgcactccagcctgggagacagagggagactccgtctcaaaaaaaaaaaaaaaatcagtctgttgatacacagttgtcctccccgccccaacggcactccagggcagggctctgtcctattcatctttatattccctcactccagtacccagcatagtgcctggtgtaaagcccctgctcctaagcgtttgatgaaggaaagataaaaggaacgaccttggttcatcttgtgcgcccccgccccgcccaccgccccacgcatcctcgccctctattcctccaatccccaacccgccataatcctttccttcttcctctggctacgccactcacctctgatcgttcacagctgcattggcatggtagtaaccagccaccaccagaccggcctgtgctccccacacatccacctgtcgtaggaaaggggccatcagtaattaaattgtgccgctggctttgtggatgcgcactgctgccaagggaccggggatgaacttgggctggggtgttgggtgggttcgcggtgggggatgggcatccaacggaggcacctggttgagggcgacctccaacatgacggacagggccaggtggctgtggaagaggggcacacagtcggtgaggcacaggcattctccagaccgcggcgctggcgccaaaaacagcccgttgactgcggcgtgtgggtaccgggcagcatgcaggcacatcttcacgtaggccagggccgagatctccacctcccccatggcgagcgaggcctggacgggaagcagcaagccggattagtaccggattaggcgagccggtgcctagctcgcgtccgtgaagctccctccagcgcttcggcacgctctttgacccttccccgtgccctctcacttcggttcggcgacaacgctaactcgactcgcaggtagcccgccggctcccggcgccctgggtcccggagtccgcccccggcccagtccaggaggaggtcccgattgcatccgagccccgccttcccgcgcccctagctggcggccgcgactctgcgcctgcctgggagacagaccaaactgcagctccctgcagaactggctcctggagtcccgcccacgtggtgctccttgatagggctaaaggctttcaatttgtccaatcagcggccgcgccccaacgttgccccgcctttgtctccagcggactggaaagaacccaccattgtgaagcacagaaaattgcccgcactcttattggctaggttccccgacttccgctctcggttggtggttggctttgcctgttacctgtgttgcccactaccactcgctccgccgagccccaaggatggatcgctatcccgtagccgggtgttccggagcgctgcgggcaaagcagaccgccttgcgcctattatgggttgagtggctctgtactctagatcggctctgtcacttactaatgggccgtgttgccttcgcgactgcaggttttcttgcccttggtttatcttttgcccgtgttcctttaaggatttaatgagatatgtatgggggcaggcttccagccagtctagtgcttcgcagcacattcttatctcatattttatgacaggataaggccctgaattaaagaacaatcccatggagtttacagcaagatcacagcaaaggaacccttgtctctatcaccagcccagggctgaatcttgaaaagcagagataaagacagtgattggctgaaggggatatgggggaggacagtaagaaaaacttacagattcatccttcccataatgtcctgcgatgtatttccttcaccacagtgccttggaagcattattttttcccctcctagcccttaaggagggagtccaggcccggcgcggtggctcacgccttgtaatcccagcactttgggaggccgaggtgggtggatcgcctgaggtcaggagttcgagaccagcctggccaacatggcgaaaccccgtctctattaaaaatacaaaaaaattagccaggtgtggtggcacatgcctgtaattccagctactcgggaggctgaggcaggagaattgcttgaacccgggagacggaggtagcagtaagctgagatcgtgccattgcactccagcctgggcaacagagcaagactccatctcaaaaaaaaaaaaaaaagggtggggggagtccaatcattcatccgtagttctccatagttctcccagtgaaaccttattctccttctaggcttttcctgaactgatgaggattctttctttcttcattcctgatgttgaccacagaactttccccttgtgtatccaaagcctgattattcccataagggctctgtgcaaatgccatctcttccaataattcctgagacctctggatgaaaataatactgttacattccaaaatacaggttatctgcatggctgccatggcatgtaacaatccccaccctaggcactcagggtgaaggacttggactataaacccaatggagaagatagcccttcaacctctgtgacttttctaaagctactttcccccctttttgccttagatggaaacagataagcaggagaagaaagaaggtaagtgagataagaggtgactagggaaggggagatggcacattgactactggatgagaaagggcctgaatcccctctttctcacagtcaagattacagtgggcatctaagtcatctttgtctttgtgacacccaccccttcccaccacattcatcttcaggctggacataggtgccactcaataaatgctttttgaatgaatgacacacgccagaagggaatccacacaacatatagatcatttattttccttctagtcccgggttcagtacatagatggcttttcttcaccctttgggttgacaattttctccaggttgctgctgatgatatgataaagctcagcctgggagaaggccagagtgcaagagtcaggttcttagccaatcccctgcctgcccccactcatccacctcccctaaagccttactccacactcacataga

SEQ ID NO: 1241293 - DNA, 4001 bp, Homo sapiens
agtgatcttattgtttgattctagttaaggtggtttttctttaaaccaatacttctacaaaatataagagttggtttttactttcttctggacatcaccaccagtaaaataccatgccaatatctctaggctggcaattaaaaggaaaatgcagaaaacgaaaacattcatgaacagacgtgtaggtcaacttcatgactaaactgctatttaggaacagtatgaccaggccccaaacaactgctccaataaaaatatctaggctcattttcatatcgcaaatcaagctgtcaataatacgcccacagattaaatttgtaagacctgatgcctcaaagtcatttaatacaaatttcagccacatatctttccaactaagcatagggagaattctaccataagcatataactactttttagatcaaaaacaataattcaaatatgattgattataagtcaattaaggaacctattcaaaatgttaattgaggaatctatttaacctactggagagcaaaaccgttcccatgactctatactataaagtattccagggaccaccagcataccaaatacattctacctgccctcaacaccttctgaggctcaaaaacacaggtgttctgctcttggaaactggcgttaaattcagagaaaaagcagaaactttctttaattccactgaagagggaattactaaattcatgaaggcccacaaatggttcagatgtaaagtataagctgcaaaagctatcagagtatacattctaccatgaacaagatgataaatttcaccagagataaaaaataccactacagaggatgaatcaacacactcattactctttactgctacagtgacaaacaggtgtcgaataacaagaaaactttccctaaatcacaatacaatagcaaaataaattgctccagttgtcaaagggtctagaattcaaaattattccgactgcacttaagcaaattctatcaaatacacatttttttttcccattaacaaacttttggggccctttgatggagcaataaatccaacatgtaaaaaaaaaaaaaagtgtggttaacttttgtgcgtgaattatcacacatcatgttctgataaaatattcagtgtgctatgaaaatctttttcaaccctgccaatgagactgaaatctttcaagcatgtaggatttcatatttttaaaaagatgccatattggtggatatgaatgtttccttcctgtaaaattgcaaaaacaaaaaaagaaaaaagaatccattatcccataaacaaaataagaagcaacactgaggccaggtccactttggctttccatttaaaaagctctagattgtattaaattgtgatgatttcattaaagtagacctgaatgggttctgggggtccaaacactgcgtgcatcctcgcaggagggttttgttattaaaggatttgtttcccgagttcttcatccagtcatttccaaacagatgtgggtcgggaagcaaaaaagcaacacgttccccggaacgcggaggctgcccgggcctccccgccgccctgtgccccacgcgcctccgcccgggcgcgctccgcgggtgctggagccggcggggtccgcgcgccagtgccgggagccggggtggcggcggggagcccggggcggcccggagcgaggcgcggccccgcggctccaacacaatgcgccggcggcgggaacggggaccgcgcgcccctccgcaacaactttgcgcggcctcgcccgcggccgccgggcctcggcccctcggcttggtccccgccgtcgccgtcgccgccgcccgccaccagccgctcgccgccccggccccgcgcggccgcccctcaccgttgcagaactggagcagcgaggacgtgtcgtacaggctgctgtagctggagaagccgtcctccatgctgaggccgccgggccgcgcccgctccccggcccggccgcgccgccgccgctcaccacacactgagctgagcccgaccgcgaccggcgctggcgctggggccggccctgctgtggcggctgctgctgccggttaccatggcaaccccgggcccgccgccgccgccgcagccgcgcgagcccagcgcccgctccgcccgcgagggggcggcctcggcggccgcggggcccgggccgggagggggacgtggcggggcggggccgagcctccccgcgcctgcggcctctttccccgcggggagcgcggcccgggcggcctgggagccgcaggggcgcgtctgccgcccgctgtccccttggccaggccccgcctccgcgcacgggggctcaggggctgcggggcgcggcgggcggcccttgcgggggcgcggggacaaagaccaaggccgggagagagcgggcgcgtggggcccggggtaacctccgccacggacacccaagcccacccgcccccgacgcgctgttcccgcgcccgcgggcagctccacgaccaaacatggacaacgcgcccgcacatttcggccgtttccacgccgcggctcactgtggcccacatccgaccggcgcgttcctctgtccacacgtttttccgcggcagcaaggccctgcctcagtgagacttagcacgggactggcaagtcagctcgaaccttcgctcacactgggccagagaggctatcctggtaccaggctggaagtcccccgtgttgaggactcgacgcagctaaaacatcgctttgtggtttctctatgatcagcccctgggatacagatctgtcacgttacaggcttgttaacttgctacaggactaaggaaatcagtatttattctacatcagaaagacaccaagagttaggagaaaatagcgcagtcggagaaacacatagatctatgagtttgtaacttttccaggccatacacgtataaatgctgttaatggttcgcattttatacccatggagtaaagtaagtaaagatgcgccaaataacgagtgggaagcaataaattagaatatataaaatggatcatctaacccaagaatgagcttggtcccaaagagactgcagaacgtttacacttcctgttgcatcagtcataattcagttccatgccaaaatctgaaatggtaggtactaacttgtgcaggttgaatagagtaggtgaaataagaactgagtaagttaaaattaggaaaactcgtaggtctcgcttgggctcagaggcctgtccttccagaagcccagcttggacatcagtagatggcaggtgagggacagggctctgtcactctgcgtgcggcacggttagtgcatgggttagtaaggactggtgctatatgctgtgggcagagggagaagtttaagagcttattcctgtcctagcaggattgttaattgggaagatacattgtgagtgaaggctgaagggccacaggtgctgcgggtttgactgtgacttggtggatggaggacagtgggcaggacactgctagtgaggaaagaaggaacggtgcctgcagacattgtgcagacaagtgggaaataagactggactgagggcaaggggccaggtaagagaggccccaagagctgcagaggagcctgaaccagacttggggggagatggaggaacgcttggagggttcacgcaggcaggccactgttgagagctgtgttagggagctgggtctgcctgccgactgggctgcaggggccgcggcctgttgctggaacagcccaggatgtctgcagtgctccagaaatgaggcaccaagggccggccagagggaagttgctataggaccatacagctggaaagacaggaaggtcaagcggggacagcacaacctccaattagaagtgccctgtagcaactggagagaaagaattgagatttgggagttgtcagcaaaggggttgtagatgaagtctctaaagaagagaatagaaaatcggacaggggctggggtacagccttgacaaaggagagagaaggacattccgaagga

SEQ ID NO: 1241294 - DNA, 4001 bp, Homo sapiens
agggagacttgaaaggattagggaaaaagacaagacactggggtaaactctactcttgggataactaagaagataaataattactacgggtttactttagttttgtttttccatcagcaatttgggctattataataggtctgtaaccctaatcaccacgatacagagtcccagcttgagaaaaatgaaatgacttatcagttaccttttcaaagtaatacattaaatacaatctgaaaaagcactctggtgtccaaaaaacaaaaacaaacaaaaaaaaccaactgaatacagagcaccacctcattccttactctgcaatctcaattttgtcttttcttatctttactccatcttgccctacctctgtttgtcctaggcatcctttccctcttacatattatagatgtacagagacgcaaaacagaagaacaactttatttgtggaatttacataccagggcttcttgcctacaagacttcaaaccaaggtaccgtatttgaaatgcccaatttaaatcctgtgcaacatacatgagggaataacattttgtaaccaaacccaaatcgtagaatctttgataaaaccccaagagcaccacacaaacacattctcaattgcttttaatatattttcctctgtaaaggacaaaaaatgctgtgcttgaggcaataatcagtggcctagaatgatttctgaagctcttgactttaccataaaagttgtactaagacactgattgaaaattacatttcaaatataccgctcactaaagaaatgtcaacaagctctgggaccaactttgagttattgtccaaggaagactaaaaatagccccccaatagcgatttaattttaagaaaatacaaaagtagcttatttaggagtattttaatgaagatgaagagaactggaaatcagtgaagttttcagcagcctcttcagataagacctaccttaaattgccttcaggtgtgcacattttaacatccagtgaattgcctggaggttgcctggggtttctgctgattatagcaggcggtgaaacctgaactaataattacggccaggaggtgagagcccttcaggacgccaccctgggcgcgctccccgggagcagcccaccgcttgctgtgcttccatcagtcctttattaggtaaagggtttccccccaccccgggtgctttaagaatgcgtttaataagaaatttctcacaggatctaacggaataaagtgccaccaaaataaccttttcgcagttttcgtaattgtgatggagtgggaaaggggacaaagccgtcaaaccgggtgcccggtggatccgcggacctgatcttcctgcacggacccgagagagagtccctagacgaggaagaggggaaaggcatttgtagggtgttaactggtggactcgggaccagagagacagctgcggattcccctcggggtgatgctccgtgcaggagcggtcacggcgtccagaggaacccgcgggtgcaaactccgggagcggcttgcagggtgacggcggcggcccccgctccccggtacctgatgatgtcgtcgctgtggccccggtagaacttctgcctgtgctcccgcgggctgtacaccacgccgacccccgccacgaagtatacgatctccttggccgcagtgtagtagaggttgttgcggcactggtggccccggtagccgtacacccactcgagccgcaggtggcagctcggggcgctccgggccgccatgtcggggcgcccacccgccgctcccgctcgggcccgcggcggcgacgggaggcggcggcggcccggcaacgaaagccctcccgctggctgccgggacttcccgccagccgcgtcctctaagccgcgcccgtcaggtgcatctcgtttcgggggccgccgccgcctcagcccacaggcgggaggaaaaccctcgcctcgcggaacatgctgagggccgcgagcgccgccggctgtcaagtggatgcccagagcccttcgcccgcctcggctcgcctagtctcctcagcccgtagcgcctgggccgagagcgagggcccgcctccagctcctcagccgccgcccgcgcacgcagctcccagccccggtcacctgcggcgctcgcgccccgccgcggctttgtagccacagcctggcggacccgcgccgcgcaccccgaaaccgagcgagccgagccgagccgagccgagcggcgggcgcgcggccttgcgtggccccgccccctcccgcgctcactccgcccctcccggagccgagaagaggctggagttcgcggggccacggtctagttgcggagtcgctgggaccgcgtctctgcaagtgcgcgggccggtgagccctccctcgttgagctgcttaagcccaggcggaccctcggcgaccccgggctcccgctgctttgcgtcctcaaccgggaagcacctgccggttccgcacggtccctgcacccagcgtaggccacgtttttgcctgggaaaatccacaccgggatgctaaattctcttttttacgcttgataccttgtgtgtcttgctgccttatagtgctttcggacccagacattggaatgatgccgagcttcctaaatgtgcttttaaattattatttttagaaacagagcctcgctctgtcgcccaggctggagtggagtggcgcagtctcagctcactgtagcctccaactcctgggctccagcgatcctcccgcctcagtctccggagtagtaaggagtacagttgcgtaccactatgcccggcaaatgttttgctttgtttttaagtttattttgtagaggcgggggtcttgctgtgttgcccaggctggtctccacctcctgaccttcagcagttcttctgcctcaggcctcccaaagcgctgggattacaggcccaatccactgctcctggtcctaagtgtatgttttcttaagtgaccgcaaagctgaaggtagactttagatggtaaactgacatgtgagatctgatttccgaatagcaaaaaaaaaaaaaattgtacttcgatttttttaaaaatgactgggacatcaccaacagttactcttaattaaataaattcaattgtgatcctgtagaaaactcctgtaataaaagtattgggaacaatcaattcctgactatgtcatttcccctcctactcagttgtgtcctcttctcacaggaatatgaacaagatttatcaatacctctaaaaataattggaaatccacaatttaaaaagtgttaagttcaggatggccacaagatttacaacaaaaaaatactaattcaggatataccaatatgaacccttattgtctaaaaattactgtttgatttccataggaaataccaagacagaaatctgacaaaagctaaaataaactaccatcgtttcaagaaatatgactccaaaaggggttgactcctgtgtggtacagatatattggaatagatgttatccaatgtctacttcctcaaagatgccagttactaacttgagacaggattaccgtttcgtctttgattatgacttctaatctgcaagcagtttacatgcaggaaataaaggccatctgaaaggaatttacatagatgtcatgaaaagtaaactctgaaagagtttccattctgggcagaatctgaaaaagaggaatagctttctggcagctgctgcaaataaacaaagaaatcaggcctgagaagtggctctaaggcccatgtagggtaccctgggcaaaagcacacacagtttctctttgtcaccaggagggcgttttctgttttttaataagaatatgttctaattcactagtgagttccttgaaatcccctggtgagaaaaagaaaaattgttgattatttaaattcaagcagtgaacttagaaaacattaaatatttgttgctatacatttgtgatatattaattactggttacatgtaaattttatgagacgagatggaagaatatagttt

SEQ ID NO: 1241295 - DNA, 4001 bp, Homo sapiens
aaaagaaaagaaaaagccatgatcatgctggcagatggtatgtataataaggtttacgccagcctgaccaacatggagaaaccctgtctctactaaaaatacaaaattagccagggatggtggtgtgtgcctgtaatcccagctactcgggaggctgaggcaggagaatcgcttgaactgggaggtggaggttgcggtgagccgagatcgtgccattgcactccagcctgggcaacaagagcaaaactctgtctcaaaaaaaaaaaaaaaaaattttacagccgggggcggtggctcatgcctgtaaatctcaacactttgggagaccaaggcgggtggatcacctgaggccaggagttcaagaccagcctggctagcatggtgaaactctgtctctaccaaaaatacaaaaattagcctggcatggtggcacgcacctatagtctgttactggggaggctgaggcaggagaattgcttgaacccgggaggcagaggttgtggtgagccgagattgcgccattgcactccagcctaggcaacaagagcaaaactcttgtctcaaaaaaaaggtttacagccggggcggtggcccacgcctgtaatctcaacactttgggaggccgaggcaggtggatcacctgaggccaggagttcgagaccagcctggccagcatggtgaaactccatctctaccaaaaatacaaaaattagccgggtgtggtggcatgcacctgtagtcccacttactggggaggctgaggcaggagaatcgcttgaaccaaggaggtggaggttgcagggagccgagatgccccactgcactccagcctgggtgacagaagactctctctcagaaaaaaaaaaaaaaaagtttacaaggcttatcattaccaaatcggcatgttccctcagaagaaacagaaattcagaaacagaaactatgcaagtgggaaacaaggcggaggggagtaattagaggtcaaagacatcgggaaggagtgtacggattaagtcctccctagagaaatggtgacgaaggatctacaaccacatttaaaataaactttttaatttgaaatggagtataacagagcagagcttcaaccacaagtctcctaactattggcttggcactcagaataccgtaccttccttaatgactcactgactgactctcattgaaaaatgagaatacttgtgagtacactccttttcagaggtgtattcgggatttcaggagtcggggaggcaagttgaagagcttccaactttatgcaactttcaggaaagaaggctgcggaccggtattagcaaatggaaatccggggggcggtcgtgggcaggaagtatcggccacacaggacctagtgaggccgaggaccctgctcccgacctcggtggcagcactcccctccccgcccggctccctggcgtgccgctgctcttcggaggctggcagcctcgccctcaaccaccgccctcgggaaagtcctcgactgcctatcaaaaaacatttggcctgggacgtccgctggctgcactatcccttacagaatcagcaagggtgaaaagccaggaaagagatgcaacccaaaggagtaaggcagtgccgggagcggcagaagcggagcgggggcgagggcaaggtagccgcggccacgctggctgcggcatggagacacgggaggaacgggacccgcgggcggcacgggaaagggctgcggctcagaccactgcggcgggacgggcggatcagcggggatctaagtctcctgaggcaagggcgccccgaccgcagcgactcctgacacacccaggccgcaggacgaagcgctaccgcctggggctgccagctcccgcctcccgcccgcagagcccgggccccacgtagaggatccggcgccgccgacactcgcacactcaccgcgcgcgcgccacccttgcgcggcagcccgccgccctcggcgcgacctccgccccaccccgcgcgccgcggcgcctgggctacgtcacgggcgcgtgcgctctccgcgcgccgtcagcggcgcgggtggggcattgccagctcggcgtcccggttcccttggagacagagctggccagggcggccgcggctgggcaactacgacagcggagcccctggggaagccaagatgccgtcgaagggaaaggacaaaaagaaaggcaagagcaaaggcaaagacacgaagtaaggagaagccacccgagagtcccctctccctgggcctgcctgggatttcgggtctggggctggcaacctggcgccccccgcgccggcccactcggaccctctccccggctctcccggcttgtgaggattacagctcccatgtccatagtctggcagatctctactatgtgttcagattatcttaaacgtgtagaggatgtataaagtagttccttgggccttttcagagatctcttttggttcaaaggggacacctaaagtattttaccaagttggataattattgaggttttcccaaactgatcagagccactgaggtgggtaatgttctagcactaaccccttacaggcctggagttgctgctagattgctactagccctattgggggaccccggtggtttctggacacgttggagtcatacgtggtgtccagcaacaacaccatatatgggaacacagagttggcaccaaacttgagatgtttgtaaagtaacttaagagagtaattcatgctcaatacagaaagtttgggaaacatgggaagtaccaaaagaaaaaacaaaaatcacctgtagtctcattatccaaaaataaacactactatattttggagtattcttttttaataaaacgatagcccaatgtacatacttatatgtggcttttttcttcccatttgttaatgtaagtattcttttatggtattttttttttgtttttacataactgcacagttagtctagcccttaaagtgccaagggcttatcacattcctagaactcactaacatatgttttcagattttgaccatgcttctacagtacacatttgaacaatgaggaacactaagggtaagagaccttattccttggattttccatgacccattgtttgagaaacctggctttgtttctacagtgagtatcagtggtcctattagagtgtctaatttcttgcatcaagtacttttttttttttcttgacaccaagttttgctcttgttgcccaagccggagtgcaatggcacgatctcagctcactgcaacctctgccttctgggttcaaccaattctcctgcctcagcctcccgagtagctgtgattacaggcacccgtcaccacgcccagctaatttttttatttttagtggagacagggtttcaccatgttggccaggctggtctcgaactcctgacttcaggtgatccacccgcctcggcctcccaaagtgctgggatgacagccgtgagccaccatgccctgtcgcatcaagtacttcgagccactcagacctgatacctggatggtcgtagtgagacagtgtatcactagtgcctaaatcatgccagaaagggacatcaacagctataacaggctgaggggttgggaatggagctggccttaatttgaagagaacaaaaggtgaaagtgggactttggttctctccactgcaaacccattacctctgtggaagaggactgagaaccagaggtaggaaagtggatgtggagggtggcagtatagaaaggtccacatgtacatatgtgtgaaaatatttagaattcaaatacaggtgaaatattcttaaatatgtacatatttatatatcatggtacctaccatatataagggggagtgttttgttaatgcttatacaataaatatttagaaaaatctcttcctttaccactttaatctttgaatccatcctttttcctctccacctctatataaatgattatggtttctcaggcatccttaaagcccggtgggtggggcatcgtg

SEQ ID NO: 1241296 - DNA, 4001 bp, Homo sapiens
aggctggagcgcaaaggcgcgatctcagctcaccgcaacctctgctttccgggttcaagcgaatcttctgcttcagcctcccaagtagctgggattacaggcatgcaccaccatgctcggctaattttgtctttttagtagagatggggtttctccatgttggtcagactggtcttgaactcccgacctcaggtgatctgcctgcctcggcctcccaaagtgctgggattacaggcgtgagccaccgcgcctggacaaaatgatcagaatttttaaccatcaaattggaacagaaatagctgaagcccagactttctgaataaacaatggaaaaatagtacatttaacatgacatgcaaaaccaagggttatcatacccttctctccccatcaagaactaaaccactttgactaaaagtttcagagggtttgacataaaaacggaacttggtgacaagagacgaaggattaactctcacctgtaataacctgagcagtcaaagcctttgttaaatcgatttaaaagccacagaaagcatcatattagattatttgttatacagaagtctttgtaagctagctactcaaaaagtttcaacgagtcatttaagaaaaaataattttgtagaaaccacgtgcattcttgcaacagaggttgccctatacactagctatctcaactgctactataataattgtattccaattctaatgcaaattaaaggactaatttgaaagggtaagaatggaaaaagctatacagcatgttgctttttatatctagtcttaaaatgaacaccgggcaaagtttactattttcagtacttactgcccaaagacaaggattaaaaatcactaagaacataacatgatacattttaaaaactgtggtcaagtggttatcatttttaaatggcaatgctttcctgctcaaattctttacagattataccacctctcaagccagttttggtcactttcttcgaattggagcttactgatcatcccggttgggttctaatagagctggtctctgagctgagcctacttttcagcctccagccccaagaggatataaatacagataagtacaggatcgagggctgagggacgcgccacacgcaatacctagaggtctcaaaaacaggaaaaaaaaaaaaaaggcagagcacaggaaaacgaaagctgaaaaaacactgcaaagcaaatacgtcctctcctggcccacatgctgggtatagctggatctgtcagcttcgagaatagttagacaaccctggcccattgttcctacagcaggctagagcatttggagggaaaaataccatatccggcagggcccggtggctcacgcctgtaatcccagcactttgggatgccgaggcgggtggattgcttgaggtcaggagttcgagaccagcctggccaacatggtgaaacgccgtctctgctaaaataaaaaaattagccgagcgaggtggcgggcgcctgtaatcccagctactagggaggctgagacaggagaattgcttcaacccaggaggcagaggttgcaggggtctgagatcccgccactgcactccagcctgggcgatagagtgagactctctatctcaaaaaacaaaacacctcccccacgtctccctctaccgagtaacaatcgggagagagttcatcctcaggcccaaggcacgccggacccgagcgagcaggcgggcgcgcaaccgcagggcggaccggggctccgaggcctagagtcaggcctggcgtccctgcggcgggaagaagggtcaatccaccgactagagtggcggggagcatcacgcggcgctgcatggggctcgtggggaggggaaaacgtatggggctggggtcgctctggaggccggggactcggactcgggtagccgcggaggcctttctcaccatcgcgccaaactctcttcgctacagcagctgccgacaccgccgccgttacacgagcttaactacaacgccgctaacagccaatcctcgcgagaggagccgccggaagtcgtcgaaagtgcaacgcaaaagagccttttggatcatagaggcacagtcacttccggcagctagagcagctactgactctgtttcagccatcttcgataaaggcaaaaaggtaagggaaagtttccaagctttaggaagaattattttttttcaagacgctgtcttccgtactttcgttattaaacatacggctcaagtgatcaccggtatagacagtgacatcagacatctttcattagccctactcaaaaatggcggcaacgtaagtatcctgggccggaggtcggttgtaacccggaagtgcctttgtaaaggagggggtggttagacaatccggaagtggatggaatgaagagatgccacttggcggccatggcagctgtagtatcggcgactccgggtcaaggcccggtcgagtgcagtaccatgggcagcaccgggtatagggcagagacagctttgtgtcaactttgctgctgaacccctaggacccatcgttagagacctgcaggactcctttcctcatcccaggctcggaggagagtttgctgggactggtgggctggtttcctgctctggggggcggatcaccttcggggccgcctcttggagacaggggcgcctagggaacgaacaggttcgcttgagtcacttacccgccgccgcctaagacattgtgccaccctcaatccgacaatcgaagaaatcgatcattcgcacattttccccattgacttttcccatctctgttaacccacgagaatctaatgactggcatctgagaacccagagcctgggaccttagattgctgtaagctttctctggtgctaatatcagcaaaaagggtctgttgccgggtacgttcaagaggaaggtgcctcgtgaacacatctgctggtgggaaggcctaaagaactggaaagcccactctcttggaaccaccacacctgtttaaagaacctaagcaccatttaaagccactggaaatttgttgtctagtggttgtgggtgaataaaggagggcagaatggatgatttcatctccattagcctgctgtctctggctatgttggtgggatgttacgtggccggaatcattcccttggctgttaatttctcagaggtaagaaattctcaattttctgtcagctgtcaggatggctgtgagatagtagttttagttgcaaagggaagctgcttccctagttaaatctcaaagctgaaggtctcattaagaaagactatcttttttaaaagatacatgacacttaataatagaaagaaacctcatattcattagtggaattcttaacctggggtggatagatattccacggaagatcctggagtattctgaatcccctagaattgcttacaaaaatttgaggttctgtgcatttacctggagagaggcaccataacatttcttttgattctcagaggtttcatggaatcaagattccagattgttatcaagaaaataaatggagggctgggcgcggtggctcacgcctgtaatctcagcactttgggaggctgaggtggaaggatcgcttgggcccaggagttctagaccagcctgggcaacgtggcgggactttgtccctacaaatgaggctgaggcaggaggatcgcttgaccccaagtggttgaggctgcagtgagccgtgtttgggccactgcactccagcctggacagcagagtgagatcctgtctccaaaaaagaaaaaaaaagaaatggagaatgttatttttctacatgaactgaaatcaatatgataacttccttttgagaaagtcaaacacacctttctgaggaaagctgttttgttttttggatgtctgtactagaatgaatgtaagaaaaaactaagattgttcttaactcacatttccttttaaagaaggggagccttggaattgatattctgaagttgtttcaaatctatttgcttagcaatg

SEQ ID NO: 1241297 - DNA, 4001 bp, Homo sapiens
tgcccgtgctggtcttgaactcctggactcaagagatcctcccacctcagcctcccaaagtgctgggattacaggctggagccaccacacccagcccaatttactatttttcaaggttgagtctgaaaagaaacacagatagccactctcgttctaaaagaaaaagaaaggggtttaacagaattttatgttagggaagtatttgaatatgagggtattgtgaaagaggaaaagtttaatcactagttagaagaaaaagaaaataaatgcaaagaatttaaagttctattttaagcagaactccaaaaaggttattaaggaaaaaaaaagtaaaagttgaagagttcaacatgtacttttattccagtatccaaatctccagaatgtagctgaaaatgttacattggacatcttctttccgtaaagaatattttattttaaagtcacttatttctatcttattttttaaatgtttaatctcggtgttgcgttatatttctaatcagaagaaaaatgacccttttccttttaagtacttgattgtgtgtcctttgtaatgattgaaggtaaaggacttttcaatgtctcagttgtaaagtagcaattttctttcaacttcccttagtttcctagataacactcacctcaactcccaaatcactcagcaaaacaacaaaatccaagaatgtaaagtagtgaaagagaaacctttcataatatttaaatgcatctttcctttgacatggtatcatgcccctaaacacataaaatggtatttctgataataaattaatagcaaaatccacttaggaataacatggatgcctaacccttaattttgtataaaacgtaatttttatcaacagagtcaaccaaaaagtggctttgacaagagtaatcacattgaaatactagatactgaagataatggaaaactgtaagtttctctcaattttttgctcaagaaaccacatctcttacagaaggaaatgatcataatccgcttgtaattaaacttgtgcactgaagaataaggaccttcctcccaattcgtaccagcttaacgggtgtcacgataagagaatctcattacattcgagaaaaagagcacacaggaccagaaaccagagggcaactgcagtcccaaagacatcaggtagttgggcttacacacagaaaaaccgcaagcagccattcttccgcctaacatcgaaatctgagatcagcccacaaacgtcttagccagaaaggctggcgaaatgcacgcagcacaggtactgggtacacaagttcctggtcaagagagaagtgagaaagatccaggttctgtgaaaatagcaaatactggcagggcattatacactgtgcacactctccccgggcagataagaccaacaaagatgcataaacccactcaaccgcgtgcacccaacccctctcctggtccgaggcaccggagggcgcggcgacgtccaggctgccgtggaggcccggtccacgccaagccagactcagtcccggccaccgggcagcagcaccggagtctcattcccggtgggaagagatgcaaggacgcacccccagccgctcacccgccagggcgtgcgggacagtgcacgccgcggagggcgccgggaccctcagcaccaacgcgcacatcgctcacctggcagaagcacctctgtgccgctgtctccgggggctgctcctctccgtggcccgagctgagcagccacacggcgcccaggaggccaaacaagaatccccagccgcggcccattgcagctccggcagcttgtcgccccacgcttgggaggccagtccgcacgctcggtcgcgggccgtgcgccctcagatgaagcccgtgcgggccggccccagcggcgccccacctccgggccgcctcccaggcccgcctcggccctcctgcctctcagcgatcgccacctcgcgacccagcctgtggacgtgccgcggcgcccgcgccggcagcccggggcctcggaccggttccttcccgccgcgtgaggctgacgcaccgaccagcttcccggctcggccccgcccggtccgctgcgcccgcgcccgtccccgcccccggctccctgacgcccccggcctggagacgcaacccgacgcgcacaaccccagaccctgcgcgggagtcgggggtccttccagttcccagagcgagagcgaaagccggaggggcctgtgttttcctgcggggttggggggcggggggtgcccgccccgcgccgccccgcccagccccagcccgctcactcccggccaatccttccgtatctcaatgcgagacaatcaaatcgtacgaattacgtgtccaccgtgttcccggcggagtcttaaagctgaaagggatattagagagcatctagaccagggcagcatatgtcatttatatttttagtagccacagcaaaagagtaaaaataacaggtacattttatttttaaaatatttttatttaaccccgaatgtgcaaaatattatttcaaaatataaccaacattaaatttattcataagatatttgactttttttgtctttgaaatccagtgtgtattcgatgcgaactagacccatttcatagtcaaatgtggctggctagtgcccactgtattagacagcgagggtggaagccacccgctcatatcataggaagaaacaggcctagagaagtgaggtaaggtgagcaaggattggaggtcctctgatacccagtcctggtcttttaacattcagagttgggactagtctatccgctttttttttttccagacagggtctccctgggtcacccaggctggcctgcaatgatgcgatcgcagctcactgcaacctcgaactcctgggctcaagcgatcctcccacctaagcctcctgagtagcatgaactacaggcgtgcgccaccacgcctggctaattttatttttagtagaaacgaggtttcaccatgttgcccaggctggtctcaaactcctcaagagcgattctcccgcctcagcctcccaaagtgctgggattactttttttttttttttcgaggcggagtctcgctctgtcgcccaggctggagtgcagtggcgtcatcttggcttactgcaatctctgcctcccaggttcaagagattctcctgcctgagcttccccagtagctgggattacaggcgtaagccaccacacactcggctaatttttgtattttcagtagagaaggggttttgccatgttggccaggctggtctctagctctgagctcaggtgacccacccatctcagcctcccaaagtgctagaattgcagacatgagccaccgcacctggccttactttttgttttttgtttgtttgtttgtttgttgttttaagaagacttttttttgagacactctcacttcctcacccaggctggagtgcagtggcgcaatctcgggtcactgcaacctccgcttcccgggtttaagtgattcttacgcctcagctacccgagtagctgggattacaggcctgcgccaccatacccagctaacttttgtatttttagtagacatgtggtttcaccatgttggccaggctggtctcgaactcctgaccttaagtgatctgcctgcctctgcctcccaaagtgctgggattacaggtgtgagccacttcaccaagcctaagaaggtagtttctaggtgaaactggcagctttccgacatcttgcatgcacattaaaagttgaaatagttcaaatgacttaaactcatgtattttactgcaaaccctagagctctgcctatcactgccaagtagacatgtagtaaaagtcaacaacccatctgagatcctgatggacctgagaagctctaattctagtatctacaacatgtcacatgtacatattaatacaatctccctcctaacctgaaagcttttttttttttttttctttttctttttttttttttttttgagatagattctcactctgt

SEQ ID NO: 1241298 - DNA, 4001 bp, Homo sapiens
ctgtcagaattcatagaggtacatttacagaggctaaattttactgtatgtaaattatactgctgtagcctaatttttttaaagtgctattgcatataaaacaatgtgctagacactgaattatgaaatctaacgttcaagcatacaattctcaaggtttctagatgtattatcaaaaacttatcattaaacactttgagttcagccttcagtattttatattttatccatatttatattctataaaacgactcaaagcatcacctaaaattatcacatgaattttgaattattatgtgttcaacatacacttatagaaaatttccttcttattcttaaaagtgaacatatcaatatctattaaatgttaattatatggttatgagttgaatttactactaaattctaccttttctgaattataaatacattaagaaatgtaaactgtgattagatttattcacatccctcagaacactacgaaatgtgtcctaaacatgttaattgatttcagaaacttctatgtcttgagcaagacttaagtgttaacaagcatctgatggcttttaaaataagaatgtttcagaaattcatctaaaaaaatgcttgaacgtaaaatgcaatcctacggtgtatactctaatgcctgttgatgaacagatccttatagtttccttcttctagaactcatatcaaaatacattttcttcagaaaaaataggagtcaaagatgttaatcatgttcttttcatagtcacgttacatttgttttacaacactctcagaaaagcctttcctttcacatgttcactttttaaattacaaacatgtttcccctcactagacaccgagttacgaaacttagagcaaaagtaaaactttctaatggaatgcccatgtaaatactagaaatataacaaaataaggcaaagtctgtcctccaaaatgttgcctaccacaccaaaacacaatcctgctttttaaacagcgagtaaaattaaatcaaccttatcttcctaaatagaagtccactcaaagttttttcacaaaaatgacattcacttgacttaatattgtccttccaataagaataacacgcagggtgttagagggcagttgttggactcctcttcagcaaataaaggagaccagttagagcttagcttggtctgcccaggaaaggaggaacgcagcttgctgacatggctaaggaatgccaattaatacattttaaaacccctatcatcttgcctgagacgtgtacatcttcccaggccctcaaagttcaatcagaaagtgtattcaactccattgtcatttcacccatagtggggaagtccatcgaggaaaaccatagggaaataaaatgtttttcagttattcatattagcacaatcaacccagagctcacggcacaaactaaataagttaacttgccagtgtcttgaatgaagacatttaatcaaagcatgcattttccaactttccagtagctttcaggacagttggttttggtgatcgttttttggtcttttattgttctcaacacgactggtttctcaccgcaggatttcaaacaaaatgagacaattaaaccacacctcgagcgaaggggcgcttaccttgcagataaacacaccggccttgccttctctaaaatgcggacacgtgcttttcccgcattagggggggtctcccggcgcgcgccccgccgccacctgttgaggaaagcgagcgcacctcctgcagctcaggctccgggcgccagccctgccccgcagccccagagcccgtcgcagctcgggtggtccctccccggcccagcgctcgccgcctgctcttcgccctgcaagtttcaagaggcagttatttctcgcagcctccgcgcttgcaactgcctcctggcgggggagtgggtgtccaaaaagccagcagctggagaaactgaaaagatcacaagcgacttaacgataagccccttcttccttttaaagaccgagaggagggtagaggggagtagtgcctgagcccacgtgaccgagccagggagcccgacggtctcaggaacgcccgacgccgcgcgtgacctctaagtgggagcaccctcgaaccgactcctggtccacccacaaggatagtggcgcacagatggcgctccccgcagccccagtctcagatttaagaggtctggagtagggcctgagaatatgcatttccaaccaggtcctgggggatgccgacactgatacagccagtctggggaccacacttcgaggatcacgtcctcagcccctgactcacataagtgtcattcagaacagatgtctgattctaaggagccagtggtgaaaccagagaggctttgggtttgtcaaatccccagcagcaaacgtaacctcgggccctggagtggcaaagccgtggactagaggtggagggagtgggttctcagctctcaagaggtcactgggaaggcctttcgcgttagatcaaagatcccaggtacttcctcgaactcacttgaagtggcaccggggagacctgtgcctccggccacggcgcccttctccgctggaggcacctgcccacccctcttctcgggcgaaggcccctcgcgccccctggtggcagccccagttcccccagcttaatggggtgttcccctcacccaccccagcaggagccccagggtgcgagactaggaccacagtcttaactggctttaaggcagctgttgctgatgaaaatgaaaaggaaagtagcatgtgacccacaggccattgtgagaaccccccagtgtcacatctgtgcctaattaatcatcaaaccatctactcaggtggcataagggacatggtttttgagggttgtgatccagatctctaatagaggaagacgagggggggcatttggagggaaagttttacagtaccagcctcagctgtttggtgtttagccaaaatagagagacgcaagtgtgctctgggttgataaagatgaggtccacaggtaatgaagacaggctccaaagatggagaagcatctgcttcatcagctaaacaatagctgtgaaaagtctccactgccccaccctaagtccaattttcattaaagctgagagtcctggtttctctcaggttgaaaggcagagtctccctgtccttgaggcagagaagttagtttggacgggaagagtgtgtcgctggcaaataactgcagcagacaacatgccaatctcagcctccctgtctcctgtcctggggtctctcaaagtacccagtccccatatgctcttcctccttgccaccttatggagaaaatgttaaatgatggtttaaaaaaatcagcttcatggccaggcatggtggctcacacctataatctcagcactttgggaggccgaggcaggtggatcacgaggtcaggagtttgagaccagcctgaccaacatggtgaaacctcgtctctactaaaaatacaaaaattggctggacgtggtggcacatgccagtaatcccagctactcaggaggctgaggcaggagaatcgcttgaacatgggaggcggaggttgcagtgagccaagatcgcgccactgcattccagcctgggcgacagagcgagactctgtctcaaaaaaaaaaaaaaaaaaaaaaatcagcttcatttggtggtatatacttgttaacaagatatctctggaaatggaaaccgtcatgaaggaatttcaaccataagccaacaggcagaaaaagataggtgagggtgaagaaaatgcatctatcaatattaacatcatacctgacgctgtgctaagcacctgcacagcatctcatttaatcctcacaccagctcagtgagatattgactccacttttccagtgaggaaattgaggctcacagagcttctgtcagctacctgaagccacctagtgagaaaggaacccagtaacaacagtggcttcatagacagctaccgcttattggacatttatgccccgc

SEQ ID NO: 1241299 - DNA, 4001 bp, Homo sapiens
gtgagacaagaaaaagggggaagagaagagaaagggagagagaaaaaagaagagagaagagaagagagagaacaagcaagtgcctggcctggaaaggcttggaaggaagcagaggctcaatgctggaccacaggcaagaggttcataaaggaacgaaaagtctaacaagggatccccaggcagcctccaaaacacatctggctagttcctgatgttgccaggcatggttcttttggaaagggaatggtaaaggtattattgatttataaatgaaggtaattatataatggattaatttgcccaaaaattagcagaactttgattataattcatgctcagaaacaaaatatgtcttcctttaaaggaggaaggagaaaaaaaaaacaaaccattactttaaaaaagttatccacaatgtttatattctctttaccaatgagtaaaatgtttttaaaagaagaaaaataatggtgcaatgttactgtctcaaagttttatgataatatttgaaagtagtgaatttcaatatccaacatgcccttagtacttttagatttttatctccccctctcctttctcattatactatccattcccttcatacctatgattatcattagaaatattaataattagatggaaataatccattatgttaccttgcatttaaagagtacacatatcctttttaacttcagggaatgtcaactgaagcctaaacttcaatagtttccaccaatctttatataatgttattattttagttcatggttaaaaagcttataccaatcatctatcttttcatgcttcgcatgtctagaatttcatttaagttgtaatactatcacagttacttttatcctggaaacaatttgtcatgaacattaaattgtggtttcactataagaagactttgaaactgaaagtaaagtaaaaattcatttttcaaatccaaataactccattaagagtgacttaagttcagaccaggcacagtgttcatcacgtctgtaatcccagcactttgggaggccaaggcaggtggatcatttgaggtcaggagttcaagaccagcctagccaacatggtgaaaccctgtctctactaaaaatttaaaaaatgagctgggcgtggtggcacgcgcctgtaatcccagctactcgggagactaaggcacgagaattgcttgaacccaggaggtgaaggttgcagtgagccgcaatcgtgccattatactccagtctgagtgacagagcgagaccctgtctcaaaaaaagaaaaggagtgacttaagttcagtatttactgtataaagacaatagtcatgatagcaaattctccccacaacactgatgtacacataccagtttttaatgagaactaaaatatcagaatagaacagggcatcctgtgttttgggtgctgtaagtaaactatgtaattaatacaataaagaccttgtctaacatattatttccttctcactcaaccataaagtgatttgagaaatggctagcaactataattcagaatgaagactggacttacctgtttacaggtaaggtgtgttctagcgatcttgcttcacaccagggactcttttgaggttccgcatacagatgtgataactggcgatggaccactaaaggagaaaggtgcccaggtgttggccacaacacatttgggcttgtggtctgccgaccaggcccaccttccaagttagtgacattgctgggaatgctgtaattcatcacagcagggctatagaatgtcatggctggatattcatggtggctgtctacataggaggaaggtatgtatatggagccgtgctccaggggtaagatggattgactgcagttgtaggaggaaggagaattaaggctagatggtgagttttttatatccatgtcttgagataacagctgagaaaacaccttgcaagaagaggcacaaaggtcattataatgttctcaaagattcgtgggcaagtataatggctgtaaagaaacacagaagatattgccaagttagagctacagctgttaactatgaaaatttaaatattttcattaaaaaaatacatacgtttgtatgagattacaaatacatcctgaaaaatatacatgaaaatattaacctcagaggagtgggaatgtgaggcatgaaactcacattttctgcttcattcatctcttcattgcttgtttgtttaatcaagagtttaagcacaagagtttaatcacgaaaatttattataaaatagtctttaaaaccaaaaaacacaggattaaataaaaatgaaagttcttatggaaaaataagcaagaataaccaagtaaacgctaagagaagatcaatgagcaaggctagtctcaaccaatattaaaatacgctatgaggccaagcgtagtggctcacgcctgtaatcccaatactttgggaggctgaggtgggcagattacttgaggtcaggagttcgagaccagcctgggcaacatggtgaaaccccgtctctactaaaaattagccaggaatggtggcatgtgcctgttgtcccagctactcaagaggctgaggtgtgattgctcaagcccaggaggcagaggttgtagtgagcagagattgtgccaccgcgctccagcctgggtgatagagtgagaccctgtctcaaaaaaaaaaaaaaaaaaaaaaaaagagagaaattaccatttccgaaaaaagtttttaaaagaaagaaaacacattatgaatctccaataataaaaaacaatgggtattagctgaagagactgaccagtgtaactgtgtcacttatcaatctgttgcttctcagttttgttttgttttggttttgtctttgtttttgagacaaggtctcactctgtcacccaggctggagtgcagtggcatgatctcggctcactgcaacctcctgcctcccaggttctagtgattctcctgcctcagcctcacgagtagctgagactatgggtgcgcaccactgtgactggctaatttgttgtattttttagtagggatggggtttcaccacgttggccaggctggtctcaaactcctgatctcgagtgatccacctgcctcggtctcccaaagtgctgggattacaggcataagtcaccatgcctggcctacgtatcagttttgaatgtgcccttcaatttatgctctaaaaaacagaatttttgtatgtaaagtgagcacaaggctgggggtgctggctgattacaggcaaatctttttttttgagatggagtttcactcttgttgcctaggctggagtgcaatggcgccatatcagctcactgcaatctctgcctcccaggttcaagcaattatcatgtctcagcctcctgagtagctgggattacaggcatacaccaccacactaatttttgtatttttagtagagacagggtttcaccgtgttggccaggctggtctcgaactcctgacctcaagtgatctgcctgtttcggcctcccaaagtgctgggattacaggcatgagctaccatgcccggccacagtaatagacaattaatacaatatctgaggggtaattcatcactttctttcccaaaaccactcatttcctatttgtgttaatagaaaaagcccatcatagttacctttgacttctccccttgactcagttaactttactcatcaaggcacattggctttttttcccaatgccttttttccactgtcttttgctgccatcttgaagtaagctctcattatcgcattactttttttttttttttttgagacggagtctcgcactgtcacccaggctggagtgcagtggcgcaatctcggctcactgcaacctccaccttccaggttcaagcgattcttctgcctcagcatcccgagtagctgggattataggcgcccgccaccacgcccagctaactttttgtatttttagtagagacggcgtttcaccatgttggccaggctcgtcttgaaatc

SEQ ID NO: 1241300 - DNA, 4001 bp, Homo sapiens
cactggactcttcttttcaatcttccctcctgtttccttctcatctccttgaattctaaacactgcagtgtcctaggcatcggtatttggttgtctccacctaaacctgttcctttggtgggatctcatccaatctcatgaatttaaatgccatatctccacttggatgtctaagaggcaaggtatttaaaaacatttaaagccaaacttatgattgtacccccaaaacctggtccttccagtatcaccttatttcaattcagtaaatcacaactctatttttgcgcttgctcaaatcaaacccttgctttctttcttatatcctaacttcctctcttcattcagatttttctcatcagattctgcctcccactgccattccttgcccttttaatttacctattaaaaaaatagatgaatctctaaaactatatatttctttacttgatcattgtcctccccaccagaagatgagctgagggcaggaacagttcactacggtatctgattcaataatatctctagcacctatagcagtgttcttggcacagagtggcactcaataattatttgctcagtaaatgaatggcttgtactgttcacactcatcagtaccatggttgaaaaccaagctgttgaggtagcaagggtaacaaattgagagataaagcatctgggtttggggcctagcccaggcacaggtatgcagctgtaggcaacttatccttcaaagtcgatttcatcatctgtaaaatggggtttatgcatttcctcagcataaaaaccagttgaaatggtcaatatctacttggtattacaagacacaaaagtttcactccctacaacttaccaggaatatttgcttcaattcccttcttaatttcacttgctcaggtataaaacaacttaagtggacattttcagaagctcttatattacactgtacctctaaaatatccgcttgtgcaaactttgagaactgtaaaagcaattaccagaaaaaaaaaatcacgattccttaattctattatgctgatggttgcaccactctgtaaatatgctaaaaatcattgaatccattaaaatgggtgaacgttatggtatgtacattatacttgataaaactgttaatcaaacaaaaaagagattatctaattccatatgtgggactactataaaatatcctcagaatataggaataagaaaaaaatactaaaagccccccaaatttttttaaaagtctgttttacatgagctctgccagtagttgaaacaggccaccgtcagaaacggcttgtaaaagaaacccggtatctggtcaagtcctaagtgacctgaaccacgcaccttcagaaccatattgggatgactgtaacctgagcgcggttcctccagcagagcaagcacattcatcggactcagtaactcaaggggccagtcctctccagcatcccagctgccgccgccctgtcaggcttcccaggcaatcgcccatcttattccttctccagtgtggacgcctacgaggagggagcgtcccctctcgacagttaactggcatctagcttatgaagcccgcgtggattctccaaccccagacctgctggggggtggggacgtgcgggtgacaaaatccagactacgaccctccctgagccctggcaaccccggggtgaccccaacacagagggggccacgcgcgctccagctctgacactccttccagctcggcagggcctgaaacagggggctgcgcttcacccactgctgagcgtcagattcagctgaggagattctaaaagcgcggtgctgggcccagacccaggcactccagagcagaacgcggaggggcccgaccccagtctggcggcgcaggtgtgtgacaaagtcggaaggcgcgccaagctctccagttccacatctgctgtagagtccagcgcccgccacgctcccgcgcagggacccgcccattactgcctggaagccgggcgccctcacacttctgcaccgcgtccccagagctgaggagcatccgggagactcgccgcccgaacccgcgaaactgtcctccctcccgcgaggccgccccgtccccctccccgcagaccgccccccctccccgcagaccgccccgtccaccccccgcgaggccgccccgtccgcccccccacccggctcctctccctgattggctcgaatcgggcgggttccggcgtgggtttcagcccctcttcaggcgggtttctagccacatgcaaaggtgctttctggcccggctcttttcacccgccaatcatccccttcagccagtcatcaccgacttcctccacgttttccttgtcctctccggccggcagtgtagcagcagcaactccctacgttgaagtcgtctccctccgtccccgcccttacttccttttcccttaaggacctcgcgcgcgcttccatattcagaggggcgcaggcgcggtagcgcggcctcccgagctgttgtaagcaccaggttgcggtggaacgtgcaccttcagttgggctgcacggaaaagtggtctccgcataaacagttgcacttgcccctagggaatgttggaccacaggaggggacctgaagtacgatgtacaggccctaatggtccctctgtatggaagcgaacacttgcaggggaggggcccagcgggataggccgggaacaaggaggcagatctcagcctgccacacctgaagacaagtaccttgcagctgaggaatggggccccaagcagaattttactgttggctgtgcccctggctcctgttctggggcaacagactcctttatttgaccagaaaacatttctgccagcctacttgtggctgcctgaaaccccataattcagaaatccaggccacgatttctttctagttttgagataaagaaaattcgagtttagtgaggtgacaagacttgatcaagggttgcaagactgattagtgacggatgttcaacaagaaccaagttctccttacaagcccattgctttctccactgttagtgtattaccattttattagtggaactccatgctctcccctatttgccatctcccagtcctggtcctagagtagtagttgttgttgttgttttgttgttgttgttgttgttttgagacagagtttcactcttgttgcccagctggagtgcaatagcacgatctcggctcacggcaacctccgcctcccaggttcaagcgattctcctgcctcagcttcccaggttgctgagatttacaggcatgcgccaccacgcctggctaattttgtatttttagtagagacggggtttctccatgttggtcaggctggtctccaactcccgacctcaggtgatctgcccgccttggcctcccaaagtgctgggattaacaggcatgagccaccacgcccagctcctagagttactttctagtttggcctcagaaaaattcagcactccagttgacctctccctgtccaaccccaaatgagatcgaatgcttaactaatggatctgattgccatacttaagccaccattgttcatttgggtagtttccagtttccggcaataatgaacaatgccaccgttagtaatattgtaaatgtctttgtatagaatatgcacacatttctggccaggcgaggtagctcacgtctgtaatcccagcactttgggaggctgaggcgggcagatcacctgagttcgggagttcgagaaatcagccggaccagcatggagaaaccctgtctctactaaaaatacaaaaaataagccaggtgtggtggcgcatgcctgtaataccagctactctggaggctgaggcaggagaatcacttgaacccagggggcagaggttgcagtaagccaagatcgtgccattacactccagcctgggcaacaagagcgaaactctgtctccaaaaaaataataaaatttaaaaatttaaaaaagaatatgtacacatttctgttatatatgttaaaa

SEQ ID NO: 1241301 - DNA, 4001 bp, Homo sapiens
aggggtggagtggggtgggcagggttcttggctttcttcagtcctaaaatgcagtcaacaaatcatgatttattttactgctcacctagaggaggggctgtttgtaatccatgctcagcaagagctctaagccaccccttcactaccctccaccccagtactagtacccccaggtaggcaagtcagccaaaaggaaagtggacaaaagctattagatgcagtaaatgtggaggatgtaagatgacagcagctcacgttgtttttgtgacaaatgcctttaaattgatattcattacattcacagcaccttatggctaggagggactcagagaaccatttagaaccatcatcagatttgacaaaggaaatttgtaaatttctctatgtggtgaagtgacctacccaaggtcacacagagaatatctggcaaagcattccatctgtggtcactgaatttctacttattcaattcctaaatcttaaaagacaagtttttcttttcttttctttctttttgagacagggtccagctctgtcgcccaggctagagtgcagtggcatgatctcagctcattgcaacctctgtttcctgggctcaagccatcctctcacctcagcctcccgagtaggtgggactacaggcacccaccagcacacctggctagtttttgtatttttagtagagatggagtttcaccatgttgcccaggctggtctagaactccttgcctcttgtgatctgcctgagttggcctcccaaagtgctggaattataggcatgagccaccatgacccgccactctgcttttcctactccctccctccctgagtttgagctcttccctaagaaaaatgatgacaaacaagaactgtccaatacaacacgctccacacactctttacctggtggacagaggggacacaggcttctgtgtcctcacccttcccccagtgggtttcctgggagggaaaaaggaagcactggtttgtggatgccgatgtcataggctgctgtcctacagtaagcaatgctccaggtggcagataattaggaaaaattttcacacacagcctagcccactctgtcccccatgcctctatttccctgggtacaaaaagcactgagtatgtcagagatctagacaaacacaggttcccactaaccacccgccctttcccaccccagcctgcctaagtcctcagggtatgccatcctactccaaggcccagatctcaagggtcactagagcagtctcgtcatgatatatgcagtctaacccagcacagcaactcttgccagaggtcgggtgaaaatctccactcttaatggaatccagtcttggtagtatcttccctctcttgaggcagcctccccagacaccagccatttttgcacaaatgaggcagcagcaagcagtgtctcttaggtcctcaaatcccctccctgccatatgctcccctaggaccaacaataggaggatacttcctccacctttcaagccaggcaacttagcagaagctggtggagccagcttggtccccaggagagtagaggacttgacggcttcctcactaaaagacaagacccaacaggcatttttggagaatctgccacatgctctctaaatccagtgagtgtaggaatgctaactgtttgtttatgccatccctgtccctcacccatccccattttcctgaagccaagcttccaggtgggaatgataccttcagaaacacccacagtatgtagccacttcttaccaccagcccaggaaggggaggatgcctccgtggaatggtctgagttgcaagccaagctcatttctcttccaccccagggtgagggctagggcaggtgtgtccaggaagagcttccattgccagtccacagtgactaaggtgggcctggcctagacagtgagcctaacctgcgcatctctgaggacagtgctccatgggctcccggccaggggaaatgtccctgaccacacctctctgcggacctgctgtcttcttacatgcttgaatttgggggtgtggagttatatccctgagtgatggtcagcagactgctagcccattggctggcactggtcccaaggatcataattaactgataacgctaatacaatgtgagtttgtgctctcataatagtctcctgctgacagataaatgctgcggaaacatgatggcttttcctgaagccgtaatgggccattactggggcaagaaggctcatgtcctattagcactgctgccacgacaccaaggataaaatatgaagggggcatcttgagtggataaatgcttgggtgccctcccaccactggcgtcatccatttcgttatctgaaatccctaccaggggtcttggaataacttccagatatttcaaagctccattcgtttttcttttttctgagcctcaagatccattctcaccaccacagctgattgatatattaaagttctctctttaccatagattctttcttcctgtaggccctatacaagatggtagctgcagtgagcaggcaggttggaggatgaggaaagtgagatttgtctctccatagaaacaaaaaatctttttttttcctaccaactaccaggagaataggagcacattatgactgtaatagctttatcccttgccaaatttctaagggagaaaaagaggagtaggagaagcacaaagagaaaatgaaggaggagaagggagatcagggggagagaaagaataccatacctcgatagtacctggtagctaagaggcattgaacaattagctgttgactgaatgaatgacctgtctcattaaatattttccattacagtggattgtggagttttttcttataacaaagaaacttgaccttatttttgtccgtgtcacatattacattatcgttcagtttcttgtgactttggcgacaattttttttttttgagacagagtttcactcttgtcgcccagactggagtacaatggcgtgatctcagttcactgcaacctccgtctcccgagttcaagtaattctcctgcctcagcctcccaagtagctgggattacaggtgcccaccaccacacctggctaacttttgtgtttttttttttttttagcagggatggggttttgccatgttacccaggctggtctcgaactcctgacctcaggtaatccatccttagcctcccaaagtgctgggattacaggtgtgagccaccatgcctggctttggcaacaatttgagcatacatagttgattacaaatagtaatgcaagcaatttgtttctagggtctcatcactggtagaagaaaaagttctctttggctgatgatagttttaactgcaaaaatcccatggtcagcaatggccacagaaagaataaacagtttctttgcaaactcacagattatgcctccattttcatgtctattctaaaagataactattttagagaaaccacaaaatatgggaaactttcggaaaattaattctaaagcagcacacacacttgtattgttgttaagtgcaaacaaagaaacatgttgacagagcctgtctccctagtatgaatgacagaaaattcaacattggggacattcaaaggtgtttttatttcctaatggctcaattaaggtagaacttcattgtacccaattattttttggaataaaatgcattttatttttgctctagtaaaatgttttgtggagagaaaaaaaaccagcaaatgcttccaggttttaggaaaaatcaaacatcgaggccgggcgtggtggctcgtgcctataatcccagcattttgggaggccgaagcaggtggatcacctgagctcaggagtttgagaccaccctgggcaacatggcgagaccttgtctttacagaaaatacaaaaattggccacacactgtggtgtgtgcctgtagtcccagctactcgggaggcttagcaggagaattgcttgagcctgggaggcaaaggttgcagtga

SEQ ID NO: 1241302 - DNA, 4001 bp, Homo sapiens
tcatgcactcaagagaattcccagctcctaatccagtcagggcttggaaactgtttcttgattggtgggtagccagagctagagctggtaagatatattttcacatttaaaaggtcctttgtatccccaccacaggcgccacggtatccccatgtgtcagtcagcatgaggaaaaacgaaaagttcacagctcctatggctgctgaccttgcagctccacgaacgctgcttccaccaggactgtcactatggtgccaggccagggacctgtggcagagtgcaagcagccttgtacgggggagggacgcaccagaaaacctgggcttttgctttggttcagccactactccgctccccgtacacaaattctgctccacactgggcctcaatttcctgatctgcgcactcaagagctgggctagattagtgtaatcttcagacttgaaagtcatcaccaccaccaacaatgactgttttttctcaatgaattatcaaggaatacatagaaaacataaaagcagagttattttggctgaagtggagaataaggtgcccaaaacatcttatctactgtagatcacctccaaggtcttttcaagatggaaatttctaggatttctacgattttaaaattgaaaaagaaattgctgtgcctcatttacttttgatataattttctgcaattagtaattgacacggtagaataagctgctagaagttttcacaatgtaatttacaactgaaaatgactttggaagttgatatgcctttgaaatgaaaagcattctgttttctaaagctccactcacgagtcctctaaagttaaaggaaagttactaaaatgacaggatcagaaataaagccaactggaaaataagcagccctggacaagttctacctatcaccacgtcaattttaacaactcactgcaagctgcttctgtgcctgtgtagcgtgctgcgaaaaccaccggatgaggccaacctcgttaaaccctggttccattccttccccaacctgccatgtgaccttggacaaaccccacaacttttcagaggttttctcagctacgaaacaggagtgatgacagcgttctcatcaatctaacacggctaaaagattcaaataagaaaactggcgaaatggcactttggaaattgtgaaataattttcaaagtgagggattgttactttatgctaaaaaacaaagctgtcatgagtcaatcaaacaaatgccccaaaccccacaggataaaagtctgtctgtcctatcatctataatctttcagagttgtagggcaggggagaggcaggtccaaaatgtaatctcacctttagagagaacaatctcaatgaggagtgcggtttgtagactggctggtattcacacatgtgctcaacagcaatagcctaagtccacaagtctctcaagtggagggtcaggactcttgctattaagttcatgaagttcctatcataaaaagaaccctctctgcctatatttagaaaaaacaaccagtctcgggtcattctagagagaagggccaggactcaccaaatgtacctctgagctaaacaacaattcccctagatggctcagaccctcctccctataatgagaggcaggtgctaatttctaagtaagtccttgactcagaagccattaaaggtcacaggcatcaagagacacaggcctgtgtaatggaaagaccagcggctagagagggagcagactgtcactaacctgctgtgtaacctcatgtaagccccctgccctctggtcatggacttctcgatcagtatactaaggggacctgagataatttctacagcccattcaccgttaagattctaggtttcctcttgacatccctctgtcccctgcactggttccaatactcaccttgtggccatggctgaaaagtggcagcacagggaaccctgaggaggcgagtcctgtactcccaccagcctatgttgatcagaggaccacagaccctctgaagacagcaacttgatttttatagcctacttaaaaccaaacaggaaaaggaagctgaaccagagacaaaggggaaacaaacccaagtgaaaaactgaaacctaggtagaaaatagagaaacaagaagctaacactgcagagccccaccagcgtgggcggctgagaggcactgcacaggcccaaccccccacagctggcaacctcaagcctctaagtgcttcctgcaagggtgcaagggtgggtgaagcctgctggaggtaggggccaggtcatggtgctggccccccactaactagctctatagtctaagtcaatgccacttaagatgtctgagcttcagttttccatctgttatagaaagtgcaggctcagcacagatgacttcctataggccttaagaaaaggctacaagaactcggaagagtccccactgactctccagagaatagaagactagatgataaaggctataagctgatcaagtctttttttcttttttgagacagagtttcacactcctgtcacccaggctggagtgcaatggcacgatcttggctcaccgccaccacagcttcctgggttcaagcgattctcctgcctcagcctcctgagtagctgggattataggcatgtgccaccatgcccagctaattttgtatttttagtagagacggggtttctccatgttggtcaggctggtcacgaactcccgacctcaggtgatccgcctgccttggcctcccaaagtgctgagattacaggcgtgagccaccgcgccaggccactgatcaagtcttcatatttgactctggaacaaaatttgtacttctaccgaggagacaactctctctaatgatgacatttaagtcagcaatttagagcctgaaaggaaaacacttgaggaatactggaaacttggctttgtcacttgtttattaagtgggtggcctcaactgtaaaatggggttatacttattttgcctatctccacagggttctcatgaaggtaagatccagtccaatctttctttcaaaatctactgagaactcactaagaagcatgcactgtgttagaaatcacagacaaaaaattgagaacgactgtacttgtccttaaaggacttttatggtttagaaaagaagaggttgataatgttagcaaatatttaatagatccattaaaatattattgatatagtgaaaaacagctgtacagagtacagtacaaaagaagtatcagttctaattggagagatgaatgcactttgaatgctaaaaatgcattttaaaaggcttttaatgatatacatttccctttaagcactgttttagttgcaaaccacagtttggatgtattgcagttttcttttttcttttggttcaaaatatttttaattttctctagtgatttcttcttttatccatggattattgataagtgcttcgttaaattttgaaatatttggtgttttcctatatctgttgctacctatttccaatttaattctactggggccagagaacatatttggtgtgacttcttcctttgtttttcctggtatgatctcaatcctttcacatttatcaaaatgtgcgttatggcccagcatgcagtctaccttggcggatgtagcatatgcacaaggaaagaatgtgtattctgaaactggtcgggtgcagtgttctagaatgtcaattaggtcatggtggttaatagtattgttcagaacgtctacgtccttgttactttttgttgctgttgtttgtttttgtctaattattctatcaactgctgagggaaaggtcctgaaatcttcaactgtgactgtggatttccctctttaattctgtcactatttcttgaagctcttgttaggtacatttttccatgcagcattggttttctgcggctgctgtaacaaattaccacaaactgagtggcttataacaacacacacttattatcttagagttttgtaagatgataggaggtcagaa

SEQ ID NO: 1241303 - DNA, 4001 bp, Homo sapiens
atctcaatagtaatcaggggaatgcaaattaaaacagcaaagagaaatcacttttccatccatcagattggcaaaaacaaaaaagatcgataccattaaatgatcaaaagagcatggtgggccagacacggtggctcacgcctgtaatcccatcacttcgggaggccaaggcaggcggatcactcgagtttaggagtttgagaccagcctggcaaatacggtgaaaccccgtctctactaaaaatacaaaaattagccaggcgtggtagcgggtgcctgtaataccagctactcgggaggctgaggcaggagaatcgcttgaacctgggaggcagaggctgcagtgagctgagatcacgccactgcactccaacctgggcaacagagcaagactctgtctcaaaaaaaaaaaaaaaagagagagagaatggaggaaattattatccaccgtgggtggcagtttggcattcctaaatccccatactctcccacccagcaattccacctgcaggtacccatccttgagaaatgctctcacatgggctctcacagaggtgtgtgggaaggatgttctccgccatactgtgtctaacaatgaaaaactggaaacaatctatggaatcttacataaccatggaatttacagagcaagtagaaagaataggtagatctctaggtactgacaaagaaaaaattccaagacccgtttttaagcataaaacgtcaagttgtgtaatgcataaaacatgcatatttgtaaaagtttaaagcgaaatcttacaaacatatatcttatacgtacacatacttgtcaaataaatgcaaagaaaaatacacacaaactgacaacagttcttattttgtgggaaagggactggtaaagaaggtggagatggaaaaaaacaaaatcaaagaggatctgtcttccacactccccaccctcaccaccaagaacatcaagctaagaaagatctgtgtttaaaatttttacataattttgttacaaggctttatgcacggactataactagaatattttaaaaatacatttttaaaacaagctcaacttgaccaaatttaatccatcttccccgctgcgccccaacccgcacttcctaattcctatgattaacaaaacctttcaattccttctatccttggaacagaactaagaaaataaagtataatttcaattttgtgtttttgaggagagggtatataaaggagtttgaatgttggaatcatatcaaaagcttatcgggggattggtttgtttgtattttaaggagcagatgtcaattttgtaataaataatgattaaggttcttagttttgatccatcccagggatgtgaaaagccaaagaggtggctcccggcaaggcccagagcagggtgtggtctgggaggacagggatggtagcgagggtggcggctcacacgaatccaggagagaaaacagcagctgttgccgcgtcgaacccgcagcgcccgaggagctaccaggtgccgcgggcggggcctcctttttagctgactgggacacgcagcctcgaaggtctggtagagtctcccagggagagggtaagggggtcgaaaggagaggcccaaggagggcgtgggaggccgcgggcaggggtgaggccctccttgcgcacctgggtgctgaaccgccccgccgtgtgcgacgggggcgagggggtcacgccgaggggcggggagaggggcagggccaactcgctccgggacagcgggggccccgcaatgtcacccccgtacacggtaatatccccccgctccacgacccctcttagtctgcactggaagcaccccctgccccgcgcacaatcctggtgcaaggcttcgccggcttctgagcctcacttacctgctgtctcggactgggccgcacacctgcagcgggctcacgttaaagacctggaacctgtgcggccgcctgcgcgcacccacccggattcactagggccgtaaccacttccgttcctgcgacaggcctggaggacgtaatcccagctggcgtgtgggaacgggcaacgccattttgtacggaagctactggggcaggtgatgcctacccagtctctctcctctgttgaacaaaggatctgttaaaattggaagggcttaacgtcttcttcagaaaagtgacgcatttgttactgggatggtatgtttgtgttttggttttggctttgaagggagaaacctccagaactctcacaaatgtaatatgggacatcgaattttccttctttagtatcctgcgtactgtttttctgctaaacgataacagtaaatagaaggaaagacactgtatttaaataatgtagtcttcattagcagtgcacattatcctatagccactataataattttatgtaccctccttttttttttttttttttttttttgtagatactgtctccctacattgcctaggctggtctcgaactcctgggctcaagcgaacctcacaactcggcctcccaaagtgctgggattacaggcgtgaatgcccaacctatgccatcttttatagcgataaccacaatactttttgtttatatattaaatcgttcatccaatcagtctttattagcaattatatgtgaggcagttaatctgtgctacatgcatgcttttcctttctcatggaatgtgtaaaacagaaggagaaatgagatgtgcataaataaccaatataaggtataataatagctaccatttgttgactttgtgctcacctgttgctaggaactttgcaaagcattttacttattttttctcctttaatccccataacaaccctgtgaggcagtactattattagtgccgttttacataaaatagaaaaaggttaaataacttcctcaaggtaattcagcaagtaagcaccggagttaggaatcaaacctcatatttctgattgcagagcatgtggccccatcctttatactatattgccttcaatacaggggcaaatgttttaaattccattgaatgagtacccatgggggaaatttccagctattatagaggattaactccctgaatttttatctgctccatcttgaaacacttaaaaaacaaaggataaagaggaaatgcaaattaaaaccacaatgagatatagctaaatgaaaaagaaaatgtcaagtattggcaagattgtggagcaaccacaactctcatatgctcctgaagggaacataaattgatgcaatcactttgtttaactgtttggcggtatcaactgaatctgaatatgtgaaaagactttgttccaacaatttcacccctagctggggcacagtggctcaacgtgtcatcccagcactttagggattttcactgtgttgcccaggctggtcttgaactcctggcctcaagcgatcctcccacctcggcctcccaaagtgctgggcatcatggtgtgcacctgtagtcccagctactccagaagcttaggcaggaggacgtcttgatccctggagtttgaggctgcagtgagttgtgatcacaccactgcagtccagcataggtgacagagctagaccctgtctcgaaaacaaaaacaacaaaaaacaattttactcctagttatatatatgcaactgaaatgtctgcatgtattcaccaaaaggacatgtacaaaaaaaagctcatacccatactttcaacagccccaaacgggaaactacccaaatatccctgctattagaagtcactgtatataatgattaatcttagggtagtaataactggaagggaacatgaggaggttcacgaagtgctgataatgttctatttcttaatctgagtgcggctttacatgtgtgttcaggttatatttgtgagcacttttctggtttcatatatacttcgataaaagggtttttaaaaatgatagtaaaggagtgaaaagtttgttaacccaaagaagaaagaacaggaaaggacatagtaccaaactaaaaaaaaa

SEQ ID NO: 1241304 - DNA, 4001 bp, Homo sapiens
ttgggaatgatagccacaaaatacaaacacacacataacagactgataaattaaaacctaaaattttaaactttgtttcaacaaagatgccatatagttaaaagacaagcaacaacttaaaaaagcaataagcagggagtaaatattataaacacatatgaataacaaaagatcaaaatccagaacatataaaatactattataaatcaataaggaaaagacaatccaatagaaagagatgtttctcaaaagaggaaatacaaatggctgacaatcatgaagatgttcaatctcaatagtaatcaggggaatgcaaattaaaacagcaaagagaaatcacttttccatccatcagattggcaaaaacaaaaaagatcgataccattaaatgatcaaaagagcatggtgggccagacacggtggctcacgcctgtaatcccatcacttcgggaggccaaggcaggcggatcactcgagtttaggagtttgagaccagcctggcaaatacggtgaaaccccgtctctactaaaaatacaaaaattagccaggcgtggtagcgggtgcctgtaataccagctactcgggaggctgaggcaggagaatcgcttgaacctgggaggcagaggctgcagtgagctgagatcacgccactgcactccaacctgggcaacagagcaagactctgtctcaaaaaaaaaaaaaaaagagagagagaatggaggaaattattatccaccgtgggtggcagtttggcattcctaaatccccatactctcccacccagcaattccacctgcaggtacccatccttgagaaatgctctcacatgggctctcacagaggtgtgtgggaaggatgttctccgccatactgtgtctaacaatgaaaaactggaaacaatctatggaatcttacataaccatggaatttacagagcaagtagaaagaataggtagatctctaggtactgacaaagaaaaaattccaagacccgtttttaagcataaaacgtcaagttgtgtaatgcataaaacatgcatatttgtaaaagtttaaagcgaaatcttacaaacatatatcttatacgtacacatacttgtcaaataaatgcaaagaaaaatacacacaaactgacaacagttcttattttgtgggaaagggactggtaaagaaggtggagatggaaaaaaacaaaatcaaagaggatctgtcttccacactccccaccctcaccaccaagaacatcaagctaagaaagatctgtgtttaaaatttttacataattttgttacaaggctttatgcacggactataactagaatattttaaaaatacatttttaaaacaagctcaacttgaccaaatttaatccatcttccccgctgcgccccaacccgcacttcctaattcctatgattaacaaaacctttcaattccttctatccttggaacagaactaagaaaataaagtataatttcaattttgtgtttttgaggagagggtatataaaggagtttgaatgttggaatcatatcaaaagcttatcgggggattggtttgtttgtattttaaggagcagatgtcaattttgtaataaataatgattaaggttcttagttttgatccatcccagggatgtgaaaagccaaagaggtggctcccggcaaggcccagagcagggtgtggtctgggaggacagggatggtagcgagggtggcggctcacacgaatccaggagagaaaacagcagctgttgccgcgtcgaacccgcagcgcccgaggagctaccaggtgccgcgggcggggcctcctttttagctgactgggacacgcagcctcgaaggtctggtagagtctcccagggagagggtaagggggtcgaaaggagaggcccaaggagggcgtgggaggccgcgggcaggggtgaggccctccttgcgcacctgggtgctgaaccgccccgccgtgtgcgacgggggcgagggggtcacgccgaggggcggggagaggggcagggccaactcgctccgggacagcgggggccccgcaatgtcacccccgtacacggtaatatccccccgctccacgacccctcttagtctgcactggaagcaccccctgccccgcgcacaatcctggtgcaaggcttcgccggcttctgagcctcacttacctgctgtctcggactgggccgcacacctgcagcgggctcacgttaaagacctggaacctgtgcggccgcctgcgcgcacccacccggattcactagggccgtaaccacttccgttcctgcgacaggcctggaggacgtaatcccagctggcgtgtgggaacgggcaacgccattttgtacggaagctactggggcaggtgatgcctacccagtctctctcctctgttgaacaaaggatctgttaaaattggaagggcttaacgtcttcttcagaaaagtgacgcatttgttactgggatggtatgtttgtgttttggttttggctttgaagggagaaacctccagaactctcacaaatgtaatatgggacatcgaattttccttctttagtatcctgcgtactgtttttctgctaaacgataacagtaaatagaaggaaagacactgtatttaaataatgtagtcttcattagcagtgcacattatcctatagccactataataattttatgtaccctccttttttttttttttttttttttttgtagatactgtctccctacattgcctaggctggtctcgaactcctgggctcaagcgaacctcacaactcggcctcccaaagtgctgggattacaggcgtgaatgcccaacctatgccatcttttatagcgataaccacaatactttttgtttatatattaaatcgttcatccaatcagtctttattagcaattatatgtgaggcagttaatctgtgctacatgcatgcttttcctttctcatggaatgtgtaaaacagaaggagaaatgagatgtgcataaataaccaatataaggtataataatagctaccatttgttgactttgtgctcacctgttgctaggaactttgcaaagcattttacttattttttctcctttaatccccataacaaccctgtgaggcagtactattattagtgccgttttacataaaatagaaaaaggttaaataacttcctcaaggtaattcagcaagtaagcaccggagttaggaatcaaacctcatatttctgattgcagagcatgtggccccatcctttatactatattgccttcaatacaggggcaaatgttttaaattccattgaatgagtacccatgggggaaatttccagctattatagaggattaactccctgaatttttatctgctccatcttgaaacacttaaaaaacaaaggataaagaggaaatgcaaattaaaaccacaatgagatatagctaaatgaaaaagaaaatgtcaagtattggcaagattgtggagcaaccacaactctcatatgctcctgaagggaacataaattgatgcaatcactttgtttaactgtttggcggtatcaactgaatctgaatatgtgaaaagactttgttccaacaatttcacccctagctggggcacagtggctcaacgtgtcatcccagcactttagggattttcactgtgttgcccaggctggtcttgaactcctggcctcaagcgatcctcccacctcggcctcccaaagtgctgggcatcatggtgtgcacctgtagtcccagctactccagaagcttaggcaggaggacgtcttgatccctggagtttgaggctgcagtgagttgtgatcacaccactgcagtccagcataggtgacagagctagaccctgtctcgaaaacaaaaacaacaaaaaacaattttactcctagttatatatatgcaactgaaatgtctgcatgtattcaccaaaaggacatgtacaaaaaaaagctcatacccatactttcaacagccccaaacgg

SEQ ID NO: 1241305 - DNA, 4001 bp, Homo sapiens
taatgaggtcggccacggatttgccttctgcacaggcgggcgagaagggcggtgagagggaccgccccaagacccgaacctggacgaagacctgcaggccacggctcaatccatcggggctggattgtctgtcctctgccagatgccccagcacagctgaaggcctgctccaggaacaacaggccccagctgccaggagccctcccttagagtcacctttgaagaggcagaacctggggccccaagcctggctgaacagagcaatttgggtcaacccctaccttccgcctggatcccacacccaccttccactcccggctgagccggacctgatagcctcatgctcagccctgattgcaggtctaatagggtcggagctcaggcagggcgtgtcctgcccgtgtccagctttacattcctgctgctccccactctccgccagcctccacccgacaagagctctccacctccatgtccccctcttcccaccccagtgtatcctcctctgggcaatccccctgacctcccctcctggtacctctgcgagccttgcaccctctgcaaccctgtgatcagctgtgtgcatggccctagtttgaccaggagccaggctgtgaaaggccatggagaggtggggatctagggccatgcatatctgggttcaggtcccattctccacgctgtgagacttgaggcaagtcactccacctctctgagcctcacttttcttatctgcccaatgggggggctcccattgcagagatgctgcaagaatttaaagtgcaattgtccagctgggcatggtggctcacgcctgtaatcccagcacttcaggaagccaaggcaggaggattgggtgagctcaggagtttgagaccagcctgggcaacatagcaagaccatatctctacaaaaaaataaaaacaaatttaaaaaattaggccaggcacagtggttcacgcctgtaatcccagcactttgggaggctgagggggcggatcgcgaggtcaggagctcaagaccaggctggccaatatggtgaaaccccgtcttactaaaaatgcaaaaaaaaaaattaaccaggtgtgttggcacgcacctgtagtcctagtgacttgggggcctgaggcagaagaatcacttgaacctgggaggtggaggttgcagtgagccaagattgcgtcactgcactccagcctgggtgatagagtgagagtcagtgtcaaaaaaaaaaaaaaaaaattagccgggtgcagtggcttacacctgtagtcccagctactcagaaagttgaggtgggaggatcgcttgagcccaggaggccaaggtcgcagtgagctgtgattgcaccactgcatgccagcctgggtgacagagtggagaccctgtctcaaataaataaagaattgcacatgttcgggggcagggtttggggagctagggaggacagcctttccggaaacctcagctgagctgccctgacctctggcccgtttcctttcatgcttcgtgttgtttctgaggcccttacctgcctcgggtttcagttcctcagacgctgccccagtggatgcctgctggctgacaccattcatgacccccgagggcacctcaggagtggcctgggaatggccggtagctgggccgtcattcagggcttgccggaaggaccggaacagggagcaggagcttcgccggaacaggcccgtatcttccttggagacctgggtcaaagcccgctggctggcccgggagaaggcctgcctcagggagcccaggcccagccttgtgccatccttgcggtgggcattgggctctttcctgctgcttgttcgccgggagccctgagctggagtctgtggctcctcagcctccttgggactctgcagctccggcccaggagtgtctgtctgtggtgatggcatcttggcagcaggagagctgggggcaagaaggagtggccataggagcagatgcagaaacctgttgtggccctgtggggcctggccacacccaggggcttggtcaaggaaggctctccagaggaggcagccctcaggctgtcaaaaggaagcatcaccaggccactctcttggcgagagccctcagtgtgccaggccgcagctgggcacggagatatagacagctgcttccatcaggagcctttcctgagaccatcccccaaaaagggtctccgcaggtgcccaccgtcactcggcctctgccaggccagaccctcccattagaattggaggagggcactgacatgcagttctggggcccagtccagaccacagctcacaacacccgagggcaggaccagcagccacatctaggccttcccagatgttaggtcctgaggcctaaaaccctccccccagcccccaccagctccttcactgccctccaggtccctcagctcacccgccttcagcccaaaaggcctgactactttggctcaacggggagggcagggacccccatgggagcccacccccttccctgggtgtcacagagcccgccgaggaggtgtggggcctgagggcagtggccaaggccaccctgcggcttatcatggccatgcagccacaggggcggcagaaggaggagcctcgggtctatatttaaccagggactgggggggttctcaatgctgtttcccacccattgcctctcctcctccccccactcctctccctctccaccatagcatgctctggcccctccccaacacagggaatggagggggtgtcccagggacatgggggtggctgagctgcggctgctcctgctcccccagggccctcggcaccgtggcctgccaggctccacccacacccccttccagcgttaggagctgtgtttgctttcctggctttaggttgggagaggggaggggcctcccacccaccccattgcacaagctgggccatgggtgggggagggcattaggccagcaaaacctcactttcctctgggagaaactggggccaaagaagggctggacctgcccctagcccagccccagggccccccacccaggtgccaggaccaaagcacccgcctgacccaccacccaacccttgggtgacatcgggcaggaagtgtgcctccccaggccccagtttgctgcggtggaatgacaccaaagtgggcagggcccagacccccacccaccctcgccctccagcaaggtgcctgctgggcccagctgcagcctacctaccttccttgaggttcccagaggcggctaagcagctggatggaggcccgaggaaggagagacagtcaagtgattgatggagctttatcagccccgccctggccacaggtcggcgacttcccccagcgccagggttcagggaccctgcctgattcggacttgacccacacttcagggcaccatctgtcccagcctccactcgcttctctctccccggtgccccttcatgcttggcatgggggccggcgcccagcagggcaggggtgttgtgaagagaacggttcagcacatgctgcatccaccgctgtcaagaggacggaggcggggatgtggggaaggacaagccaggccccgccttcttgtttgggagaactcacacttagtaagcacctactgtgtgcccagctcgatgcctgacacagatcagctactgtgacatcaaagttaggggttgtcatttgcccatttcacagatgaggaacctgaggctcacagagggacagagtctgcccctggccgcgcactcaggctggggagcctgcttggagctgggagcagaggcgggacctgccacgtctccacccccagggactcagaactgccgcccagaagctcccctcccggcggagagacccaaggtgtcagcaggtcccagagtggggtcagatgtggaggttctctcccaggaagcccagacgagcgccgggtaaggaggggcagctgtgcggtgaatctcttaggaggttacataggcagaggcttgggggtcactcagcct

SEQ ID NO: 1241306 - DNA, 4001 bp, Homo sapiens
aaacatttaaataaaaatatacataagatggtccaaggtacaactggaactgtcaagcaggattaactcaaaggataatgtcttatgaactgtatgacaacatatataacagttttcagttaagagctggcttgccggcaaataccttaattaaagatctcatacaacttcatcgttttctccctttttaagatgtgaaaaataaaacaaggaaccacagcactacttagtacctagggacacagtaaaagttcctagcaggaaaaatgtctccccgttcttgtgtcaataaacagatggcacaattttggaattacagaaattaatgtagcatatctcccaacacttaagtgagaaaatacaatatctctgaagtctttcttgtaattacaatccttcattcacaaattactgtcttattacaacttattataacaataacatatattactcctctcaaaaaaagcattatctatccaaaagctgactgatatgcaaaatatagtaacaataacaaatgtaaatttccatttgttattaaaactgtggcattcaaattgtaagccacaaaaactgctgaatcttacgcagaaaaaggataccattttcacttatggagaagttccctattgtggattacagtcttctcaattattacacttttgttactcaatgtgaaacacaagcacacacacaaaaaaggggtctttctttcctttttcttatccgttttcatttctttcacacaaggagatgctttatacgtgtcattgttttgtagcctaattagagttttcctattctattatctcaaacttttatcacagcttcttacaacggacttcacgaaattaaattttaaggtttagatactgtaaacgctcgaggaaagacattagtattctcactattacatattaaggattctctagcttgcagttaggtgattttataatacatgtaaatgcatataatacacttaaggtgcattatatacatgaaacgaagtgttcgttttattttataaactttttttattttataatacacgtaaatgcctcgagtgtattattatgtattacatgaaataaagtgttcacttgaattttgcctcccttcagtctatctctcttcagtcgaaagagataagtaggcctttattgtccaaaaaaaaaaaaattgtcccagccttttcaaatgtcaggttaaactggcagtcctatgaatgccacctgcaaccttactaatggaataattactcaaaacgagaagcccccaagagtcccgatctcaagtggcttcctcctattattcccgcgaggaccccagcgacaagactcgcccaacctgaggctcctggctctctttcctcgtcctgagtcagcccttcccactactcatccggagtagacatcttccaacacccgaaccttccagactttccctcttgcccccacaaacaaaagcaaccctcctcccttgggacacccggcttcccctctctgccgaccggccgcccagcccacctcggccccaagcacccctcccccatttcacgctccgcccgcgctgacacggagctgccaccccaacccttctgtttcgcacctctctcccgagggctcctcctgggcagccagcaaacgcccgctcctcggcccgcccacccagctgcctgcaaaccccgggcctgccactccctgtagagccgccggggcccacctcgaagagctcggccgtggtagccatcccggccggctgagaggctcgccccccactggatgccgtctccgcttcacatgctgcgcctcagaggcgcggcgcacaggtctccgctcggctcgccagctccggctccgggccgctgcgggctccccagctccccacagatcccaggaggggcgggagagcggccatgaagcgaagccgcaaacgcttgtcagctgcctcccggcgccgcccgcgctgctcccattgtcaccgcctcatacgccggaagtggaactgcgcgcgccagggaggttgtcgggaggggccggcgaataaaacgagcggcgaaagaaccgaaaaaaggctcgacgctaccgtgtatgaggaactttgatccttgcgggccaccattccggaagtagaatttagaggaagaaaataccggagttgcagggtataggtaaatttctcaaggttataggttggggttcttagaactttttgtggtgtgtgttggcctagagcgactcagaagcgttagtgacttcacctaaaaaagctaacctctctgctgagcgcgaccggtatgcggcgcaggatgagcctcagggcttctgttaagagtctgtctgagaaagccggtctgcgctgttcctcggtggcgaccttaattatgagatgagctaatgctttactgacttaaccatggcgcagcgggcagtgtggctcataagccacgaaccgggaactccactttgtggcaccgtgagattctccaggtaaatgcaaatctgaatcctcagggatgatggatcagaagatcgatgaagtagcatagttttgtggtgcttcgtggcccaggtttgccacgaatagctgcgtgaccttgggctagccagttaacagacctctgtttcgtctgttaaatggagattttaatagtcctaccttacagtgttgtgagaattgagttgatgactggtacatattatttacggtatatgttttctattagtattgtgttttaaaatgacctccgtctgcttagaattaaaatggagatgactaagggaacggtagaaaatttactgagcactaaacattttcagatttttcaacatgcattgacaaaatcgttccagaacattttaacttattctactgaaaaatccatgctaagttatatcagacttttatttttttgtttttatttttttgagacggagtctcgctctgttccccaggctagagtgcagtggtgcgatctccgctcactgcaagctccgcctcccgggttcatgccgttctcctgcctcagcctcccgagtagctgggactacaggcacccgccaccacgcccggctaattttttgtatttttggtagagagggggtttcaccgtgttagccaggatagtcttgatctcctgacctcgtgatccgcccgccttggctctcaaagtgctgggattacaggcaggagccaccgcgccccgcccaggcttttatttttatcttgttaatatgtgtcaatggtagaaatcatcagtttacagttcctaattgttgaagaaaatagaaacacaaaaaaatgtattcactatttcatatattgtgttaagttgatctggtcccactattagaatttgccctgtgtaatcaaaatagctctgttaagggaattgtacagtaactcattgtaaaatgttggtggcaatcgagtgggtctatttcaccttttattctctggccattgatagttcttttttgtcacaattcgttcttccctgaagaaagcttatagtgaagtagtaccatagtagaattgagattgaggcagaaaaaaaagattttaattttaaatgaaaattggttggcaatggggatatgaaaaattccttctttgcaaccttaacagtttttgttcctgagggcatcagagttggagtttaccatttccccccaggatttctggctgacactaaccccaacatttgttgttggacctcaaatacaggagattaataatattctttagtacgtggttttaccaggcgcatcagtccgtacaaagtatctctcattttacttatattccctttggttacctatttctaactgccgttcccttcccactgacagataactcttaacatcttcgatgttactctttttcattgtatgcatttttcaaattacataattaagtgtgctttagacttcacttcctaatgttacatttgtcacatttctcaacactattttaaagaaacatccatgatactttgtgtt

SEQ ID NO: 1241307 - DNA, 4001 bp, Homo sapiens
gtcctgggctgatttttatttttcattgtggaggaattttgaattgacacttgattgatgaggagccaggcttactaaaatccagggtaagagtcagagatatgtatgcaccctagccctggctctgctacagtgtgtgatcttgggcacgttttttcttttcttttaaagacaactttattaagacataatttctatacaatatattcactcatttaaagtgtacaattcagtggttttagtatatacacagagttgtgcaactaccatcacaattttagaacaccttcatcgcccttaaaagaaatgccacacgctttagtggtcactccctatttcccctaaccctccacaccccaccccaccagccctaagcaactgccaatctactttttgcctttaatagtttggggtccaccaggtgcactggctcacgcctgtaatcccagcactttgggaggccttggctggtggatcactggaggcacgcgccaccacacctggctaatttttttttttttttgagacggagtctcgctctgtcgccaggctagagtgcagtggtgcaatcttggctcactgcaacctccacctcccgggttcaagtgattctcctgcctcagcctcccgagtagctaggactacaggcgcgcaccaccatgcccagataattttttgtatttttttgtttgtttgtttttgtttttgagagagttttgctcttgttgcccaggctggagtgcaatggcacaatctcggctcactgcaacctccacctcccaggttcaagcaattctcttgcctcagcctcccgagtagctgggattacaggcatgtgccaccacgtccagctaattttgtattttttttagtagagacagggtttctccatgttggtcaggctggtcttgaactcctgacctcaggtcccaaagtgctgcattacaggagtaagccaccgcacccggccaatttttgtatttttagtagagacggggttttgccatggaaaccagcctggtctcgatctcttgacctcatgatccgctttccttggcctcccaaagtgctgggattacaggcgtgagccagcgcgcctggccaattttttttttttttttaaatttttagacggagtttcaccatgttggccaggctggtctcgaactcctgacctcaggtgatccacccgcctcggcctcccaaagtgctaggattacaggcgtgaaccaccacgcccggccaaatttggggagcaattttcttaatctctttgtgcctcagttttctcttctacaaaaatgagacgacaattgtactactggtcatagagtactaagaggataagcgaaaactgagtgacattgcctatcaagagcctcgtataaagtccgagaggttcaggtctgtaagtcagagtccgcctcctggtccctaaacgctcattttaatcccacgcccctccgtgacacgcccctgctgtctgtctccaaggcaacgcccaacagtttcctctccgggattcctttcccgggggcagtctcttttctctcctcacctgacggctcccctccgcgcctccgggggctccctcaggcctccccacggtcatttcagctggacagaggcagcagcgacagtgacagcgatagtggcagcagcggtggcagcgagagctatgcggggccagggtccacccctttctagctttggcgtctggttggcttccagggcagcctccgatccatcccgcccgaggaggcaaggttcgttttccgattggcctattttctccgcgcattttatttccggttctgaggacgccgcggaagcgggacgggattggagtgctctgctccggacgcactacgtaggtgggcctgcgggagttctgagtgcgacggcgcaggtctgcaccatggcggcccggcttgtcagccgatgcggggctgtgcgtgcagctccccacagcggcccgctggtgtcctggcgcaggtggtccggcgcctcaacagacaccgtgtatgacgtggtggtgtcgggtggaggcctggtgggcgctgccatggcctgtgccttgggtaagcccttctccaggctactagtggccggaaaccgggccgcggaggcacgatgagagccgtgagagccctagcacgacttgcccaaagacaatttctcaggtctcgcgacgcttctcccctcccctcctagaggaaccccagggcacgccggaatgcgtgtggtccttcagggtccattagggtcaaaagtgggaggggcgttcagagtctgttctactcatgggaaaacaggccttcccggggttatttataaatgagagttccagtttctccagatcctggacagtacttgtcattgtctttttgtttatagacattctagtgggtgtaagtaaagtgggatctccaggttttgacttgtatttccctaatgattaatgatgttgaatatcctttcatatgtttattggtcatttgtatatcttctttagagaaatgcctattcagaccctttgcccggtttttaattgagcagtttgtctcttgaatactgtggtaagagttatttttattttttgagacagggtcttccgctgtgcccaggctgcagtgcagtggcacgatcacggctcactgtagcctcaacctccctggctgaattgatcctcctgcctctgcctcccaaatagctgggactgcaggaatgcgccaccactcggctgatttttgtatttttttgtagagacgaggtctcactatgttgcccaggctggtctggaacttctgggctcaagcaatccacctgcctcagcctcccaaagtgctgggattaccggcataagcaaccctgcctggccattattttgtttattctgtataagtcccttatctgataaatgacttgcaaatattttcttccattttgtagtcttttcacttttttttttttccctgagatggagtttcgctcttgttgcccaggatggagtacaatggcacgatctcagctcactgcaacctctgggattacaggcttgtgccaccatgcctggctaatttttgtatttttagtagagacggggtttcaccatattggccaggctggtctcgaactcctgatctcgtgatccacctgccccttcctcccaaagtgctgggattacaggcatgaatcaccatgcttggcccattatgagattttttttttgtgattttttttttttttttagctcatcagctatcattaatattagtgtttttttatatgtgacccaagacaattcttccactgtggcctggggaagccaaaagattggacaccctgatctaagggcagctgttccaccctatgatcctcatctcacaagatacacaaaatttaacttaaagcagatcatagacttctgtaacagggtggttctcatggctgcttgggaggctgaggcaggagaatcgcttgaaactggaagggggaggttgcagtgagctgagatcgcgccactgcactccagcctgggcaacaagagcgaaactcgatatctcaaaaaaaaaaaaaaaaaaaaaagaagatagtgccctttacagagcatgctctacagagcatgtccctgtgccccatcctccacagcaaaagctgccaagatggaccgctcactgtctgtatggctggagctaactttttttttttttttttttttttttgagacagagtctctgctctgtcacccaggctggagtgcagtggcaggatcccagctcactgcaacctctgcctcccaggttccagtgattctcctgcctcagccttctgaggagctgggaccacaggcgcccgccatcacacctggctaatttttgtgtttttagtagagatggggtttcaccatgttgcccacgctggtcttgaactcctgagctcaactgatccatcacctcagtctcccaaagtgctgggattataggtgtgacccactgtgc

SEQ ID NO: 1241308 - DNA, 4001 bp, Homo sapiens
ttcttcctctggtagaccagaagctggactatcaccccaggaacccgaggccgccccagagtctgctgtgctgccagccaaggggttggtgagtgaggcggggggcgctccttcccacaagctggtctcagtgagcagaaacaggggtgcagtgaggaggaactccaaagctggggcggcctgctcggaggacggccgcgcaggctaaaagagcggcccgcggagaaggcaaggaggcggctcggctccccggacgtcagcctcggcggccccacctacctgccctgcagattccccgaatgccgcggcggccgcagctcccgaggctgcgacggcttctcctcgttccacaccgcccactggctcctggtccatcgtcgtcgccaccacagggctgctggcgctggtgagaaagagggtaatggccggtaagcccacttccatccttggtctccccgcccagtcgctggccgagccaggctgtcgggaagtgggactcacccgcccagcgcccgcctcgcgccgcgcctagccaagtctctgagaaggggactcgccggcctgaggggcggggccagcccgcgcctcgcctagcccgccgggctccgcaccccgagagctggccaactgcagtctgggaggcgcaactaccggctcgcgcggggcggggcggggcggggcgggtccttgcggggcgtcgcttccggccaagcaagcatccagagctcgtggatccccgcctggcaccgcctgtgacgtcatttctggtacgtgtacctgaagcctggcgtctcgacctcggcgcagcccgtcaccagcggcgtctggggcagtcaccccgcaggacctcggtttttgcacttgtaaaatgaagacagctgtgtcgttgtacttcaaaggctagtgatgggatgtggttgctgaaaaatgtaaaatgtacggctcgtgctgcactttccattccaaacgtgggtgacagtccagccaaaataccctcgaaagaagaaccccaggcgtgatatttgcttactcttgtctgaaatacttaagtataactgtagaaagtgttaagtgaaaagacctgaaggagagcaaagggcagtagtaagcttccatcttgacaaatgtaaggaatgttttatctgtgtcttaaagtcgtgtgcgtatgttagagggggcgtcccagattttttccgtctttcgcaatgttcaacgaaagtaaaaaatcatgcaattactgcatgacttcaacatcaaacaagtctgaggttctgcaggtaaatggtatattgttgttttagcatgaaagttttcacaaatatgtagggggcaaaaccaaaacatacattattttggctatgggaggcttcatttgatactttaaattccattttcatactagtctcaattcagaaatgctccctaaagttgtatgaccttgtaaatgtttttcatcatagcaacagcaggcccaaatattaaatattcctttctcttctgtgccaaagttcttctccttaccctctgcctaatgttattgtacacttcctattctatgtataactggaacctaaaaacaaaaccaaaaactttaaaaaacaaataatcatttgaaaaccatctacgccttaaaaactagttggaaatccatattgctctctatcctggtaataaaatcaagttaggttgctgctgaagtaaacaagttagtacctgatctgactctgtatggtggcatcagcagggagttgagacagtccaaaacagcaaaaccaaactcggccataaattgaaaacaaaaataaagaaccaattgttaagacttcatgaattggcattcataaacaacacagttctgcattatatgtattcaaaatctcttccttcttactggcaagcagggcaatcaacaatctttattactaaaactttgtgggatatttataaatgcatgattttattttccaaagtggcaattaaatatcaaattacaattttctttttcttttttttctttttttttttttttgagatggggtctcacccacgctggagtgcaatggcgcaatcttggcgcactgcaacatccgcctcccgggttcaagcgattcccccacctcagcctgccaagtagctgggattacagttgtgcactaccacgcccggctaatttttgtattgttagtagagacggggtttcaccatgttggccaggctagtatcgaacttccgacctcagatgatccacccacctcagcctcccaaagtgctgggattacaggcgtgagccaccacgcctggcctcaaattacaattttcattgccgaagcagaatatattttcacagtttacatgtgtatttcttagtttactgaaaattcaaagtacaagttacattctaacgtgaactggaagtatttcctaaaaagttatttttaacacaaatatccaattgaagagcagtttattacaaatcaacaactcgggctgggcacggtggctcacgcctgtaatcccagcactttgggaggcggaggcgggtggatcacgaggtcaggagatcgagaccatcctggctaacacggtgaaaccccgtctctactataaaatacaaaaaattagccgggcgtggtggcgggcgcctgtagtcccagctactcgggaggctggggcaggagaatggcgtgaacccgggaggcggagcttgcagtgagccgagaccgcgccactgcactccagcctgggcgacagagcgagactccgtctcaaaaaaacaaaaacaaaacaaatcaacaactcaaagcaacataaaagcatagaaattctaatggttttattttggacatttatatttttgtcattatttccaaactgttatagctcaaccaaaagtaggcaccaaggcaatgtgccaaatttttccttctttcactttgtaacataaattgtatcgtagcactatgacaaaaataaattcaagtattatgataatttatctacttgaaaacataatgtggtctaaatttatcatttaatgatacatatagagctaaaaaggtaaatttggattgaaccatttctgcgtaaggctgggaaaataaatctgaataaaatttgataaccaggaatgttcatcaaataaacaagacattcttagggttttaacatagctacatatatatactttgatagagaattttttaagttatccatcaaacaggacaatatattttcatcaaaaataatgcacaagaaaaaaagatgataaaaataaaaatgcattttaggttcagtctaagcataaagaaattttttttttttttttgagacagggccttactgtatcacccaggctggagtgcagtggcacaattatggctcactgcagactcagacgatcctcccacctcagcctcctgagtagctggcgtgtaccatcacacctggctaatttttatattttttgtagagatgaggttttgccatgttgcccaggctgaataagttattaaaatcatggtagtggtttcacttatggagcacaatatgccaggtactttgctttctttgtattaactcttattcctcacaacaattctgaagtattactgtaactaccaacatgttatagatgaggaaacaaagagaagttaagcaacttgctccagtgacgcagctggtaagcagcagagctgggattaaaacccaggcattctgattccaccacctacacacttagccattccgccccactgagaatgaaaatgtcaaaaaatactaggccagtaagtgttagcaaggcaagaaatttccacaccaaaggtgagtatgttgtttggaaagattgggatggaaatgagtaaagtatgtttctttttaaaagtcttttagtaagctttaaagctctatatgtaagaagcagatgaaaataccaagtgaatttttagatttgatgttatgtaaggttttgttttgttaattaaaatttggtcattttgtgt

SEQ ID NO: 1241309 - DNA, 4001 bp, Homo sapiens
caattctagtaacaacaggaaaaatcaaattgaaaaacatatcaagcaccatggactcaaaggttaagtgtaagtgcacttgccaacaataggtctcaactcaactgaaaatgacgtggcttccttatcaattcatgttgtcccctgaatccccttcttaagtaggagggaaaaaacgtattccatatagagtttggtatgtgggaaagttgtgttttttgtttttggggtttctttagttttttatttaagagatgggttcttgctctgttgcccaggctggataagcttttgttaatgcaaacgacatcttatactataagagatacacagagatatactcacagtttgggggaaatgtcttactaacattcaggtacttagtctcaaaaatgaagctactgaaaaagcttcattctcatggaggatgggaagagttacatacatgagcaactcaagggttttttttttgttgttgttgttgttgttgttgttgttgctgttttgagacggagtctcgctctgtctccagcctggagtgcagtggcgtgatctcggctcactgcaacctccacctccagggttcaagcaattctcctgcctcagcctcccgagtagctgggactacaggcgagcgccaccacgcccagctaatttttgtatttttagtagagaaggggtttcaccatgttggccagactggtcttgaactcctgacctcaggtgatccacccgccttggcctcccaaagtgtctttttgtctaatactgaaaagttgcaagaaacgttaactctctaaaccagcgctgtccaatacagtaaccactagccacatgtggctaatgcgcacttgaaatgtggtcagccagaactgcgatatgctatgcgtgtaaaatgcacccaggatttaaaagacttagaaaagactccaaaagagaatgcaaatacttcattaataactttcatagtaattttaggttgaaattgttttgataaattaggttaaataagatatgctattaaaattaatatcggtttcacttttttaaaacgtgcctactggaaaattttaaattacaattttcaatgcagcttgcattctatttatgttggacagcgcagctcggagccttagttgcctcggcggtgaaatggggctaacacccacctcgagcggttactgtaaggatccagtgaattaaagctggtaaacgtttggcatatgccaagcaaagggcagatgcccaggcaggcgctcgcaccagaagagactgagaagtggttgaagccgccctcacctggcttccagctactgcaaggacagcctttgggggacacgcctttcttcttcctctggtagaccagaagctggactatcaccccaggaacccgaggccgccccagagtctgctgtgctgccagccaaggggttggtgagtgaggcggggggcgctccttcccacaagctggtctcagtgagcagaaacaggggtgcagtgaggaggaactccaaagctggggcggcctgctcggaggacggccgcgcaggctaaaagagcggcccgcggagaaggcaaggaggcggctcggctccccggacgtcagcctcggcggccccacctacctgccctgcagattccccgaatgccgcggcggccgcagctcccgaggctgcgacggcttctcctcgttccacaccgcccactggctcctggtccatcgtcgtcgccaccacagggctgctggcgctggtgagaaagagggtaatggccggtaagcccacttccatccttggtctccccgcccagtcgctggccgagccaggctgtcgggaagtgggactcacccgcccagcgcccgcctcgcgccgcgcctagccaagtctctgagaaggggactcgccggcctgaggggcggggccagcccgcgcctcgcctagcccgccgggctccgcaccccgagagctggccaactgcagtctgggaggcgcaactaccggctcgcgcggggcggggcggggcggggcgggtccttgcggggcgtcgcttccggccaagcaagcatccagagctcgtggatccccgcctggcaccgcctgtgacgtcatttctggtacgtgtacctgaagcctggcgtctcgacctcggcgcagcccgtcaccagcggcgtctggggcagtcaccccgcaggacctcggtttttgcacttgtaaaatgaagacagctgtgtcgttgtacttcaaaggctagtgatgggatgtggttgctgaaaaatgtaaaatgtacggctcgtgctgcactttccattccaaacgtgggtgacagtccagccaaaataccctcgaaagaagaaccccaggcgtgatatttgcttactcttgtctgaaatacttaagtataactgtagaaagtgttaagtgaaaagacctgaaggagagcaaagggcagtagtaagcttccatcttgacaaatgtaaggaatgttttatctgtgtcttaaagtcgtgtgcgtatgttagagggggcgtcccagattttttccgtctttcgcaatgttcaacgaaagtaaaaaatcatgcaattactgcatgacttcaacatcaaacaagtctgaggttctgcaggtaaatggtatattgttgttttagcatgaaagttttcacaaatatgtagggggcaaaaccaaaacatacattattttggctatgggaggcttcatttgatactttaaattccattttcatactagtctcaattcagaaatgctccctaaagttgtatgaccttgtaaatgtttttcatcatagcaacagcaggcccaaatattaaatattcctttctcttctgtgccaaagttcttctccttaccctctgcctaatgttattgtacacttcctattctatgtataactggaacctaaaaacaaaaccaaaaactttaaaaaacaaataatcatttgaaaaccatctacgccttaaaaactagttggaaatccatattgctctctatcctggtaataaaatcaagttaggttgctgctgaagtaaacaagttagtacctgatctgactctgtatggtggcatcagcagggagttgagacagtccaaaacagcaaaaccaaactcggccataaattgaaaacaaaaataaagaaccaattgttaagacttcatgaattggcattcataaacaacacagttctgcattatatgtattcaaaatctcttccttcttactggcaagcagggcaatcaacaatctttattactaaaactttgtgggatatttataaatgcatgattttattttccaaagtggcaattaaatatcaaattacaattttctttttcttttttttctttttttttttttttgagatggggtctcacccacgctggagtgcaatggcgcaatcttggcgcactgcaacatccgcctcccgggttcaagcgattcccccacctcagcctgccaagtagctgggattacagttgtgcactaccacgcccggctaatttttgtattgttagtagagacggggtttcaccatgttggccaggctagtatcgaacttccgacctcagatgatccacccacctcagcctcccaaagtgctgggattacaggcgtgagccaccacgcctggcctcaaattacaattttcattgccgaagcagaatatattttcacagtttacatgtgtatttcttagtttactgaaaattcaaagtacaagttacattctaacgtgaactggaagtatttcctaaaaagttatttttaacacaaatatccaattgaagagcagtttattacaaatcaacaactcgggctgggcacggtggctcacgcctgtaatcccagcactttgggaggcggaggcgggtggatcacgaggtcaggagatcgagaccatcctggctaacacggtgaaaccccgtctctactataaaatacaaaaaattagccgggcgtggtggcgggcgcctgtagtcccagc

SEQ ID NO: 1241310 - DNA, 4001 bp, Homo sapiens
cttatttgttaaccaagaatgtgaaaacaacagaatatcactaaccccaatcaaagagcctctcacttcaaacaacatttagctggtatataagtacacgtgtgtttactttgctattagatccagggcggaggtagtgattttaaaaaaacaattctagtaacaacaggaaaaatcaaattgaaaaacatatcaagcaccatggactcaaaggttaagtgtaagtgcacttgccaacaataggtctcaactcaactgaaaatgacgtggcttccttatcaattcatgttgtcccctgaatccccttcttaagtaggagggaaaaaacgtattccatatagagtttggtatgtgggaaagttgtgttttttgtttttggggtttctttagttttttatttaagagatgggttcttgctctgttgcccaggctggataagcttttgttaatgcaaacgacatcttatactataagagatacacagagatatactcacagtttgggggaaatgtcttactaacattcaggtacttagtctcaaaaatgaagctactgaaaaagcttcattctcatggaggatgggaagagttacatacatgagcaactcaagggttttttttttgttgttgttgttgttgttgttgttgttgctgttttgagacggagtctcgctctgtctccagcctggagtgcagtggcgtgatctcggctcactgcaacctccacctccagggttcaagcaattctcctgcctcagcctcccgagtagctgggactacaggcgagcgccaccacgcccagctaatttttgtatttttagtagagaaggggtttcaccatgttggccagactggtcttgaactcctgacctcaggtgatccacccgccttggcctcccaaagtgtctttttgtctaatactgaaaagttgcaagaaacgttaactctctaaaccagcgctgtccaatacagtaaccactagccacatgtggctaatgcgcacttgaaatgtggtcagccagaactgcgatatgctatgcgtgtaaaatgcacccaggatttaaaagacttagaaaagactccaaaagagaatgcaaatacttcattaataactttcatagtaattttaggttgaaattgttttgataaattaggttaaataagatatgctattaaaattaatatcggtttcacttttttaaaacgtgcctactggaaaattttaaattacaattttcaatgcagcttgcattctatttatgttggacagcgcagctcggagccttagttgcctcggcggtgaaatggggctaacacccacctcgagcggttactgtaaggatccagtgaattaaagctggtaaacgtttggcatatgccaagcaaagggcagatgcccaggcaggcgctcgcaccagaagagactgagaagtggttgaagccgccctcacctggcttccagctactgcaaggacagcctttgggggacacgcctttcttcttcctctggtagaccagaagctggactatcaccccaggaacccgaggccgccccagagtctgctgtgctgccagccaaggggttggtgagtgaggcggggggcgctccttcccacaagctggtctcagtgagcagaaacaggggtgcagtgaggaggaactccaaagctggggcggcctgctcggaggacggccgcgcaggctaaaagagcggcccgcggagaaggcaaggaggcggctcggctccccggacgtcagcctcggcggccccacctacctgccctgcagattccccgaatgccgcggcggccgcagctcccgaggctgcgacggcttctcctcgttccacaccgcccactggctcctggtccatcgtcgtcgccaccacagggctgctggcgctggtgagaaagagggtaatggccggtaagcccacttccatccttggtctccccgcccagtcgctggccgagccaggctgtcgggaagtgggactcacccgcccagcgcccgcctcgcgccgcgcctagccaagtctctgagaaggggactcgccggcctgaggggcggggccagcccgcgcctcgcctagcccgccgggctccgcaccccgagagctggccaactgcagtctgggaggcgcaactaccggctcgcgcggggcggggcggggcggggcgggtccttgcggggcgtcgcttccggccaagcaagcatccagagctcgtggatccccgcctggcaccgcctgtgacgtcatttctggtacgtgtacctgaagcctggcgtctcgacctcggcgcagcccgtcaccagcggcgtctggggcagtcaccccgcaggacctcggtttttgcacttgtaaaatgaagacagctgtgtcgttgtacttcaaaggctagtgatgggatgtggttgctgaaaaatgtaaaatgtacggctcgtgctgcactttccattccaaacgtgggtgacagtccagccaaaataccctcgaaagaagaaccccaggcgtgatatttgcttactcttgtctgaaatacttaagtataactgtagaaagtgttaagtgaaaagacctgaaggagagcaaagggcagtagtaagcttccatcttgacaaatgtaaggaatgttttatctgtgtcttaaagtcgtgtgcgtatgttagagggggcgtcccagattttttccgtctttcgcaatgttcaacgaaagtaaaaaatcatgcaattactgcatgacttcaacatcaaacaagtctgaggttctgcaggtaaatggtatattgttgttttagcatgaaagttttcacaaatatgtagggggcaaaaccaaaacatacattattttggctatgggaggcttcatttgatactttaaattccattttcatactagtctcaattcagaaatgctccctaaagttgtatgaccttgtaaatgtttttcatcatagcaacagcaggcccaaatattaaatattcctttctcttctgtgccaaagttcttctccttaccctctgcctaatgttattgtacacttcctattctatgtataactggaacctaaaaacaaaaccaaaaactttaaaaaacaaataatcatttgaaaaccatctacgccttaaaaactagttggaaatccatattgctctctatcctggtaataaaatcaagttaggttgctgctgaagtaaacaagttagtacctgatctgactctgtatggtggcatcagcagggagttgagacagtccaaaacagcaaaaccaaactcggccataaattgaaaacaaaaataaagaaccaattgttaagacttcatgaattggcattcataaacaacacagttctgcattatatgtattcaaaatctcttccttcttactggcaagcagggcaatcaacaatctttattactaaaactttgtgggatatttataaatgcatgattttattttccaaagtggcaattaaatatcaaattacaattttctttttcttttttttctttttttttttttttgagatggggtctcacccacgctggagtgcaatggcgcaatcttggcgcactgcaacatccgcctcccgggttcaagcgattcccccacctcagcctgccaagtagctgggattacagttgtgcactaccacgcccggctaatttttgtattgttagtagagacggggtttcaccatgttggccaggctagtatcgaacttccgacctcagatgatccacccacctcagcctcccaaagtgctgggattacaggcgtgagccaccacgcctggcctcaaattacaattttcattgccgaagcagaatatattttcacagtttacatgtgtatttcttagtttactgaaaattcaaagtacaagttacattctaacgtgaactggaagtatttcctaaaaagttatttttaacacaaatatccaattgaagagcagtttattacaaatcaacaactcgggctgggcacggtggctca

SEQ ID NO: 1241311 - DNA, 4001 bp, Homo sapiens
cggcagaagatggcatcagtactgcatattccacaaatccctgctctgtgagccttggtaaggttttcctagccaatctggcctgcacagcattcatcactccatctccattatcttgcagttcaactgtatccacagctttaaaaaggatgctggttttacctgagcccattgatgatgccaatacggcaaaagcttctaaagctgcttggcgtaccctgcgtttgctatctacaagagctggggcaagatcaaaggacagtttgggcaagtcaaaatcctcactaggataggtcagcagggagcagatgcaaatgttcaccacctcctctctcactctggaatgcttatgtttgagatgttccaggagtaaacaaagcacctgctgaggtcctacttccttcattagcttgaggaagattttcatgtattcttgtttgatcaccaacttgttgtccgccagcactttgacagaagctgctataactggtcccaagaactgctgtacctgctctccaaggcgaataaccagtaaatgcaggacttcaagtgtgccatgcaccactttgaagttagaatcgtctaacaaattatatagcaaactaatgaagccaacaagactagaatgaggagtagaactagggttaaattttcccagcacctgctttagttcttcgacggcctgggtccggttcttatagtcttcctgatccaataatcgtgaatgcagctcctgaggaataatcccaaatttaagattgctgttggaaagagtcactgcacagggaaggggatcttcaggaaatccagaggcttcaagttccaaataataaggaacctgacttccaaactgggactccaggcggcgattgtagtgtctcctcagggcagagggcagacgagaaatgtaagattgaaacctgtcttggccaagtcgctccccaatttgttgaagtgcggagaaagctgtctcagattcttcttctgtctcctgatcaccaagctttcgggctagggatattatcacctcggtgagatccagaccaagcaacaagtcctcagtagtaagcaagatgggaagcagtagtgctgtggaagctctaagtcgggcatcggtactttccagtccttgttgtataagcgttctcagcacctctccaggactacgtttcagacatatatgaaggatctgcagcgcatctttccgcagggctggattctcttcccgtaacgagacaactagttgaggcaaaagtgctaagctaaaggcctcttcaagctggcctgcctccccctgaccccggagaacgtccgagagaagttgcaagcagagccgcttctcatcactacctccttccacaagcactcggcccagtgcccgatacaaagcttccttgcgtcgggggaagccaagtcgaccgccccgccgcggcaaagcagcttgcaaagcctggaaggcctcagaaggatcccgggcagtgcggaggagttgaaggagccgagtgtcctcttcatctccccctgacaaaccgcctccagactcagaccagctgcttgagactgcctccgagggcatcaagagggccgaggccagaggcgaagttgtagtggggcaggaaccgtggtcccccgcagctccacggaagtagtagtttttctctcctctcataatgcccccaactcgactatcatcggtctctggggcggaaggacgactgcggctctggagccgataggtagagaggactggaaagggcggcagcagaagcagcgcggagggggcagccgccatgcagggttgtcaggtggtggtggttggaagaaaccattgccgtctccaaagggctcgatggagcccagacttccagatcctctccaagccccaagctgcagaagaggcaaaagaacagcttcagcctgccgccaggccgcccccaactccgggaggcagcctctggcaaaatggcccccgtctgagccctagaccccacagctgccaccgggcgtaaccaagggcaccacgtgaccaaaccgattgcttccatggtgatgtacccagcgcggacctcttgacccggaaatccacttgccgtgatgaatgctgggttatgtagtccacgtcaggtgttgagactaggccaaagtctcctggaagaggaagtcagaacgttgtaaacgcagctacagcggagaagggaggaggggtgaagccatttgacggatgtgacgctttccttgctctgggcggaagttgcccgccccacccgtaagagttagggtttgaccggagctagtgaggatccagcccaggctccagttgtccgcggttcctcctcctgtcgctgcccgtgtgattactgagactcaggtattttccttttgctgtcctccagcggtgcaggctttggcagtgttttgcccgaatgccactggtgctagagtaagaggcaaaggactgagcggagcaggtggaaagagaggcgacatcttcttgtgcagggctcgtcacccttgtaaacgcgttactctctaccaccctgagtaactgcgatcctttcctcttgccatctgcttatcaggacagaagatctggaccacggccaagctcacaaatcgggtattttttttcaattcctggtctttggggcctttattcgcctcccccttctccttttgtcgacttctcttaaccctccggccgcagagggttaatttttttttgtttttgtttgtttgtttttggcaacgtttccttaccctcatcactttgcgttttctttacaacgtacataatatggaaataggtctgtttttttccccctgtagctaaccgcctctcccttagacgttatcaaaatctttccttctaatgcagttcctctgtgggactctcccctaacctccgccccctccgtctgccgccctagcctccctgcaggatcctcaagcgtctctgcagcctttcagtctcctagagacagagattgcgaagacaatttcacttgcggtggaagttcttggcatcatggttctaagagaattctgccttgtggatttaggaatgatagtagacatttatttattttaggcgaactgagaattttgtgtgcattttctcctcataagtgatacttaaacggacacagtggaagagctggagtgtctagtgtgagcctgaatgctttggagtgtggaagagatattttttttttttgaaggaataatactattacttttgaatgactcgtgcgaaaagtctaagttatcatttgaagacccaaatttatgcacttcaaatgcaagtattcctaccctgctctgtaccaggtgggatttctcttaaatactttttaaagtcttggaataaatgagtcacatatgccaaacagctttataaataatgctcccagctgatgcaagtgcaaaaataatttctggatttttgccttaaagtacgatttgaatatcagttttgttttgttttgtttttgggggggtgggggtggggaatagactataatgtaaatgaggctgtgtaaatatacatcctatgttttggtttaaattctaggctgttactttggttttaatgagccattttcgtgtttaaatgaatctgcctaaattaggtttagctagcatgtttcattttagggacaggttaaagacagggaggtgaaaaacaagaaatgattgtagcagttgtcaatgagaaagtgtctggttctcacagttccaacctaagaagctcaaatgtgtagacttctagtcatgtattgcccagacttgaggaacccagttcaaactaacctagacaatgatgtacacattacagtgccagtttatgttggatcagaattttcaagttgaaaatccagtgcactctttcttgtatccaagaacttgggaagccaagttaataactagaggttgtgtggtaatcatggaatcacagaaaaggaacttcgaaagtcttaaatgagagacgtggatacttaagc

SEQ ID NO: 1241312 - DNA, 4001 bp, Homo sapiens
tcaagccccaggaaaagaggagagctcagcccatcttcaccatgtggagtctcaggagggatggggttcaggcaaagagttctatgttgaagaagagtggtgcaaacagacctctgtgtcttgttcctgattttaggggaaaagcttttggtctttcaccatgggatatgatgtagctgtgggaattttgtagatcctctttatcaagttgaggatactttcttctattcctaattttctgggagttcttgtcgtgaatggatgttaaattttgtcagatgaattttttgcatcaatttatatgatcatgtgtttttttctttagcctatttacaatttgtactatgctaagatataacatcataacatttactattttagcctgcttttctgtcttttcctccctccctccctttcttccttctttccttctttccttccttccttccttcctctctctctttctttctttcttctttttttgagacaaggtcttgctctgtcactgcagtgcagtggcacaattgtggcacactgcggtgtcttgacctcctggactcaagcaatcctcccacctcagcgtcccaagtagctgagactacaggttcacgccaacacatccagctaatttttaaaaattttttgtagagaggaggtcttactgtttttcccaggctggtctcaaacccctgagctcaagctatcctcccatctcagcctccaaaagtgctgggattacaggtatgagccaccacacctgactgcatttcacttctaatatcataatctatgtcttctctcttttggtcagccttgctagaagcttgttaatttgattgatctgtttaaagaaccagctctttttttattttttattttttatttttatttctttttctgttttcaatatcattgacttctgcttttatctttattacttcctttcttcttcttgctttgggcttatttcacttttctttttctgagggcatggctttgatcattgattgagatctttcttgttttctaatgtaggcctcttagtgctataaaatttcctctcagcactgctttggccgcatctcacaaattttgatatgttgtgtttgcatttttctttggctcagtatatttttgttattttctttgagatgtcctctttggcaacgagaaagacctatgtgggactttctcggcaacaagaagacccacgtgggacttccctggggagtcaataatgctcaccaagtggttctaaagcatttagtggacacctactatgtacaggacattctctgaagtgctgggggtagcaaaatgaatacgaaatccatgccaacagccttgaaaatagtttactcacctcttattaaatgctaataatgtttcaaaaacttcttctgtattaactccttcataatgaggtggatattgctattacgcctactttacaaatgaggacactgaggcacaggttgactaagtgacttgacgaagaccccacagccaaaaggggtgaagctgaagtgcaacccaagccaattactgtgattttatgattaatcatcatgatcagtaagctctgagcctcctattcctcacccttgaagtgtagctaagggcagttccctggcagggttgataatgaggattaagacatcagccatgaaaactcaacaaacacatcaatctcctggttcatagtcggtgcccttcccttgcctttgcctctcccctgggctggatataatggctgctcaggtgaagctgtaaagaagggctggtgggacaaaagtgacatggtagtggtgtctctgccctgcggggcatcccagatggaccaccgccccacattcacgcccctgctctgcacgctcccccacccccacacacccatcaccttgactgtgtcctccagtactgataggcctcgtcactctcccaggcaccaaccaggaatgaaaagtctgtttgatctcaactgtcatctcgggtttgattggcgatgactggcaggtgccctgtggagagattccaagggctcagtagacagaacactctgatctactagtgatgtcttccctgagggaggatggagatgaagccggctgtgtgccaagtgtccctggatccaggtcagaatcacaggatgggaagccagggatgtcaatacttggcattctggtgatccaagcctgccattttaatcaagggattggagccccttgagaaaagcagtgacttattcaagcacatattcctgtgaccaagattcaagtttcccacctcccaggccagaattcatcaggtccattcaacagacatttgttactaagtttcaactccaggccaggcactgacttagccataatagatatcttacacatctcatagtatttattctcacaacaaccttctgtgatagatcctaatgtcattcccatctggcagatgaggaaactggggctcaggtagactaaagaccttaacagctagtgagagacagagccaagatttgaatccttacctcctgactctgaacccaaatccttctaacatgctgctttgtttcaggggtgagaggcagcagtgatggctacagccataccttgagtcaaggcactgagacggagagtgttaggcattttggagagcggagacagtgagaagctcagtgcagcggcgaagagagttcgctgcagggagtgaggtgagataaggttaagtagaaaggttgaatcccccatgtatctttgcatgcagtaggcacataatacatgcttaatgactgactgactgaatgaatgaatgaataaacaaatcagaacatagagtaaaatggttggttggctcctgagccattttaggagctccaacagccagtcataaaacaatctgtaaacagcaagtgcatcctcagtgcctggctcccacccctccagccacactgtccctcaggtatgttgcacaaacagcacaccttcgtcgtcagagaggatcccttgcctcctgggatgggagcttccaagggaaaagtgatggggcaggggtctaacttgcactgaatactgcaatgccccaagagttagatatttgtcatctcatttaatcctcatcaaacaaacaaaccaatgagtcaaaatgagtcaataaaacccgagatgggtattgttcttcccatttgacagattcagaaactaggaccagggagatagaactctcccctagtggcagaggagctggggtttgggctcagccagtgtctacagtgcccttaggggaaggtggggttggcggtgggcattgtgccctcttgccttacatattcccagcccccaccccagccacctggagcacctgtcctacttgagtaatagaagactcttcatcggcatctatcatttagttcctggcctctgatcacaactctgtctgtagcccaaatctagcccataacagactttttcaaatttctctgaatatgccatcatctctcaggaaaggggcatttgcatcatcagcaaaagggccattttcacctgcctcagcattccattcccgtgctccctgacttggtcctggtggggcgtgctgggactatgaagagttactgctgtgagcgctgcggccccccatacctccaccctagcaccaaggtgagctctcctagaccaacgttggccccttggatggcattccagtgcctggcacatggcaaagcccttgaagcgtgtttgtcacccacagaggtcactcacacaccttaggagtcagacaattgcatttcgttcctgcctcgctcatctgggcagtgatttcatctgtgtgggcctcacactcctcatctgataagcttggtggaaacagtgcccagctcccgggctggggtcactttcagcaggctaaaggatgaataggggttgttttagctctgctggtctggggaggaggggagactgggaggaagagcgtgaggcaggagaatagggtctggaggcagg

SEQ ID NO: 1241313 - DNA, 4001 bp, Homo sapiens
cctggggaggggccaaccaggtccagcctcccagcttccaaggctgcaaggctgaagggtcactgcctgaggagccctgccccaatcctgccctccactcccatgcgcacacaaacggaagaggccacactgtggcccagccacctcctcacaggagagcgcctcggggacctcgacactcctgcaggccagaggtgggggctgaggccctctccgcgtggctagaggtagccaaagacattgaagatgggtgggggcacggctggcttggtggggatgggtttcagcaccacgggcctgcacaccttctgccccaggccgtccacatccttgcagaggtgcgccagctccccgggaaaggctgggctcttcctccaaaggcccaggctggggacaggactctgaggcagtgcccccagggggcccggatagatgggctgtccatggtactggaaggggcagcaactccaggcattgacgcggcccaccaaggagaccccaggcatcttgagcggctccttttcagccagggcccttggagacatggacaccagggtagtctcaggtcccaggggctccaagcccttgcaatttttcttaccctcatagggaggtccctccctggggcccagtcccccctccagccccacatggtagctgtgggtgggccttggctcttcccagaaggaagcgggcagctgtcttttcctcatgggcacctggccaggctgggcagcttctggatgctgcctctgtgggagctgctccttagcaagacattcctccctgtaggggttcctcagcaccttctccttgcagcccccacccccgccggggctggaatcagggcccaaatccaggagcagcctcctgggccggtcctcagacccccttttcaggtagggctcagcagctctgccaggaaggccccgcgggagccgggaatacttctgggagaagcgcttgagctgcttctgcaggtacttgcgatggtccacggagcggcggcagggtgcggacttatccagggctgccttgatgtcgctggacgccaggttcacgaagttcagcagcatcttcacatcactgtcggatgccatcaccagggggccactgcacgaggctttccatgaagagggtaggctctgctggtggccggcagctccaaggaagggcaccgagctgacctgggggacaaaacaggccatcggagtctctccaagcaaccacacccagccctcccaaaagaccacagcacctgtctacaaacagtctccccaccccagcacctctcagccctaaacagagtcctgggtagagggatgtgggtgcaagtggctgagcacttcctgcacacctgggatgcggcaggcaccagcagagcctcgcccagcctgcttgggtctggtgccccttcttgcagccaaggctcagaaaggtcaagcaagtcgcccaaggtgacccagctacaggtggcattgctggggctggcacacactcccagcctgccccatctcccacacaccacgctgccaacgtgtgcaacttgccagcgaggtgtttattctctgagctgaggcaactgttcctctttaaagcaaggccaagcccccttcctccctggtggtagcctccccctcccaccactcctgcccccagcacgaggagcaccagcccccctcctcagtccccacgctccacccccagctctcacgcaggaccaggcaggacccctgtctggcacttaatcgagacctgccttgcgggctgatctcaggctgcgggcagcagggattcccccgaagaagcatctgcagcaatttcatgcctcctcggccgccacccacggcacctcgcccctcccccaggccccagcctgcccccacacccgccacccagtcgggccagagccaccgggcctccacactgaccgaaggtgcggcccaggccccaccaacgtggcccggcaggttccccactgcagacctgggacaggccccggcgcagccggccgagctccgtccggctggaagcagttgtgcaacccttgagtgggctgaatggaggacaactccccggagctggggggcccctcaggccaatcaggagcgcctctccagatacaaagcatcccaatcaggcggcggcgccccgttcccacattctttgccgtcacaaattgtcaccatggggaccatcacaaaaaagacagctcccaaatgcaatcatttcccggtaaatttctacccttcagccccactctcctcagcctccacccccctcctccccttgacctcagttccctggtttctcaagggggtggggtgtgtgtgtgtgtgtgtgtgtgtgtgtgtttaaaatgtccaggattgagaaggggctgggcctagtggagacaggcttgcaaacctcccccaaagactccaggcctacagctgccatgctccagtgcggacagacaatcggacggggtaagccggggcgggctgcttttcccgctgtccttgagtgttgagtggctctctcgctctcactctctcttctcctgtctctctgtctctctctctgtctccccctgccacccccaccaccctccctgccaggatcccccagggatcggggatggagggccttcaaggtcaggaggtgcgctgatgcctgtcggaaaaggtggccgaggaaggactctctaacgaggtgctgggatatccatgggaagggagctggagctctcaggaatcttgtctttatgtttgcttcctcaattgagctgcacaaagcctgaattgcccattcagcgcagccggacaaaaggttggcgttgcacggtccccttgcatttgtagtcaaacagttagggacttaaatcgagtcgtcatgatggagaaagaggtggacaaagcccatagaattgccatcagcaaacattttcctgtgtcatattagccagtttccatggctccccctggcctgcggacaatgggacaagtttgcacacttggctactgtcaccgtgccaacgccggcggggctgcaagcagggccactctgagcaagcaagggagcccagagccgctgttggccctgcccaccaactggccagagggaaggtgaggctgaaggcgagggcggccgcctgggaaatgctaatggtcgtgcctccgtgccagcccagctcacgggcccctttcacgcctcatcatttttctgcccagactcagcctcctcttccctcctcctctccttccccttccttttctcttccccttctactgccttctcctcctgtctccctcaccagccagatggctggtggcctgtgcgccaacccacacctctgtactacaacctaagatttggcatcttaggttgcaggactcctccctggagtctccctacccagactgggggcattggcagggcagagccagggcctccatccagaagtgatggccctgctccttcccactggccaatagacagctgctgtggcctgactccaagccatctcccctacccctggcctgagggtccttacaggcaaaatgaagggtttggaggagatggcccggtgctgacaagctgtgactcaatttaggccttgaaagccagcactgtattctccatgcccctaccctgctgcggggtcggggaagtgtggaccgagatggaagtgccgctggactgacgcatcctagattgttggccactacgtgccctggagggttgctcctgcctgcggcaacctttgcatgggtgagagccaaaccatcatcattttaagtgccagagatttgagggctatgtgtttctgcagcacgtcccagcccaccctgactggtacaagcaggaaacatcctttctgctccaaaacatctggcacgcgtggctgaagagagcgccctgagggcctgtggccaccagggccagctccctgctgcctactgtgtgaggctggtgtgcacagccaacagtttgaacctctccagcagctggcatct

SEQ ID NO: 1241314 - DNA, 4001 bp, Homo sapiens
gctgcaaggctgaagggtcactgcctgaggagccctgccccaatcctgccctccactcccatgcgcacacaaacggaagaggccacactgtggcccagccacctcctcacaggagagcgcctcggggacctcgacactcctgcaggccagaggtgggggctgaggccctctccgcgtggctagaggtagccaaagacattgaagatgggtgggggcacggctggcttggtggggatgggtttcagcaccacgggcctgcacaccttctgccccaggccgtccacatccttgcagaggtgcgccagctccccgggaaaggctgggctcttcctccaaaggcccaggctggggacaggactctgaggcagtgcccccagggggcccggatagatgggctgtccatggtactggaaggggcagcaactccaggcattgacgcggcccaccaaggagaccccaggcatcttgagcggctccttttcagccagggcccttggagacatggacaccagggtagtctcaggtcccaggggctccaagcccttgcaatttttcttaccctcatagggaggtccctccctggggcccagtcccccctccagccccacatggtagctgtgggtgggccttggctcttcccagaaggaagcgggcagctgtcttttcctcatgggcacctggccaggctgggcagcttctggatgctgcctctgtgggagctgctccttagcaagacattcctccctgtaggggttcctcagcaccttctccttgcagcccccacccccgccggggctggaatcagggcccaaatccaggagcagcctcctgggccggtcctcagacccccttttcaggtagggctcagcagctctgccaggaaggccccgcgggagccgggaatacttctgggagaagcgcttgagctgcttctgcaggtacttgcgatggtccacggagcggcggcagggtgcggacttatccagggctgccttgatgtcgctggacgccaggttcacgaagttcagcagcatcttcacatcactgtcggatgccatcaccagggggccactgcacgaggctttccatgaagagggtaggctctgctggtggccggcagctccaaggaagggcaccgagctgacctgggggacaaaacaggccatcggagtctctccaagcaaccacacccagccctcccaaaagaccacagcacctgtctacaaacagtctccccaccccagcacctctcagccctaaacagagtcctgggtagagggatgtgggtgcaagtggctgagcacttcctgcacacctgggatgcggcaggcaccagcagagcctcgcccagcctgcttgggtctggtgccccttcttgcagccaaggctcagaaaggtcaagcaagtcgcccaaggtgacccagctacaggtggcattgctggggctggcacacactcccagcctgccccatctcccacacaccacgctgccaacgtgtgcaacttgccagcgaggtgtttattctctgagctgaggcaactgttcctctttaaagcaaggccaagcccccttcctccctggtggtagcctccccctcccaccactcctgcccccagcacgaggagcaccagcccccctcctcagtccccacgctccacccccagctctcacgcaggaccaggcaggacccctgtctggcacttaatcgagacctgccttgcgggctgatctcaggctgcgggcagcagggattcccccgaagaagcatctgcagcaatttcatgcctcctcggccgccacccacggcacctcgcccctcccccaggccccagcctgcccccacacccgccacccagtcgggccagagccaccgggcctccacactgaccgaaggtgcggcccaggccccaccaacgtggcccggcaggttccccactgcagacctgggacaggccccggcgcagccggccgagctccgtccggctggaagcagttgtgcaacccttgagtgggctgaatggaggacaactccccggagctggggggcccctcaggccaatcaggagcgcctctccagatacaaagcatcccaatcaggcggcggcgccccgttcccacattctttgccgtcacaaattgtcaccatggggaccatcacaaaaaagacagctcccaaatgcaatcatttcccggtaaatttctacccttcagccccactctcctcagcctccacccccctcctccccttgacctcagttccctggtttctcaagggggtggggtgtgtgtgtgtgtgtgtgtgtgtgtgtgtttaaaatgtccaggattgagaaggggctgggcctagtggagacaggcttgcaaacctcccccaaagactccaggcctacagctgccatgctccagtgcggacagacaatcggacggggtaagccggggcgggctgcttttcccgctgtccttgagtgttgagtggctctctcgctctcactctctcttctcctgtctctctgtctctctctctgtctccccctgccacccccaccaccctccctgccaggatcccccagggatcggggatggagggccttcaaggtcaggaggtgcgctgatgcctgtcggaaaaggtggccgaggaaggactctctaacgaggtgctgggatatccatgggaagggagctggagctctcaggaatcttgtctttatgtttgcttcctcaattgagctgcacaaagcctgaattgcccattcagcgcagccggacaaaaggttggcgttgcacggtccccttgcatttgtagtcaaacagttagggacttaaatcgagtcgtcatgatggagaaagaggtggacaaagcccatagaattgccatcagcaaacattttcctgtgtcatattagccagtttccatggctccccctggcctgcggacaatgggacaagtttgcacacttggctactgtcaccgtgccaacgccggcggggctgcaagcagggccactctgagcaagcaagggagcccagagccgctgttggccctgcccaccaactggccagagggaaggtgaggctgaaggcgagggcggccgcctgggaaatgctaatggtcgtgcctccgtgccagcccagctcacgggcccctttcacgcctcatcatttttctgcccagactcagcctcctcttccctcctcctctccttccccttccttttctcttccccttctactgccttctcctcctgtctccctcaccagccagatggctggtggcctgtgcgccaacccacacctctgtactacaacctaagatttggcatcttaggttgcaggactcctccctggagtctccctacccagactgggggcattggcagggcagagccagggcctccatccagaagtgatggccctgctccttcccactggccaatagacagctgctgtggcctgactccaagccatctcccctacccctggcctgagggtccttacaggcaaaatgaagggtttggaggagatggcccggtgctgacaagctgtgactcaatttaggccttgaaagccagcactgtattctccatgcccctaccctgctgcggggtcggggaagtgtggaccgagatggaagtgccgctggactgacgcatcctagattgttggccactacgtgccctggagggttgctcctgcctgcggcaacctttgcatgggtgagagccaaaccatcatcattttaagtgccagagatttgagggctatgtgtttctgcagcacgtcccagcccaccctgactggtacaagcaggaaacatcctttctgctccaaaacatctggcacgcgtggctgaagagagcgccctgagggcctgtggccaccagggccagctccctgctgcctactgtgtgaggctggtgtgcacagccaacagtttgaacctctccagcagctggcatctgactacgtaaccacctgctttgctgtgctcgcccttttctcc

SEQ ID NO: 1241315 - DNA, 4001 bp, Homo sapiens
ctgcaaggctgaagggtcactgcctgaggagccctgccccaatcctgccctccactcccatgcgcacacaaacggaagaggccacactgtggcccagccacctcctcacaggagagcgcctcggggacctcgacactcctgcaggccagaggtgggggctgaggccctctccgcgtggctagaggtagccaaagacattgaagatgggtgggggcacggctggcttggtggggatgggtttcagcaccacgggcctgcacaccttctgccccaggccgtccacatccttgcagaggtgcgccagctccccgggaaaggctgggctcttcctccaaaggcccaggctggggacaggactctgaggcagtgcccccagggggcccggatagatgggctgtccatggtactggaaggggcagcaactccaggcattgacgcggcccaccaaggagaccccaggcatcttgagcggctccttttcagccagggcccttggagacatggacaccagggtagtctcaggtcccaggggctccaagcccttgcaatttttcttaccctcatagggaggtccctccctggggcccagtcccccctccagccccacatggtagctgtgggtgggccttggctcttcccagaaggaagcgggcagctgtcttttcctcatgggcacctggccaggctgggcagcttctggatgctgcctctgtgggagctgctccttagcaagacattcctccctgtaggggttcctcagcaccttctccttgcagcccccacccccgccggggctggaatcagggcccaaatccaggagcagcctcctgggccggtcctcagacccccttttcaggtagggctcagcagctctgccaggaaggccccgcgggagccgggaatacttctgggagaagcgcttgagctgcttctgcaggtacttgcgatggtccacggagcggcggcagggtgcggacttatccagggctgccttgatgtcgctggacgccaggttcacgaagttcagcagcatcttcacatcactgtcggatgccatcaccagggggccactgcacgaggctttccatgaagagggtaggctctgctggtggccggcagctccaaggaagggcaccgagctgacctgggggacaaaacaggccatcggagtctctccaagcaaccacacccagccctcccaaaagaccacagcacctgtctacaaacagtctccccaccccagcacctctcagccctaaacagagtcctgggtagagggatgtgggtgcaagtggctgagcacttcctgcacacctgggatgcggcaggcaccagcagagcctcgcccagcctgcttgggtctggtgccccttcttgcagccaaggctcagaaaggtcaagcaagtcgcccaaggtgacccagctacaggtggcattgctggggctggcacacactcccagcctgccccatctcccacacaccacgctgccaacgtgtgcaacttgccagcgaggtgtttattctctgagctgaggcaactgttcctctttaaagcaaggccaagcccccttcctccctggtggtagcctccccctcccaccactcctgcccccagcacgaggagcaccagcccccctcctcagtccccacgctccacccccagctctcacgcaggaccaggcaggacccctgtctggcacttaatcgagacctgccttgcgggctgatctcaggctgcgggcagcagggattcccccgaagaagcatctgcagcaatttcatgcctcctcggccgccacccacggcacctcgcccctcccccaggccccagcctgcccccacacccgccacccagtcgggccagagccaccgggcctccacactgaccgaaggtgcggcccaggccccaccaacgtggcccggcaggttccccactgcagacctgggacaggccccggcgcagccggccgagctccgtccggctggaagcagttgtgcaacccttgagtgggctgaatggaggacaactccccggagctggggggcccctcaggccaatcaggagcgcctctccagatacaaagcatcccaatcaggcggcggcgccccgttcccacattctttgccgtcacaaattgtcaccatggggaccatcacaaaaaagacagctcccaaatgcaatcatttcccggtaaatttctacccttcagccccactctcctcagcctccacccccctcctccccttgacctcagttccctggtttctcaagggggtggggtgtgtgtgtgtgtgtgtgtgtgtgtgtgtttaaaatgtccaggattgagaaggggctgggcctagtggagacaggcttgcaaacctcccccaaagactccaggcctacagctgccatgctccagtgcggacagacaatcggacggggtaagccggggcgggctgcttttcccgctgtccttgagtgttgagtggctctctcgctctcactctctcttctcctgtctctctgtctctctctctgtctccccctgccacccccaccaccctccctgccaggatcccccagggatcggggatggagggccttcaaggtcaggaggtgcgctgatgcctgtcggaaaaggtggccgaggaaggactctctaacgaggtgctgggatatccatgggaagggagctggagctctcaggaatcttgtctttatgtttgcttcctcaattgagctgcacaaagcctgaattgcccattcagcgcagccggacaaaaggttggcgttgcacggtccccttgcatttgtagtcaaacagttagggacttaaatcgagtcgtcatgatggagaaagaggtggacaaagcccatagaattgccatcagcaaacattttcctgtgtcatattagccagtttccatggctccccctggcctgcggacaatgggacaagtttgcacacttggctactgtcaccgtgccaacgccggcggggctgcaagcagggccactctgagcaagcaagggagcccagagccgctgttggccctgcccaccaactggccagagggaaggtgaggctgaaggcgagggcggccgcctgggaaatgctaatggtcgtgcctccgtgccagcccagctcacgggcccctttcacgcctcatcatttttctgcccagactcagcctcctcttccctcctcctctccttccccttccttttctcttccccttctactgccttctcctcctgtctccctcaccagccagatggctggtggcctgtgcgccaacccacacctctgtactacaacctaagatttggcatcttaggttgcaggactcctccctggagtctccctacccagactgggggcattggcagggcagagccagggcctccatccagaagtgatggccctgctccttcccactggccaatagacagctgctgtggcctgactccaagccatctcccctacccctggcctgagggtccttacaggcaaaatgaagggtttggaggagatggcccggtgctgacaagctgtgactcaatttaggccttgaaagccagcactgtattctccatgcccctaccctgctgcggggtcggggaagtgtggaccgagatggaagtgccgctggactgacgcatcctagattgttggccactacgtgccctggagggttgctcctgcctgcggcaacctttgcatgggtgagagccaaaccatcatcattttaagtgccagagatttgagggctatgtgtttctgcagcacgtcccagcccaccctgactggtacaagcaggaaacatcctttctgctccaaaacatctggcacgcgtggctgaagagagcgccctgagggcctgtggccaccagggccagctccctgctgcctactgtgtgaggctggtgtgcacagccaacagtttgaacctctccagcagctggcatctgactacgtaaccacctgctttgctgtgctcgcccttttctccc

SEQ ID NO: 1241316 - DNA, 4001 bp, Homo sapiens
ttgaccattaccatgtggtcttttccctccaatattttattataaaaagtttcaaacctctggcaaagttgaaagatttctatagtgaaaccaactacctggattctgggtctttttactgtgttatttgtctgtaattacatgatggctgtttttttttgagacggagtctcgctccatcacccaggctggagtgcagtggtgtgatcttggctcactgcaacctctacctcctgggttcaagtgattctcatgcttcagcctcctgagtagctgggattagaggcgcccgccaccatgcctggcaaatttttgtatttttagtagagacaaagttttgccatgttggccaggctggtcttgaactcctgacctcaggtgatccacctgcctcagcctcccaaagtgctgggattacaggcatgagccactgcacctggctacatgatagctcttaaatgacagcatttacctgtcactcattaaagctgttctctgtgctccttggagctttgaggttaattattcccagcactttgaagtgtggcatttacctgggtgatttttcccaagattcttactatactaataaacatatttttaggctaggtccagcacaattctaggttgcagttctggttgcacctttgcaggagtctaactgttgtggcttctatctcttgaaaatgatatccccatgcccaacctttcagctttgaagagaaagccttgtgttctgaatctttgaaatatttgagtaattaaaaagggctgtttcccccaaaatttactcaattctcagtctttgagaattttttcttatggaagaaaaaattgggataacagtctgaaaaatcaaaatttcaaaacaggccgggcacaacggctcacgcctgtaatcccagaactttgggaggccaaggcaggtggatctcttgaggtcaggagttcgagaccagcctggccaaatggcgaaaccctgtctctactaatattacaaaaattagccaggcatggtggtgtgtacctgtagtcccagctacttgggaggctgaggcacgagaatggcttgaacctgggaggtggaggttgcagtgggtcgagatcgtgccactgcactccagcctgggcaacagagtgaaactgtgtctcaaaaaaaaaaaaaagaaaagaacaaaaggctgggcacagtggctcacgcctgtaatcccagcattttgggaggctgaggcaggtagatcacctgaggtcaggagttaaagaccagcctggccaacatgtgaaaccctgtctctacaaaaatacaaaaaaaaaaaaaaaaaaaattagctgggcatgatgggcgatgcctataaccctgtctctacttaaaaaaaaaatacaaaattagctgggcgtgatggcacacacttgtaatcccagctactcgggaggctgaggcaggagaatcacttgaacccaggaggcagaggttgtggtgagccaagatcgtgccattgcactccagcctgggtgacaaagcgagactctgtctcaaaaaaaaaaaaaaaaaaaaattaaaaaaaatccagaaaacatgctttcatttcaaactcaaactctcaatgaaattatttctaagaaaaagaaaagcagtcaccaggtgttaagtctctcggcttttcagcttgttctggttgaggtagaagaaatgaaactagaaggagaagaggaagatggaaaaaaatagacattctgccctcgaattaccagaattaattgaactattcatttccttctccttcagtttcaaacccaagttgcagtaatgagacagtcacttaccaacaggtggggctgaaatagatctctggagatctcctggatgtcgactaggaaaataacctccaaatagcacgtttccactcttttcacatttctttagcaggtgtttatgtctactcagcaggcaactaaccacttagtaaaagaagcacaggccaggctgctctgggcattgttctgttgctgctgcatcataatcataacgtgctgacatagtctctgcagtaagagaagaacggcactggggaggagcagccgtgcaggtctgcccctgagaggaagtgtggtcagcattcccatggagccctgaccggaccgctcaggagtgggcattcaggtggtggtgtgaagttttcagaggatttcttggagagaaaagtcaatttagcaatagtataaccacgggaaaaatatcagactttacatcattgatcatacaattgataatttattattcactttccctatatcccaagtttcagagacttaaacatatttaaggcactttgagcctctgtgaagaaaagcgttaaaagaatatagcatttttagagggaaactgcttagaaacagagctgaggccgggcgcagtggctcatgcctgcaatcccagcactttggaagagcaaggcaggaggattgtttgagcccaagagtttgagaccaacctgggcaacacagtgataccccatttctattgaaagaaagaaaaagaaagaaaaagaaagaaaagaaagaaagaaagaaaaagaaaaagaaaggaagaaggaaggaaggaaggaaggaaggaaggaaaagaaactgagccgagggctgtatagcatgaatatttaatgatattaggctctggtggtggttcaatgcacttgattggctgagtctctttctgcacttgtccgagtggttcccctgttattgtctcagatgctctgtttcgcctattctatgttgagtgccatcttttggatggacaaattcttcctctggtcatacctatagtcccactgagtaagatttcttcattgagcatacttattgcatgatcacaacttgccatgttcctgttcttcctgcccaagggccagaaaatatttttgcatagatctgatctcatctcttaactgttgatgatatcaatttaattctgcggtaccttgattaaactttggtattatctcacgtccattttttgaggctactgatacattaaaaagagaagaaataccaaaagaaggaaataaaaataatggtatatttaaaatatttaccttcaaaagcgtctttaaaatgcttttaaagatgcacaaaatataaaactgtatgtataacttcatttggagattgtaagtctgaatttgtggcactttgtcaaagtgaggtccgtgagcaattagccctctttgtccctcatgagatgggcctgcctattcacgcctgcatgggatcttctcagctgcatgtcctaagcttgggatatgaagctttcctgccacattcagtccctggtgagtgcaatgcaaggtacattcttttggtcagctcagtaatgagtacttactatttcctgggcaccatgccatgctggaccacaaaggtgaacagtctctgcactcaagaagtttaccatcaagtggagaaggggtcatgtaaacagattatttcagtgttatgtagtgataagatagaggggtgacaggggattctaggagcacagatgaagggtacttagtccaattggaggatttagggacggtttcatggaggagctaatatccaagctaaatcctgaaagattagtcagtctgagcaaaggcacagaggcataaaatgacagggtttgaggggtaactacaaatggtctggtgttacataaagttgaagggttgaaagaaaatgaagttcacggaagaagagcctagatgatggagggctttgaaagccataactaggtgctgggacttcatctgctccagtagctctaataaagagtgttacatggagagatttatgttctgaattgatcattctgagagcagagtgaaggatagatttgggaagggcaattctggagatgcagaagccatggtagtggcagtggcagtgtcaatggaaaggagggagttaacttgggaactatcagtagagtccacaaaatttggtgactcactgggcttagg

SEQ ID NO: 1241317 - DNA, 4001 bp, Homo sapiens
ctctaatctctttcaaatcttaagtgttatcccagccaaacattttttaatgagtccccaccacctttatcccctatggcctacaaaggctttcaaactattaagcataaaatattaatgacctggaccttgagtagaagaggcaaaatcccccttaggagaagagggaaacagaaagtcaacttcattcagtgcaaagatatgaatgatgtttgcaaccacatcccactacttcatcttattttatattcctggagtactcaactggaaggcactgtgttaggtatgtggcatacattatgtcattattttacctagccgccaagaagagacaccgcatatccactaccaatctttattaatttcaaaactcctttcataccctattttagatcactgtcccaaccatgactaggctctcatgatctacatctgacactaattatctggttagtcttaaaatagaagaaaagaaaaagaaaacaacaataacagcaaaaggcagtgaagacactgatttgaatggatgacagaaagtacagatattctttatcaccatctgttctgagataatagacgtaaaggctttttataataatattgtcaataacttccatcactagtaactattcgccaaaattctctttaacagtacagttacaatacaaaataccgtttaacaaaattattacctggcaataagcatagtttccgagagctttatgagcttcatcaataactaaacactttatttcagcagcgggacaagctcctctagaaaggtcatttaccatgacctgaggtgtaagaaaaagcactctcttactgcaccatatttccttcctggtggaagcttgtgtagaccctgaaaataaaagtgacattctacattctaaacttcagactgttatctataaaatataaatagtctggctttttcagaatgcaaacatgctttggtaacattaagagaaaaacaatttgacaattcatcggaatgctacattttaaagttctggtgtggtccaaatatcaaagctggcacttatctaggactacaaccaaattgtctttagaaaattcctacaaaatggcatatttgaagagaggcaaattcttcaactgagaaatctttttcaggaagaatgccaggaaatatcatgttcagttacccatggggtatacgcacataatagcttcaaaatactatgacaagctgcagatattctctgaagattgaataaagcaaccctattcatcagttttgggcttgctgcaagtagagaatgttttaagagggagggcgtaagatgcacatgttgtagcttgggaactattccacatgggtcaggaattcccagctcttacttcaaaattagtccagtctaagatacctgtcatttcggccatgtgggattgcgggatacccatcacctggtagcaagcctcgatctgctgtgtcaccaagggtttcgttggggccatgaagaccacctttcctgaagggaaccagcggtagaaattgtacatgaccacggcggcaataaaggtctttcccagtccggtaggcagacacaccagcgtattgcaaaacagagcagcccgggaaatgtgcagctggtagtcccgcactgggcaattggtagggtaaatccacagggcgcccgcggaggtgcagaacccgccattctctagacacaactgccgctcagcctcgtacgccgcgacaagcaacacatcatcgtccgactccagctgagcctccgctgctgctggcaaaggcgccttggagctgccagggctctgaggtcgctcagttccggagctgcaacccggagtcccagatgatcgggagatacttgagccccacgtctgaaaaagcgttctttgccgtccgctcattaggccgacaaccaccgaaggcttctgtcagatatccgtagcagcagcagctcaaccgctacggttccgatccccatcggtttccttcgcacaaaactctggaacgagaaggcgggactaaggccagtttatccagttgaaaatgccgctactgagtttccgttgggaatgattggctggcttcccggaaaccttcacagccctgccggagactcatgcgcattattaaggcgttactctaaatatggtccccggtgcggttccggtgttttgttttaacaaactctaaatttaagttccgtttccaatgattagatggctgggcgtcattgctaacgtgataaatcacttaaaatgttataatagagatttattgtaaaatattacatacccggggacaatggaatagccaccagtttgggaacttaatgttattgagcgtctaacgtgcctcattccttgtacttttaaatcagaatataaagtgaaaagcaaaaatgtgtagatggaataatttgtcttatatctctatctgggctgagaaaacaaaatgccaagtctctttttcaccgcgctgggagtggcaacccattattttaatattttcattgtttaaagggaagtgaacgtggtctggtccagctattcgtcagaatttttttttttaatgctccttgcaaagcagagctaactcataggcaacatgcccagagtcagcctacatttttttaagtaaggagtcctgatgttcaactattaaatctttattataggtaagagcattataataaacgtcggtgtgcaattattccactctaacgaagatttctgtctcaaataattcctgacttctctctaaacctgactttgagtaacctctgtaaatttgtttcctcgtgtactgagaaaaaaatatacatcacagagttacgagcattaataatgtcattctcatcagcaagtggcatcctgagtgcggcttctttataaattgttttatttgttaaagtttctgaacttcgttttggacaaactttctcgtatttgtatggggggaaggggatgggcagtttgtatttaagtttcggttgtgtgatctttaaaagggaaatggtgggatatgggttttcggatcgacaaggactgaagcacttcaggtgtgactttttaggctagaactagataaaacgagataaggagcctgaatgctgttttcttttaacaggttatagactggactttaaaggcatagctgccttaaatgtgggtaatggttgataaatgtcgctaccatcagaggtcgcttcacaaggtgtctaattcagaatcgaagatctctagcggtcttctactcagtcgactgcagagacgaccgcggtaggtttttcaacccggactcaacaaagaagccctcatagcacagccttgacgtcactcaaagacaggccccaatcccgactgctagagcagaggcccgcccctcgacctccgtgagtggccccgccccgccctagggggcggggcgatgccgaactgcggcgggctggctcagtaaagcggaggcagcgggggaagatggcggcggccgttccacagcgggcgtggaccgtggagcagctgcgcagtgagcagctgcccaagaaggacattatcaagtttctgcaggaacacggttcagattcggtaccagaggcgtaggggcggccgggctggtgcggctgagggacgcctcacccccctggagatgcccatacattccgtattcctctgtgcccccgccctcgtcttcccgcggccggtggcctggaaggccggagaggcccagcttgtgctttggtgcctcgctcccgcctctcgggcgttctctactggggcaggggagcagctttatttcttggggcacacaggctgcaattgtagagttagaacctcattgggatccttgagtgggggtggaggccagaaaaataggaacccgaggatattgggggctagggcggagaggccgaggaatagtggtgtggatgagactcctgggagcggggcgccggctactagggaaatgggaagggatgtgaagatttctgtgggaacggtgt

SEQ ID NO: 1241318 - DNA, 4001 bp, Homo sapiens
atgcgaggccatttcctttatcgagtccccaatccaaaaaataaggacgctgagagtccacaagttttcatgtaagtgcctgggtgagccagattctagaacgctggagacagctctgaccttataaagtgcagagccaaatcccagggctttttgatatttgccatggccagatttatatctggaaggaatgaaagaacaataacaaatttattttccagtctgtgtattatgaatttcaatgttttcctgtttcttcacatgaagtttcctttcagttggttataaaaccctgtctcgtttatgttggagaaagaacaggctgactgcaacacagtggacttcaagagctagttgaaaaggcatgctaaccccatctttccccctactccccgcagccccattccctttggctagaggcagccctgggacaggtcttgcctcaagcccagcctcttggaagagccacagctgagtcctgggggccaaacaggttccaggctaataggattttcctaaaatgaaagaatacccaagcactactgcctcacagcatcacgaatagctgcaccttgtgattaaaaaaaaaaaaccctggaaactccaaaaatgaactaactataagaatagctggggggaggcaggttggtgctcataaccggtcctgggaactttctaaagcaggtgggttcgccggtgttgtgcctcagcctgaaacacaaggaaagccggagagaccaaccaaataccaggactgcctgtcacagaagtgctggtccccaatccaggatgacattgttacagcttagttttcagcacacacacacacacacacacaccccacagacacatacatacgcacacaaggttaatttgttcaaagcagtatgttttcaagagctcgctgaataaagactgtgggtgtcatttaggtaaagttctccaagacttaaggattacttaactgtaattgcaatttccttaaagaatagcaaaacatttgcttacatgtatctctgtctgcagttcccacttctcattggcttgaaacttctgtgagaatcccacacaaacatagagcaaatccagccccgcggtgttcagctagcctgtctgcttgtctatcagccgatgcggcgcagtaattgctagtgaactagtaattggcctcccgaaatttaaaaaatacatacaaaaatcccttaaaacgacaaagttgctgccctttccagaaaagaaagaggaatgaagcgctgagaatttcgcagccctctctgatgctggcttttgaaactgtattagaaaatacccactcccaaaagaacgcttcaagatggaaattacagaggcgcagctttttataattaacaatatcattgcatcactagctcatgccttttccaatatcctgacaccgcctgaatcgcagccataaccattttccacccatcggatttttagcaaggcttccagaccctggagaaagaaaagtccagcgccgagaacccacctttttattcctggcatgtccaagacgcgcgaggaggagatgcgaaggcgagaagaaagctcgcgggcgggacccccggaggagctcgggcacgtcggcctcctctgggccctcggggctcgcgggtgttttattccagaggggccgagcgagtcgtggagaggacacggggagagcgccggggtcctcccagccactgcagagccctcagcgcaagcacctggttttgcttagccctcttcagtaattcagcattaaaccaattggaggaggaatgttaaaaatgaacacttcattttctaagtatgttaaacaatgcaaatggggcctcagtctggacacagctggttcagattacagcgctcaccaactggctagactcctcacaacaatcttggggcgtctgccagggcccagtgctcggcgctgggaggagagcccttccccggccgcgctcggctgcgagcgcccgggcagaaggcgaggggcgggcgcgcgcaggggtgcgggggctgggagggcccgggccccttgaccttcccacccaggggcggggcggggctggcagcgcggcccggcggggaggggcgtgcacgcccgcgctgcgtggcaaggggacccgcgagaacgttgtcgcctccggaaggaaagggacttgaactcacgacccacgcagctccagggactagaaactcacgatcgattgggaaaccagaacctacgaagcagaggcttggggcgagcgacgggagagtcgcgatcttcccgaagaaggggtggggagcagcggggtggggtgggggggaagaggatggaatcccgctggtgcgaattccagacttcagcttgtgcaatgcaagtcttaggacgcttttctctccccgccctcattccccgattctccctggcattttctcgctttcctggaaaagtgtcccctggctcgaaagtgattttaacaagttaaacggtgatttgaagaagggacagtctggaaaagcagaatggtggagacagcacataagacatgctgagtcctttgcattcattctagtggaggcttcaacctgtttctttttcctgtttgtttgtttgtttgtttgtttgtttttaagccattggagtacttttgtcaatgaaatcttacagaaggcactcactctataaaacgccagtggatggactgtggcctatcccatctgcttccacctgcatcttcctacctgcagccgaaaagccctgatccaggtcccctgtcctcaccaccactctaagcagtaggaatgatcatctccatgttattagaggtgaagataagagaggttaggtaacctccccatagtcacgcagctattcattggtacagctgagcctctggagtctacatatttagccttccctaaggcatttttgggggtaagtaaatggaattctacccaaaggagaataacagaatgtggatagttgttgaagctgtgtccattatactagtctaatctatttccttttacgtgtttgaaatttcctgtaaaacacttttttaaataccttatgtttataaggttgttcatccccccattgtttgtaaaagcaaaagattataaacacctttaaggtcgatcagcaaggcaccaatagggttaaataaagtaaggggcttccaaagggactattgtgcaaccaattaaaacctagacacttaagagtccacatcaaacgactccatttatataaaattcaaagtcagatagtgactgggaggcagcccagccccttctgggtgctggtaataatctaatgattgatctggatgctggttatgtaggggtgtgtacatttaatatttgtgaagtcttatgtatgttatatcttattttgaaaaaaagactgaaacagctccgtatgcactgctattgaagggtttccaatatattttgtgggtcaaaacagtagaatattggtaatttcacatagattgatctaatatagtaataaatgtaaaaagtaagctgcagaactgtgtgtaaagcatgccatcatttgtgggaaaaaaaataaatacataagttcttgcttgtacacgtacagaaaagacatcacctgaaggatgcacaagaaaccatgagtattattggtcttagctcaggctgctataacagaataccatagactgggtggtttatgcaataacatttatctctcccagttctggaggctggaagtctgagatcagggtgtgggcatagccaggttctcatgagggtcctctcctggttgcagatgactgtcttcttgctatgtcctcacatgatggagagagggagactagggttcctttttttgagatggagtctcactctctcgcccaggctggagtatggtggtgtaatctcggctcactgcaagttctacctcccaagttcaggcaattctcctgcttcagcctcccaagtagctgggattataggcacgcaccaccgtgcctggctaa

SEQ ID NO: 1241319 - DNA, 4001 bp, Homo sapiens
ccgtacagcaatgtgcaaatcacttgatcctataaagggtcagtttcctttctgtaaaacagggttatttatcattaccctgcctcatagtgccactgagaggctcaaacaacacagtgaatgtgaaactgctgaagtatttttactatgtaaggtgctccttttgtgaacgtctaaactttcttctaataagagctttactgtaaggttctttagaatatccatataaagaagatctaaattaatagggttttggaggtggcgatggagaaaaatgatgattgggagggatactgggtcagaatataaggcgttagttctggaattacagtgaagtcctgatgcaaaaccagaacagttatgtgcttaccctctgcagaccctggccaactccctcgctgcccgcccgcctcctccgcccgactgttacttttaggtgaactactggggagaagttgagtgtggtggtgtatggggagggactttcaaccctgaagatcaacttcttccccaatccctttaacaaacactcctcctcctcttcgggccttgttcagttagccgaaactatttctggtaagaaaatggctgttacaaaatttcttttaggcagcgtcctatgagtacctactccttccctcaccatgaactatttctaacagattcagagtcagaaaatcgtgttatgtgtatgttttgtttcttccaaggctcacccacaggcctcaccctcccagtcttaacgctcccatatataaaatgaaaagtgacagcgcctgtcagctccatcccacggccaccaagaggatgaatgagtgcctggaaggcgccagaagtggtgtctgttaaacaccccgtccaccactgtttataaagtatcgtgatgagtcccgttatgcctttccgctcaaggaaaccgcctagttagaaccaacactctccgtcactgaggaaggcaacactgaagttggccgggcacgtattatgcacagaatctgtgtcggggtgcggggacggagcgaccccccgttaccgggcggggcggggctcagggcaagcctacctgttgttccggatgctgaccagcacgcaaagcaccagctccaagtaggtgcgcagcacttccagccaacgagctgagagctgcagggcctcgacttcctcccctccagtcccggtgtccgcgccacctccgtcccctgggccaccgccgctcagatagttctcggcggcgaattcaacacgcagctctcgcacgaaccagccgcacttgcgcatgaggaattccagccgaggctgctccgcgggcgagacgcggaggcagatgcggagctggggccacagggccggatagaagaggcactcacgccagtgcgagcaggaggccgaggcccgcagccggtcgggcgccggcagaaaagagaagatgtgcacgatcagctcgctgggcagcgacgcagcgcccgccgcctgcccgcacagagccatccggccccgccgccggctgccggctcccggccgcccccgcagtacccggagcagcccccgcagccgtcgcagctgctgcagccgcagccgccgccaccgcgccacccgggcggccccggctcgggttcgagctcccggcggtcggggctgcggcactgacaagaacaacaacatcaatgactaggaagaagggggcggaaccgtcgtgggtctcggcggaaccaagtagaacacaagttgtggagagggggaaaggcctctgcgggcgtggcctgccgggagccagcctctgtcttctcaaactctactcacgtgcgtccgaggccggcacactgagtaactgcactgccctcgctcgtaaacttcagcggcccggaagcctcaaggcgtactgtaaggaaaaggcagccctccctgcgccggtcggcagagacagagaagtggtaggagctgagtttgacgtcgccgctggtgggaggagtccggcgcgcaccggcgcgacttccggaagaggggagcgcccgattgcctgtagggacgggaggcgcggcacgtgatctctgacgcacgcaggccgcggggcggggcggggctgggcggggcggggcggggcggggctgggcgggactggaaccggcacttggcaccccttacgccttacggtggccgctgcgcccagtcacatctgtaagtcggttaattttggcgctcggtcgatggaggtggcggtactctggtttagtgcgaaaggtcgtcacgcttctttgtaaaacgtttctcagtttgggctgaggaccctgagccaaagtggcggcatgcagggtctttctcagccatcccacctgcccagagtagggttaagaattcctgagattgcgccgctgagagggagctggcggacgggcgggctaaccccggcgggctgtgccgggaggggcggtgtggggcgtggcggaggccgcgaatggacctgccccctcggtccaaccacgcaggtggacttccgcgcactcgctggtgtgtggggaagcagtgaggacagcgtcaccctttggattcagagggagagaaaaaaattggcaaagggatctgagatccgcaggttgtgaccagcctcttctccagggcttgaggaagggtctcttttccctgtgctgagatttaaggctctcgttgaaaagttcacagtaatgacagagctttgattttttttctttcttcttcttctttttttgcctggtatccctaacttagattttccaaaccatgtccctaacttcaccacagcctactgcaaagtaaactctggttgcaaagagtggtgaagtcagaaaagattaagtgactttatgtaataatcgagggttgctttagggaggctgcctctttatgtaataattgagagttgctttagggaggctgtgatgttggaatagcatcgttcttttgtggtaaacaccaagactttttggacttttttttttttttttggttttaaggagcggagaatttaataggcaagaaagaaggaagaaggctgaaggaagaagctccccactacagagacagacggagggggctcccaagacgaaagaggagacccccattctagatgttcttaaccctttgagggcaaagctctccgtttaatgccttgcacatatcaggttgccaacaacatggtgtggtttatcaattgtgataggttacttattcgagcccctgtttacaagagttttaggtaattataccttattaattttaatgaactcttagagggcgaccccagtcgtgggttcggcaggatgaaacactacccatttaccagtttacagacatttaggtcgtttcgagttatgaataatgctgtgaacattcatgtgcaagtctttatgtggacgtatgttttaatttgtcttgggtagatacctaggaatgaaagtgatgggtcgtagggtagttctatgtataactttttgagaaacggaaactttttccaaagtggctgcatcatttttcattcccaccagccatgtatgagggtttccagttctctgacttttttttttttaatattctagaaatgcactgtaatttgagattgatatttttttcttagcattttgctagcaacaagctaccatcttggagatcattaataattagtctttaattattaggaatggttcctgagtaaaatgaaaatatgtcagtctgccataaatgaaattcattattttagaatttcaaactttcttcttaaatgaagtgtggtaggaatcctattttaacaactgtaagctaaagaattagctgtgaatcttgcccagtttcaataataaatcagtgaattccaatggttgcacaaaatttatcttatcaggccaatatatttactattaattaaatgtatattgagtatgtatatttagcatgttaagtgagttagattcttttgacatatattctatactgctaaaataaaattgactcatataggacagaatggaatt

SEQ ID NO: 1241320 - DNA, 4001 bp, Homo sapiens
tcctgcctgaaaatgggcataacttccatctgcatgttgatgtaaaacccagagagacagtatcttatcaatcacctctaaaaggcaaatggggagcaggaagtattgagagagaggaaaaaaaaaaaaccgtaccattacaagtcaaggtcagtgaggaaggattaaggacttctacccaagcttcctgctaaagactaactatgcttcaagtttaagccatctaccttttgaactagattccatttacattattctacagaggaggaaatgaaaagtactgatatgctggaatacccgaagagggtcactatgacaaagtgactagcttctcttccagttagatctcttctgaaagctttggaagaaaaacagtattcacagacaaatcatttttttattctctaatttcatatttaaaagcactacagacaaaattttagttacctatccagacaagcggtcctggaatatgtttttatattaagttatagccgggtctcagtaagaaagcaagaaaacagcttgttgctgacttctaaaccatggtagcatggggtggtagcatggtaccatagggtgggatagggacaacctggataaattaactcctcaggtaattattatttaagacaaatgttggattaattcaaactcctccctccctttacaacagaaaaaaaaaatcatgtaagatccactctccctcctcctggccattttctaacaaaaaatgctaacaagcagatagatgtccagttaaaaaaaaaaaaaaaaagcaaactgatttatcaacactagaagtggttctcttttttttcagtaattctgattgcaaactatcaaactacgaatttagcttcctaaaaggctttttacattacaccctccaaaaaacctcctaccctgacttaagtttttctaaatcaaatgtcttatactgagctgtactcgcaacgcttgctggacaagaagttaaagaaattgacaactattacattaaaattgcaaaatgctgataccgaacaactttcgattcaaatccactgcgattccaagcgttcgtggaagacaacttcctttttctaccctgcgggtccccccggcccttccgtgagcccaggtccccgcccgggcctgcagtgacatcccaggacccatcttctgacgtcacagacacacggacccacagccctatgacttcatcgtggactgaggacgaaccgcagtcgacttgcgccagcccagaggctggggaggcgtccgagcctccgtcccgcctcgtcgttgaagaaggttaaggacaagcgccagctcacctgcgctggggcagggaagggcagagtggccgagcccgggagggcgcgacaggggcgaggcgaccccagtccagaggctgacttcctcaccgccctgggtcccgtaagtgggagcgccggtccggtgcaagctcacggcctatccgtgaatctcctcggcttcagcggggacccaggaccccgctccctacccgcccgaccctccgtggcccgcggggacgctcagcgcccgggccgtgcgcgcggaaagagccgcaccggaggaggcgcaggcggccgggtccctaccccggacccgcgggcggcgcccccgcccccacccccacccgccccgcgccccgggagcgcaggcaggcggcggtagggggcggggagcggccacggtggccgccgccggaccccagtcgcgcggccctcgcgccacgccccacctcggcccggacccacctgcgctcctgccccggccgcggcctggcccggggctgcaccagcccgacgcagtggtggcggcagcagcggtggcgggaggcctggctcactccccaccgctgagtcggaccgagcacccagcgcggcgcggcggcgcccaacgctcgccccgaaacccatttgtttggctaaaacggagtgacgtcacgcgccggcccaatcgacggttggccgggggaggggccacggatccagagtttcacggcgccccctgccggacactgggggcgggaagggggaagtgaaaagggagacctggatgacgcgtctgcggcccccaagtggtagagaatgaaagtttgagcacgactgtagggaaaggaatcaaacctcccaggccagccaagaagggtagtgacgccagggttcaatcagcagacatgtcaagtttatgaatattcgtgggtggacctgaagctgtaaatggtctcagatactattagataacctagtagacctggatcctcatactggttctgctgctagcttggaaggctggggttcagagtttcaatttgtaaaatgacaaaattggaaaggtcccttctgactctctttcctatgaaaatcatggcagggataccggtcagaaagtagataaacgttgaggctgacacgaaactgttaaagtctgtagaagcttaagggctggttaatgatggatataaatttttaacactttatattcaaatcagagggccagtgaggaacttttgattcccaatctttaagcttattattgttttcattgtgaaaataatattaaccacattgaaaaacatgaggacaatgtattttcttctagaccttttgccccatcacatatattttactacactgtaatagtagttgtacgcgattttgcatcctcttttcacttttataagcattcctcatatttccacataagcttcataaccagtttaacagctgcataaaattacattaagtggacataaaatttactgcagtaattctctatttttggacataacttgtttccttcattcactttttgccattataaagaaatcatagaacatcttcatgaatgtagatttttaaagatacccaaaagtgaaattactaggtgaaaaagactatcaacactttcacagttactaatacaaactgccaaatgatttttaaaaggttgtaccaagttacacttaaaccagcaactttgattttagccagtccttaacaaaaataattttgtccaattataaaactactgttgtaaaatatatgtgtaaaatcttaaatattaaaacgtaaaaacaaaataaaaatatttcccataatctcatcaccaagaaataaccactcagtatctccatctagacctttatctatatacatatttttaataaaaattggagaggggaagtccaggcacggtggctcacatctcaaaaaggaaaaaaaaaattaaggaagggtgttatatggtacaccgtggcatcaaactgtatgtctgatttaatatgtgagcaatattagctcaatatatcatgatcatttgaagcttctttatgtcatagttagctcaaaattgtaaaacttcagtttatcctttcagattcatctcaaacactgtccttcttaaaacctcttgattccttctgggcatggtggctcacgcctgtaatccaagcactttgggaggccaaggcatgcagatcatttgaggtcaggagatcaagaccagccttgccaacatggtgaaaccctatctctactaaaaatacaaaaattagcccggtgtggcagggcacgcctgtagtcccagcaacttgggaggctgaagcaggagaatcgcttgaacctgggaggtggagtttgcagtgagctgagaccacaccactgcactcctaactgggcgacaagagtgagactccatctaaaaaaaaaaaaaaaacaaacaaaacttgattcctgttgattagaggactcaaaaaattgatataaaaatgaaattaattttaaaagacataataaaagcccgaactattaattattatattttttcatctttttcttgaggcagggtctcactatgttgcccagggtggtctcaaactcatggcctcaagcaatcctcctttctcagcctcccaaatagctggaattacaggagtgagccaccatgcctagcctatgaattattgattattaaagtccacagacata

SEQ ID NO: 1241321 - DNA, 4001 bp, Homo sapiens
aactcttatttagtctgactttcatcctttcccattaatactagcacacctggccgagaacggtggctcacacctgtagtcccagcactttgggaggctgaggtgggcggatcacgaggtcaggagttcatgaccagcctggccaacacagtgaaaccccgtctttgctaaaaatacaaaaattagccgggcatggtggcacgcaccggtagtcccagctattcgaggggctgagccaggagaatcgcttgaacccgggaggcggaggttgcagtgagccgagatcgcaccactgcactccagcctgggtgacagagcgaggctctgtttcaaaaaaacatacaaaaaaactagtacacctaacttacatacagccgtgtagccggccccagaatcgctaccgctcgggaaagacacatgcaagcgtccattttggacctccttcaattgcattacatagtatcttgccaagattctttcatcttaaaggttgactaacactctcaatatcagcagttgcataataattcaagtgcctctcagtctctggtgatccaaaggctcaaatgtgtatctttcatacaaaattttgtatacaaaatttgtacatacgaaaaataatttgtatacaaaattgtatctttagagacttcactcaacactgtcagcataaaattcctcatttcttaaaagaaggaagaaaaaaccagaacaactttcagtagcgcacacaatgctgtcaaattcccaaggttgtggtgaggatcaaaataacatgtacaggaaagccttgttttgtgaacttccagtcaaatccaatagtacctaacgggtaaatttttgcttttatttcctgcctgaaaatgggcataacttccatctgcatgttgatgtaaaacccagagagacagtatcttatcaatcacctctaaaaggcaaatggggagcaggaagtattgagagagaggaaaaaaaaaaaaccgtaccattacaagtcaaggtcagtgaggaaggattaaggacttctacccaagcttcctgctaaagactaactatgcttcaagtttaagccatctaccttttgaactagattccatttacattattctacagaggaggaaatgaaaagtactgatatgctggaatacccgaagagggtcactatgacaaagtgactagcttctcttccagttagatctcttctgaaagctttggaagaaaaacagtattcacagacaaatcatttttttattctctaatttcatatttaaaagcactacagacaaaattttagttacctatccagacaagcggtcctggaatatgtttttatattaagttatagccgggtctcagtaagaaagcaagaaaacagcttgttgctgacttctaaaccatggtagcatggggtggtagcatggtaccatagggtgggatagggacaacctggataaattaactcctcaggtaattattatttaagacaaatgttggattaattcaaactcctccctccctttacaacagaaaaaaaaaatcatgtaagatccactctccctcctcctggccattttctaacaaaaaatgctaacaagcagatagatgtccagttaaaaaaaaaaaaaaaaagcaaactgatttatcaacactagaagtggttctcttttttttcagtaattctgattgcaaactatcaaactacgaatttagcttcctaaaaggctttttacattacaccctccaaaaaacctcctaccctgacttaagtttttctaaatcaaatgtcttatactgagctgtactcgcaacgcttgctggacaagaagttaaagaaattgacaactattacattaaaattgcaaaatgctgataccgaacaactttcgattcaaatccactgcgattccaagcgttcgtggaagacaacttcctttttctaccctgcgggtccccccggcccttccgtgagcccaggtccccgcccgggcctgcagtgacatcccaggacccatcttctgacgtcacagacacacggacccacagccctatgacttcatcgtggactgaggacgaaccgcagtcgacttgcgccagcccagaggctggggaggcgtccgagcctccgtcccgcctcgtcgttgaagaaggttaaggacaagcgccagctcacctgcgctggggcagggaagggcagagtggccgagcccgggagggcgcgacaggggcgaggcgaccccagtccagaggctgacttcctcaccgccctgggtcccgtaagtgggagcgccggtccggtgcaagctcacggcctatccgtgaatctcctcggcttcagcggggacccaggaccccgctccctacccgcccgaccctccgtggcccgcggggacgctcagcgcccgggccgtgcgcgcggaaagagccgcaccggaggaggcgcaggcggccgggtccctaccccggacccgcgggcggcgcccccgcccccacccccacccgccccgcgccccgggagcgcaggcaggcggcggtagggggcggggagcggccacggtggccgccgccggaccccagtcgcgcggccctcgcgccacgccccacctcggcccggacccacctgcgctcctgccccggccgcggcctggcccggggctgcaccagcccgacgcagtggtggcggcagcagcggtggcgggaggcctggctcactccccaccgctgagtcggaccgagcacccagcgcggcgcggcggcgcccaacgctcgccccgaaacccatttgtttggctaaaacggagtgacgtcacgcgccggcccaatcgacggttggccgggggaggggccacggatccagagtttcacggcgccccctgccggacactgggggcgggaagggggaagtgaaaagggagacctggatgacgcgtctgcggcccccaagtggtagagaatgaaagtttgagcacgactgtagggaaaggaatcaaacctcccaggccagccaagaagggtagtgacgccagggttcaatcagcagacatgtcaagtttatgaatattcgtgggtggacctgaagctgtaaatggtctcagatactattagataacctagtagacctggatcctcatactggttctgctgctagcttggaaggctggggttcagagtttcaatttgtaaaatgacaaaattggaaaggtcccttctgactctctttcctatgaaaatcatggcagggataccggtcagaaagtagataaacgttgaggctgacacgaaactgttaaagtctgtagaagcttaagggctggttaatgatggatataaatttttaacactttatattcaaatcagagggccagtgaggaacttttgattcccaatctttaagcttattattgttttcattgtgaaaataatattaaccacattgaaaaacatgaggacaatgtattttcttctagaccttttgccccatcacatatattttactacactgtaatagtagttgtacgcgattttgcatcctcttttcacttttataagcattcctcatatttccacataagcttcataaccagtttaacagctgcataaaattacattaagtggacataaaatttactgcagtaattctctatttttggacataacttgtttccttcattcactttttgccattataaagaaatcatagaacatcttcatgaatgtagatttttaaagatacccaaaagtgaaattactaggtgaaaaagactatcaacactttcacagttactaatacaaactgccaaatgatttttaaaaggttgtaccaagttacacttaaaccagcaactttgattttagccagtccttaacaaaaataattttgtccaattataaaactactgttgtaaaatatatgtgtaaaatcttaaatattaaaacgtaaaaacaaaataaaaatatttcccataatctcatcaccaagaaataaccactcagtatctccatct

SEQ ID NO: 1241322 - DNA, 4001 bp, Homo sapiens
ggattttaggggaaattttactgctccataaaatcccaaaaccttcaaaccactagaattgatatatgctcatcgatatgactttcatctacatagttgtgctagacttactaacaaataagttagcaaaccagctcagggaaagcctggatttctaagaggtctatggttttaaaggaaaacttcaaacgtttgattactcacacttctctttcctttaatgcgctgggatccttcttttctttctttttaggttttaatctatccttttctttactaggaagaaaaaggtaaattaaatccaagggagaagaaaaaccacagcaattaaaatctcaaaaatctaaagttccatttttttttttttttggtctactgaagaaatcctactttgtgatatcctcatgttaatatcagcatactctttctgagcaaataactctagtgcaaagcacagtacctggaagtatcagaattaaccagtaatgccaataatgcataagaattgttaatgagtaaataaaagctgattatactatatttattttttagtcagaatctctcacatcaaggatcacaatccacttccaagcaatgggtaaaagggtgacagttatcttctgaagattcagatgctttaacttttgggggaaaagtattaccccatatgcttcttataaagggctaaaatgtaaaaacgcatatacagaacttaacccttaactagaaagaaattattattaatggagtgtcattcctaaaaattacacaatacatccacactaaaggctgagaataataattctgaaggttttaacgactattctcttattctgagactcttttttgtatttttagtggagacagggtttcaccgtgttggccaggctggttttgaactcctcacctcaggtgatccacccgcctcagcctcccaaagtgctgggattacaggcgtgagccactgcgcccggctttctgagactcttaaactcagtgaagatcagtctttatttaatagctatgcttattctacacttaagcagggacaccgctttgatcctcttcatactagggaatttcacttcactttcttcttccacagtgatttggattcttatattagtaagacttataaaatggagatatcttggagttttcccattttctctgacaaaaatatttgagtaccaggcactggaaacgccagacaaacaaggtctctaaccttgccatctttcaacaagaaacactcccctcgccccaccccaggggaatgtagtagtgtaatggtaaaaacataaagagaactatacggacttcaccgaactgacatgaggtttaaatgcgatatggcagacaaagcatataacggtagaaaaagtgaacacttaagaaatgtttaattcccatcgcctttcccagtgtgatcgctcagcagctaaattactgttaaacactggctatctcatgctatataaatctaagacacgataataagcaaaaaacaaaataataacaacaaacatttttactacttatcctctctagactcttattagaatatccctgggcagttgattccagacactcacagcctctgatctctgagactaagcattcgcttcatggtcgcatacttccttgttttcttttgcttccccttgaaacagaaattttagaattaaaaaagttggaaacacacggcatcttttaaagtctcttcttttctcttgtctattgccttcccttcttgcctcaaataacccagaccctcttccccactctgtaaagcataacagtcaccgcttggagaagtttaagagctaagaccagaatgaaaatatgctaggataatgtgaaggaaatttggccacggtctgactacctccttctccacccaaaaagtggcctgataacgtcccttcttggaccgtcttctctcaccatggtcacgccaaactcctggttcttccgtaatcaccaacggcgcaatacttctacgtcattcacatactgcttccggcaaaggatagcccggaagcggaaactccttggggaaagggcaatcccccgagccggttcccaggccgggtggagaccaactctggggtctgttggtgggagagtggggagcccgtcttctgctgagtgctgccgccccttcccaggacagcggaggtggaacttcgtcgcgctgcaacccccggctcgggtaacgtttctctccagccttaggcagagcccagaagacctgcctttaccagagttccagagagagagggaggaaaagggtaggggggttcagactcctggtttgcccagtagtttgggggaacacattctcctcaccctgtagcgttggggtatccggtgtctatggtccagccctgaggctgtggttcctatttggttttcctagccgatatggtgctttgtgcagctaggtggatgattgttctcgagtatataccgtgtactcctctcggtgaagagagaaatgaagcagtgtttgagggcctagactatcgctagagaattggggcataagcttgcatatgttactacttacccaagccaagaaaatggtgagatacaatgcacatttattgtgaagccttggtgtgtcatctttaagtaaaaagggagaatttgtgagaacaaggagcgaaaggtagcttttttctttgagtacctgctatgtattccagtggttcttaactttttggagataacttatttcttgaaagtttgtggaaagccaggaacaattctttaaaaaatgggcacacatacagtttgtaatacacttaatgagattggtggactctgaagcccatccgtggaccctctgggtgtctgtaaactttaaatgaaaacccccatcctgtatactgtacttgtcactttattcatattaccttctttgaccttctcaataacataaattcttttattttacatatggggaaattgagccccagactttgttcaggggtctgtttgagtctcgtgattccaaagtctgtacttgtatttctttttttctttttctttctttctttctttctttttttttctttttttttttttttttttttttttttttgcactttgtcttccattctccagctactgatcaagctgggaacggaatgggtacctctgtcatacttttcttattgcatgatgctatcctagagttggaagtaaaatatgttatcaggtttaaaaaagaaggtgaccattgtataacccttatgatgaaaacacgtttattgtttaacacgaactttggagtctgactgatggggttaaaatccttgctctgccttataactcgccatgacattgggtgagttaatctatctgcatctcagtttctttatctgtaaaatggagataatcatagtagcactcttttattgggatgttatcaggacttatgtttattcatagttaacatgcgaggtccctagaagagtgtaaaccagactactcagagtgttttctgttgttaccattgtgtgtcttccaacttgaggatgtgtggcagggttggaattttatgccaattttattttattttattttattttatttttgagacagagcctccctctgctgcccaggttggagtgcagtggcgcaatctcggctcacagcaacctccccctcccaggttcaagcaattctcctgcctcagcctcccgagtagctgggactgcaggcatgtgtgtgccaccataccttgctaatttttgtatttttaatagagatgggtttcaccatgttggcaaggctggtctcaaactcctgacctcaggtgatctgcccacctcggcctcccaaagttctgggattacagacgtgagccactgtgccaagccccaattttttttttttttttttgagacggagttagtttcgctcttgttacccaggctggagtgcaatggcgcaatctcggctcactgcaacctccacctcccaggtttaag

SEQ ID NO: 1241323 - DNA, 4001 bp, Homo sapiens
gaggattttctttcctgagctgtatctcagggagccaaacaatgcagtcttaaggaagaggctaccttgtaaggagcttcactttggtccttcaataataaaacttcctgcaggggtacaaagcaggtccacccaaatgaatcctgccttattttgcaaaatgcatcagagtgctatttcagtacctttacatacaataatcctttggtaagaaatagatttcctgacaaataagcacttctctactttcccagtgtagcttgaaaacgaatgctgtgtttaaaaaaaaaaagaaaaaaaaaaagacgaaaaaaacccccagaaagtccccaaccccccttcaccaaaacaaaaaacaattccagcctaaaaagacaatgccacacagataatcatcttatcacaactgtattatgtacaaaaggctctttaaagctcaggaagatagttctctgagcatttctcttatgatcaaatcatctatttagctgactcttccagatgaaaatggtttcattcatcacaaaaatgtgtactgcacactcttcacacacttcatactgtaagataccttattattttaaatcggatatcaatccaatacatatttgtactcaagcaaacaccgtcaacctcaaattagtttaacaaagtctgctttttaacacaaagttctttccttggcttgttattaatataaaaccgaacgctcgaaacggcttacatcgagcatggactatggataccaagtttgtcaagcactgccccacccctagtaagagtggatgactggaacattttaatgcactccaccacgtagaacagccacagaaacttcacactggcgccagtagttgcacattttccagcacagatttttcttaaatggattttgcatcattctctataccaaacgtcactaacattcaggtatgctgaagacatagataaccacggacactgtaatatcaccctcccaacacactttcctcattcttttatcgttctgtcagtaaatgttaagaattaacgagttccccggcacacatcccccgtcccgcgtaactacgcaattaaggttataattgggaggctcgaatcattacatatgaaaattcagagaatagcaaaacaaaataagacgcaaaggggaacaggtctatctgcttaaatactgaaagattttacatctccaaaaagcatttgcgagatgccaagatttctcaaatgggcccctcccccgtcgtgagcctctttcctccccctaccaattctgggaagtcattagttggacgcggctgggatgctactcaccgagtttctccaccagcttaagcatcacgcctccaatgtgcacctcgccggtcactctcagggtgacatcgcggttcaggtccgtcacatggacactcagttcccacgtcccgtccgcgtagcagccatctggcatccttatcccgtccagagccatggctccttcctgcgagcgcggaggaaatggctctcgtaagcgtcactcccccaaagaaaggcgaatcccaccgaattcgcagcgccggccacgggctgggaggtggtggaggacccggggctttcggcagaaactcgggagggcggcggcggccggggctgcgggaggaccctacgccccgctcgccccgcagcgttcctcggtcccggcgccgcccgccccacaccgtccccgcctagcggaccgcggagggcttcacctgccggccggccccgagacacagcgcgggctgactccccgttcccctccccgccgcgccccctcgggtcccggcggggtcccgctccctcaccgcgcgctcctagcgctccgggcccgggactcgcgcggcaacaggcgaggggctggaggctcgcggggcggcggtgtccgcgtccggttcctcggctggcgaagcgctgcctgtggccggagcggctaatggagtcccgtcgtcgcggcccctcgcctggctccccgcgctccaccctctccccgccccctctgtccgagcctggctgggctgggcgcgctggctccctccttcgccgcccgcagagctgccctgagcgggtccggccggcctcgcctctgcccccgccctcccggcgccgcgctcgggggagggggctgcgggtcccgggcggggcggggcggcgtggggcggggcggcgcgggggtggcggggggcgcggcggggcggcaatctcggccccgcggagcgctgcccttttatggaaatgaaggacccggctcaggaattgaatccaacatccgggctctaggcggcgggccctgaggagggggagcgggggagcgcgggcggcctttcccggggcgctggtggccggcggggcgtctagagctcaggctggactggggcccccgcggcgtgtgtccgcgctggcagcagggagagggggcttgtccgtgagaaacggccccaggaaattcccagggcaaggtcgttttcggagaacaaagtcctctcgccccctccccacgcctgcagcgagacaaaaagcctcagggaggtgagaggtgccgcaccccgggagctggagagaggagtctgggacggagaaactttaaaaagtaaatgcccaaaccaactccttgaatgtcctacaaaagaataagaaaaccccgagggaggtgaaccacaaaaattgctttgcaagcaatgtccggcaccatcagcaactcctactggactcccaggagtttgcaagcgttcttaaccccttcggacgctccagccagatgccagtcaaacagatgatgctcttgcctgaggggaaaggaaagacacaacctagtgccacaggttttactcagaaactgtttccccagcttctccagctctttgtacttatttgtgtgtttttatatgcaagttagaactaacagtctattaaagctgttagatggagatacatgttccatcccaccctcagccacaccttggattttaatacttctggaacggtgcctgcaggtaccaggaagagctaaacaacttcacctgttgaagactggctagtgatggggaacggtcctcctgcttcccgcttttgtttccacttcccccattaactgttgtactctgttgagggaactcctttcagaaacagcaaaccagagaaactgcctcgctagcaaattcatgggctcagaaaataaacgtcaagaaggctcagattaaaataccttttaaagataaaagactccagttcgcagtctcataatcttgtcgaattgtctcaaacgcttggaaaaggaactcgctaggcagataaccttttgttcattaacattactgggaaacaagatgagaggcctcaagaaaggggtggaactcagaaaggagtgaaagcagcaaaatttagtcagatgccaaaggcttggcagaaaaaaaaatagggaaaaccactacagtgtttttagctagttatcatggagaaattgatgccttcagtctcttatctgtctactctccaatatttctactcgtggacgttccaaatagttcacttgaaagcaatatgaatgtccggagatgagggagtttatgtaaattatggggttgaaaatatacaggaaaatgtttttaataaattaaggaattgcttgttagggcacaaaactgcagaactggatatgcagctataaaattaagagcttatttacgttaaatgttcagagaaaaagactgtaaggaaatacagcaaaatgttaagaagctctctgggtcttgagatcacggaagttttttctttcttttattctttattttctgccaactcaaaaactttacaccaccacctagaattgcatccagcatttcagtttctctgtacatgccatgacattcacgatgatagacactggatacagcagctactgactgaacgatggacaggattttcagaggtttcctttggtgttttttaaatagttctaaagaaaacttgagttctttaagagcaga

SEQ ID NO: 1241324 - DNA, 4001 bp, Homo sapiens
caccgcgcccggccatatgcgttaacttttataaagaacttacagacacttagaacagtgtctggcacagagtaaacgcagtgcaagtgttttgctattatttgtgtgatctattatctgccttccccagttagctcatatgcctccaaacagcagaaatcttgtcttatttacatggcatagaactatgctcagctcaataaacatttgttaaatagatgagcacatacagaccccctacggggaagacagggtaggaaaagtccctgcgaggagtgcccagataggtaggcccctgaagagagggagtggagattcagtggagaaggcaggaaaaacaatcaaacaggctggagatggagcaactgctcagcaagaatgatgcccacacctaagggcattaccttagaagcaccattcctggatgtctcagtccccagatagcctgaagtctgcaaaaactaggagactgaaaggacagctggagggatggaggtcaagcataaggaaggacattcaaggttgatgagagcaaggaatggctggggaaccctagtgactaccagaccctcttcccaccctttcaaggacccaaccaaatgatgagaggagccacagccaggcccgatggtttttatttctttcagttatgcttgcggctggagtggggacgggggaagagcccatggcctgggctccctggagaccagggctgatgataccagctgccataggtgaggtaccaggcaaaggtgcccactgcggcgcccaccaccttgtgagtgtactggtggaaatagatgacggtacagagcagcaagaagttccagaggcccagcagcagcacgttcagcaggaagacaaggcgcagtggggcgccggcaggaagcccatgggccaggtacttggcgaacacagctgcttcctctgccatgagcaggcagcaaaaggtgagcaggaaggtgtgggaggagacggtgtagcctcgccactggtggccggctgccaggcagctgcggcggtcaggcagctcgtggagcagcagaccctggggcagtggctcgaagcaggagccagtcaggtcctcgatgagcaggaaggcccggccggctccccgccacacggctgcccctactaccagtcggctcaggtgtctggcagttactgccacgcgccgtgtagccaggaacaccaccagcaacacaaagccccctaagaaagtgcatgtccagccccaggctgaattcacaaattttctgtgggcaaagaagggagactattgagaccccaagctccatctcccaccctggtctgtgctcccatcactgcactctccccaaccctacacatcatcactcgttctctccttgccgtgccctttacagcccccagtcatttaacctttgctatctccttggaagacaattcagcattccagggtccatatttcctctttagtcctgttcccaacttcccctgtaccccagggctctgttcccttccccctcccccgaccttttcctcaacctcctagcctatttttagtgttcagactggcaggaggacagaagcctggagaagggagctaggatcccagagtgcagggacccggctcccacagccttgagtggactcacatgttgaagaagttgccgtggctggcgaagatagtccgagggttgacatggaactgcagaagcggcccaaagatgaccactgctgccagccaggcatggtagaggcgccgtaagcaggggctgcccagaaggcgggcggcctgttcgcttccaaagtacagcaaggcagaggccacccagagcagcaccttgagcaggcagcccagcagtgcctggattcgggccccggcccccagtcctgcccccaccaccggcccccgctccatgttccctcccctccccactaactgcttgctttgctgggcagctgaggaggggctgatggggccccccctggacaaggataggcagtgacaggtgtggcagacacaaggcagagccctgttggcagctggcaggtgggggagaggggcggggggcagtaaggggccagggtggaggtctgccacgtcagcagggtcctggcctcgggtgtgtggtagtatgtgtcctgacagcagtctgtgtcctttcctgttagtcctgtgtccttggctccgaccatgttccagttcctgtgacagggccagctgttcagggctgtccttgtccatagtctgccaaagtccctctccacccacccctactttaccatttgctccacagggaaatcagaggtcatggagataaaaataaccaaaccttgaaagtcgttttttaaaaaaagctgccagtcttatcagtgtgatctagcccttctcctggggttctgagcacaagagcccaccaacagcaggatgcagcaaggtggctgtgcacagcactgtggccatcataggccttgggaggcagatcagcatgggtatccacttcagtgccctgtgaccccagcagcttggctctgccctagttcctgtctggattgagggtctctaagggactagtttggcccagggctgctgtataaactggcggtttcatctgttgatcacgttgaccctcagatccctaaagattaggtttactcccaggtgacagaggtagaggagaccctaaaagggcaattgccagacaggagtcaattgaaaccttaagttccatcctccaaccaactaccctgggcctcagggctctccatataagcctgccctcccagtctgactgctgaggcggcgacagcagggcagtcagctacctatccacggagagtgcctgttagtcagtaactgtttcgagatcactttttctttcttcctcattcctcaaaaccagtggtgggatttcagagcacagcggaagtagtgaaaggaatgagcaagcaaggacacctgagttctgggcccaactgtgtgactttaggaaaatcaatgaaccctcttcagtcctcagtaaatcaatttcctttataaactgatcaagacagattggataatcaatcagattccttccagatcctaaagcccataccttggaatagtgaccttcaatgaaccctataaaagaattttgaactaggctgggcatggtggttcacgcctataatcccagcagtttgggaggctgaggtggatggatcgcctgaggccagcctggccaacatagtgaaaccccgtctctactgaaaataaaaaaattagctgggcacggtggcgggcgcctgtaatcccagctattctggaggctgaggcaggagaatcgcttgaacacgggaggcggaggttgcagtgagccgagattgtgccattgcactccagcctgagcaacaacagcaagactccgtcttaaaaaaaaaaattctttccactcatttttatttattaaagttttatgatttatttttttgagacagtgtctcacgcttgcccaggctggaatgcagtgtgctatcacggctcactgcagcctcaaactcctgggctcaagtgatcatctgccctagcctcctgagtagctagaactacaggaatgcatcaccatggttggttattttttattttttggccaggtgtggtagctcatgcctgtaatcccagcactttgggaccagcctgaggagccacaggagttcgggaccaccttgagctggtctcacacagtgagacgccgtccctacaaaaattaaaaaaattagctgggcatagtggcacgtgcctgtaattccagctacttgggaggccgaaatgggaggatcacttgggcccaggaggttgacattgcagtgagccgtgatggcactattgcactccaagcctaagcaacagagtgagaccttgtttcaatatttattttgtagagacaaagtctcactaagttgaccaggctggtcttgaactcctggcctcaggtgatcttcctgccttggcctcccagagtggtgggattaca

SEQ ID NO: 1241325 - DNA, 4001 bp, Homo sapiens
tgggattagaggcgcccaccaccaggcccagctaattttttttgtatttttagtagaaatgaggtttcgctacgttggccaggctggtcctcaatgcctggcctcaactgttagtcaggatggtctcgatctcctgacctcgtgatccgcccgctttggcctccgaaagtgctaggattacaggaatgagccaccacgaccgaccgagactatgcatttaaaagattaatgttataaaaacattttgataatccaagtctgttgaaattcttccacgtggcccagttttacatacgattccacatggcatgatttgtttcataagaatatgatggatgaagtacatgactgaggtattattaaatgttaatgatgtctattctattgtttcagatgaaatacgaattggcttaagagaaaatagttccattaaaatggggtaagatccccgacacatgttctttttcacccttgtacctccaaacactgagaatagttcttgttacagatgttgtattaatatctgctaaattaatctaagatgcggatgccaggataataattaaggaagaaggcactggaagttggagagttcttctatctccctgtcatgacgcccgcccaaaatgaaaataaaatataagcttctcaaaataacccagaaatagtggctcacgcctgtaatcccagcactttgggaggccgaggcgggcggatcacgaggtcaggagatcgagaccatcctgactaacacggtgaaatcccgtctctattaaaaatacaaaaaattaacctggcgtggtggcacgcgcctgtagtcctagctactcgagaggcagaggcaggagaatcgtttgaacccgggaggcggaggttgcagtgagccgagatcgcgccactgcactccagcctgggcaacagagagagactccgtctcaaacaaacaaacaaaaaaacccagaaacagtttttctaaatgaaaagtttagaattttaaaaattgtatagaaaacacaagcaggctgccgcttgtaagagaatgctgcgtgcacaactatttcagcaatttaacaggtgcatgaatgaacttattttccaaaggaaaaacaagtgtaacaaaaataacttgactatagacggatggttaagatggagactatgctgacaaatggagagcctacagtataaagcatttcaaataaatttcttagtctgtttataacaatgacagaccactgcacaagagaaatgtgcatgtagctcccttaaagtataaaggtgaaaaggtcatttaaagggtcgatatgttaaatcaaaacttaaaccacaacctacggattttttaaaaatcacacgcattaatgttcagtatttagtaaactgttgagaaaagcaagttggatacaccgttcccacagaaatcttcacatcccttcccatttccctagtagccggcgccccgctcccaggagtctcatccacaccactattcctcggcctctccgccctagcccccaatatcctcgggttcctatttttctggcctccacccccactcaaggatcccaatgaggttctaactctacaattgcagcctgtgtgccccaagaaataaagctgctcccctgccccagtagagaacgcccgagaggcgggagcgaggcaccaaagcacaagctgggcctctccggccttccaggccaccggccgcgggaagacgagggcgggggcacagaggaatacggaatgtatgggcatctccaggggggtgaggcgtccctcagccgcaccagcccggccgcccctacgcctctggtaccgaatctgaaccgtgttcctgcagaaacttgataatgtccttcttgggcagctgctcactgcgcagctgctccacggtccacgcccgctgtggaacggccgccgccatcttcccccgctgcctccgctttactgagccagcccgccgcagttcggcatcgccccgccccctagggcggggcggggccactcacggaggtcgaggggcgggcctctgctctagcagtcgggattggggcctgtctttgagtgacgtcaaggctgtgctatgagggcttctttgttgagtccgggttgaaaaacctaccgcggtcgtctctgcagtcgactgagtagaagaccgctagagatcttcgattctgaattagacaccttgtgaagcgacctctgatggtagcgacatttatcaaccattacccacatttaaggcagctatgcctttaaagtccagtctataacctgttaaaagaaaacagcattcaggctccttatctcgttttatctagttctagcctaaaaagtcacacctgaagtgcttcagtccttgtcgatccgaaaacccatatcccaccatttcccttttaaagatcacacaaccgaaacttaaatacaaactgcccatccccttccccccatacaaatacgagaaagtttgtccaaaacgaagttcagaaactttaacaaataaaacaatttataaagaagccgcactcaggatgccacttgctgatgagaatgacattattaatgctcgtaactctgtgatgtatatttttttctcagtacacgaggaaacaaatttacagaggttactcaaagtcaggtttagagagaagtcaggaattatttgagacagaaatcttcgttagagtggaataattgcacaccgacgtttattataatgctcttacctataataaagatttaatagttgaacatcaggactccttacttaaaaaaatgtaggctgactctgggcatgttgcctatgagttagctctgctttgcaaggagcattaaaaaaaaaaattctgacgaatagctggaccagaccacgttcacttccctttaaacaatgaaaatattaaaataatgggttgccactcccagcgcggtgaaaaagagacttggcattttgttttctcagcccagatagagatataagacaaattattccatctacacatttttgcttttcactttatattctgatttaaaagtacaaggaatgaggcacgttagacgctcaataacattaagttcccaaactggtggctattccattgtccccgggtatgtaatattttacaataaatctctattataacattttaagtgatttatcacgttagcaatgacgcccagccatctaatcattggaaacggaacttaaatttagagtttgttaaaacaaaacaccggaaccgcaccggggaccatatttagagtaacgccttaataatgcgcatgagtctccggcagggctgtgaaggtttccgggaagccagccaatcattcccaacggaaactcagtagcggcattttcaactggataaactggccttagtcccgccttctcgttccagagttttgtgcgaaggaaaccgatggggatcggaaccgtagcggttgagctgctgctgctacggatatctgacagaagccttcggtggttgtcggcctaatgagcggacggcaaagaacgctttttcagacgtggggctcaagtatctcccgatcatctgggactccgggttgcagctccggaactgagcgacctcagagccctggcagctccaaggcgcctttgccagcagcagcggaggctcagctggagtcggacgatgatgtgttgcttgtcgcggcgtacgaggctgagcggcagttgtgtctagagaatggcgggttctgcacctccgcgggcgccctgtggatttaccctaccaattgcccagtgcgggactaccagctgcacatttcccgggctgctctgttttgcaatacgctggtgtgtctgcctaccggactgggaaagacctttattgccgccgtggtcatgtacaatttctaccgctggttcccttcaggaaaggtggtcttcatggccccaacgaaacccttggtgacacagcagatcgaggcttgctaccaggtgatgggtatcccgcaatcccacatggccg

SEQ ID NO: 1241326 - DNA, 4001 bp, Homo sapiens
caggctgaggatgatttccggacgcgccccaggcgcgaccgcactactcgtcctcagttcaaagcctgagtgacttggcaccacttccccaattgttttttatttccttcgcatccctgttgtgtctaccgctttcacgtatttgagagcctaaatcatgttaagacgacttggagaaacgcccgatttgcctcccaagccacgcaaggatccacccagacgcacgcccgcgcggagacgcacgctggcacacgcgctcacacacgcgagcacacacacgcgcacactacccggttcgtgcgcgcgggtcgctgttcctgttgcattatgcaaaggtggctgggaaagcgcgttgacttacatttacatagcccatcttctccccacagtatgtgactaatacgtatcccggggaggagggagcgcggctgggggtgctaatcggaagggaacagacagtgagtgccatcttgctgggaggttccagaagcaaagcgccaacgacgacagtagcggtggcctcagctccaccagtaactgccgctggcaggagcaccacacgctctaggagtttcccgggtatcaagtatgggtccagcccgtcccagttatcctcttcccctatggcttcattcccgttgtcagtaccccgacctcagcttgcaaccttgatcttgggcttgattataaatgacgaaagaccgcggcagccttcaaagtgcgggagcgagccccgtactggtcagcgcggcggagggatctttccaggaggccccaagcccccaagcctgtggagagacttggtaacagctggcaaggcctgctccagccaccctcgctggctccttgcccctgcattcagcgcctgagggcgttattcgccctctccctgcgtcccacgcaagcggctcaaggaactcactcgatccggattccgcctcgtatgctctccaagccttcgccacctccgcaggcgctctagaaaggcgtgatggccccagctcagtgcccgccagcccgaagaggacaagcagggctggaagggacttggttttggaaaaagccccacccgcccccaccaactggaaggaaaaggaattagtatccaccgcatctgtttaactgctaatagatcccagattacgggcaggtagtaggttggtgtctttagatacaacagcctgataataacgctggtgacattaacaacagcttgtggaggggagagggttgttactggtgaaagttaagagattcaatctagggaagtaggagactgaactctgacaaggttaggggcactgagaaccccaatttagcatcgatgcatctaccaggcaagaaaatttgcgttttgacccagaactcagtcatgatgctccgtagaggaggtggattcgaccagcagacagatgtccccaaagtcgagagagagctaagctgcctattttctctccaggtgaaagacaaagcctagagcaccccacttaagatgaccacccccagctctttcaaaaaaaaaaaatcccccgaagagacagcgtggtgccagcgtagcagcagctcggccggttactggaaacttcacctggcaacgcagccccttttacctgacggctgcgtcttctccttgcaatgggctcatccgaatccgacagggtcagggaggtggaaagggaagacgctggcgcggcagcagcggggatcccggggcatggtattgttttaggggtcgccgccgaggtccctcctgcccatcgttgagaactgccaccctgatcccagggctcggtggacacggcggcgggagcggagatgccgcctcgccgctgctgggcaccagggacggaggaccagaggcgcacctcggaaaggagtagctcagcgccttggcgcggagatttgcgggcactgatgatatctcgagcgctcgttcctccgcggtgacaatggataatgccaaacgcgcaagtgacggcgacaggtttcgaacgtacaactaactacaaggtacccagcctgagacagtatgctgcttttcccctcctcctcctctccctcctaccagggagggaactaacttaaccctgtgtgcgcctgacactccctagagaagctgggatcgactaggaaaccgcaggcagcggctcccgggggcgagagctttgttcacgtgcgtttccagtgggtgtgttgctgtctaggggcactcgcgtggcaagacgcccgtggctggcttccagcgcccaagattcaaggaagggaaggagccctagcgtttcatccggaccagacccagccctcggagtctattttttgcctccagttaccggatttattgaagttgccagcgaagttggttttattcctttacttctctgctctccgcccccgtccacatcccccaaccctgtattatttcctgtcctagctgcgctttaaagattcggaacttttcactcgttctagctacagattttaactgtgttccgtgtgcgagacgaattgtggagggcacccacccacccatgccaagtgtaaatgaaaccgcaagaaaagctgcctcccactcacccatccagtgtccgagtaagcctaatgacacacattcacataactaagaagacacgggaagataggggtgcggaggacggagtttgatgtgtgaatgggaaatggagagaggggacagcgcgcgcgagagaaacagcgcgagcctgagccttagaatggaataaacgggaaacacacacaagaatgacgatgcaaaaaatgtatctaagtcccaacattgacagcagagggtcagctttaagcgcctacattttgatccgcgaaatttcccagcttttttggaggcggttacatagagaacacaggagcctctgccttggccgcccagatgctttgcattttgtaaacagctttgactaagtgctctggacttccaagaagttaactggagtggaaggcgagtcatattgtggatgcggaatggaagcttagacaagaaaaaactgtcagcagagcgcctctgctctcaccgtcacacccaaatgagccaggacgtcgctcagagcgcaaactgagatccacacagggacatcttcaaccgaatctttcttctgtctccattccggactaaggaaagaaagaaagaaatacggagcctttatagagtattcagaggctacacacatggatcttgctgaaacggagttatttaaaaacagagaaagtgtgttttcccatgagatagatgttatagtttctctctgaaacatacccaagtctatgggtgtcaataatagccatttcaaatgcctctctgagccttgccagccccagaagaggctgtgggaatgctgcttccagcttcccctgtgcagaactccgttgtaaatccttctgagtttccaaggtggcagcagagcatagggatagctcctcaagctccagcatcaacaaggaagatcacattttaggacaaatactcatctacctgcatttaaacatccattttcgtatgtaagtgtacataagtatccgcaggaggttcttcctttgaaatcttgatccaggaaagcagcataattatttcatctttaagaacacattttaaaaaggcaaagcaggatctttaaagcaacaaaggttttgctttctgatttatgctgctagaaaatgaatgagattgaaaatgggggagggggtggttgcagatttacagaattcatactttaaattattggtgtttctaaaccatgagcaaaccatgttatgagtatgtgccacctattaaaagctattggttgcatctattgtaatcacgacaaggaaaattaagtaagaaaaaatatcacgccaaagtacaagcagaatcgttgtaacaaatttcttatgcacatgacctatgagtcagctttagaaatgtgtgatgatggggccagaggaagcaaacgaataggaaatgtggctcagggactccaaagagcaataat

SEQ ID NO: 1241327 - DNA, 4001 bp, Homo sapiens
cagaagacatggtctgagactcaggatgatccagaaccacttctggtttggagccagccaattcatgaatcactgtttgctcaaataaactcttaaaaaaattttaattgcacctccgtttaccttttttaacactagcatgttgtagaacatgagtttggtagagagggaaaagatagatatggactcagtaaatgtttacagagggcttacttggttccaggagctgtttcacatagacattgcctcatttagctttcatggcaaccctgtgaggcaggcattcttgctatagaaaaaaaagctgatgcccaaagaggacaggtatcctgctggaggccccaaacatggctgctgggtccagcttccatggcttctataccaggagttttcaaacttcagtgggcatcagaatccctagaaggagaatcaaaaatacatattcctgggtcccaacctagaggagctaattccttgggtctgctctggtgcccaggaatttgcttttttttttttcttaagacagggtctcactctgtccctcaggctggagtgaggtggcatgatcttggcgcactgcaacctccacctcccaggctcaggtgatcccccaacctcagcctcctgggtagctagtactacaggcaggcaccaccatgcctggctaattttttgtaaagacggggtttttccatgttgcccaggctggtttccaactcctggactcaagcaatcctcctgccttggcctcccaaagggctgggattataggtgtgagtctctgaatttgcatttttaatgaacacccacgtggttctggtgcaggggctcatgcagcatactttagaaacaattgatctccaccactctgaggaaggaaatcaagagaattctcagctgctggcttcccctatgtaccctaggcaggaatggtgggagagaggtgtgttcctgtctagcttctcagcagagaagggatgaatcctgggtgtgctcaaatgggtgtctccacaaacctgtccagcacccaacaggaagcccgggataaaggtctaaggaggcctagattgctcaaaaggcagctactagcccaaacaaacagccttgagaatgaaccctgctttaacatggatgcctcaccagggtggtggctcacatctgtaatcccagcactttgggagacagaggaaggcagatcacttgagcccaggagttcaagaccagccctggcaacgtggcaaaaccccatctctacaaaaaaatacaaaaattggccaggcgtggtagcatgagcctgtagttccagctattcgaaaggatgaggtgaggtgggaggatcacctgagcccggggaggttgaggctacagtgagccgtgatcatgctaccgcactccagcctgggcgacagactgagacactgtttcaaaaaacgaaacaaaagcccacgaatgccttatgcctgctcacctcctatgttttccagtagatgaacacagcaaatagacttgcatacagacagctacctctagagccgccaaaggagacccagccatgtcaacccagtcattgtatgcagaaatcaggagtttccaggggagagaagaaaaaaaggagaaaaccagctcccaaccttgctccagcttctgtgtccctcttttccggagctggcagggctgtgcaatcaaaagcagcctcctggaactgaaaaatacttgtgttcaactcctctctggagaagcaatcggaggggagccaaagcaaacactcctccctcctaaggctccggacacacggctgaacccaaagaagttgggaaggaagtaagatctatcctcacctcctgtctcacgcttctacaaacacagatggtgctgctgttatctgcgctcatgctgggacaaggctgcgtcttgaattgtgttggggtgagaggctgagctcaagtttttgcacagcatgaaaaaggaaagatgcctgtaatcaagtcagaaagcagaagtgtctggctgggccaccagagcttacagggtgccctcccacctatgaatgactcaccaaagaaaaaggcccttagctctgtagaatcaagggaggggagatattccactgggttaacttgggaatggtgctaggtagaaagaagtcaggaggtcaagaaagaaagaagaggaaacaccacatatcaccttaaccctatggtgatggtgatggtggtggtggttgttgttttaatcatccttgatggcactccaacctacatcctgcaatccacacagggctgtttgatgttgaggcttggggggagttcaagtcaagggaaggacatcctgttaacagcattgttggaaaaagatcaagaacaaggagatggaaaatagctgtgaacacctgataagcctgggcgccccccgcccggtccccctacccctgcccgcttccttcagtctcaggtttgtgagactaaagtcttgtgcacaggcataggggttgacccagtgagtatctgtgtcaccccagagtctccaaagtcttcatcaccgcactctgggaatattacaccaacttcctgcacccatattgcttttagtttaagtagctctcaagaggcacaagtctccatcaggatactactgggatacttcctggaatggcccaacctcccctatgtaccaacccctggtcacttcactcattaggaatcagctcaaccttcaccttaaggaagctgccctgcttgtccacactgcacccacactggggcaatgtccggtagtattaggagagatttcagtattggcctctctttctagatccagaaccaacagaagacagaggcgattacctttattgatgatggtactgaaaacatctgttctttatttaatacttttttttttttaggtagagacagggatcttactatgttgcccaggctggtcttgaactcctaggcttaagcaatcctccctcttggcctctcaaagtgctgagattacaggcatgtgccatgacagcagacctcatttagcacttcttatctgagaaactactatctaaatgctgtccacatattgtctcattgaatcccttcctgtagcttctgcagttgccagtatgaatgctattttaccaaagaagcccaaacctatgaaagttatgagacttgtcaaagggtacacagcagatctagcgacagtattctcccatccaagtactaaccaggcccgaccctgcttagcttccgagatcaaacaagatcgggtgcatttagggtggtatggccgtagacgacagtattctcaacaccctcggcctggcacagtccaacgcacactgtaaggattcagtagctttttccacataaggaataagaacaagtcacatcaagaagacaacccaggcatgagaatcttctcctccaaccacctgaactctcagttaactgactggtcatcttaatttctttcaggaagtgaaaacttgttaatttgcccatccatctgcaagcagctgctatgcccagggccttgctctgagacacaggacagatgtgtcagtgaaacaggaaattttccttgacccctttgtgggcttcatgacaggggtgcctcacttagccctcagttctcaacccctcgagggagtgggagcacacaggcaagcgggcacaggagctggagtgatcgcttttgggcaccagcaggagaaaaactccatgagggtactgcggcagcatctaaggggggagtatctgtgacccctgaagctccagagtgtgtttgttacactgcgctcctttagcttaagtgtttaacagctcaatagaccctctgccttttcatgagggcagagagccagtgagacagctttctctatcctgagctcttacctggcatccaggaaaaaaatcagatagcacaaacgaattgaaagatggtaaatgcagaggattttattgccgatagaagtggctgtcagtgggaaggggagctggaaagca

SEQ ID NO: 1241328 - DNA, 4001 bp, Homo sapiens
cctttttcagactcagcctgcttacacccaggtgaaataaacagccttgttgctcacacaaagcctgtttggtggtctcttcacatggacgtgtgagacaggattaccaatcctttgttaaacacacagccaggactgtacgtgcttggaaagatgcgagactgggaggcagtggtctggctaaaggacgtttgctttaaatattcccataaatatttgcttcgagtatttggagacggcattcaggttcacaacctgcccagctttctggatcataaccacattgagatgcaaagaatttgagcttctccttccaataagaaagaaagagaaaaagattaagacatgaactaccctttctaggccatggaaactcagagtgagatttctactccatcctgctggacttggctctaaatcccaggcaaggagtttggcacaaagcactgctcccactgtcctggcttcagctgtgtgtaaaacaaggtaaaagcagtgccaaacaccaccaggcatggctttgcaattctatgcagtagaggagatactgcactctaggaaagctggttggtccaactgaaagcactgccaagttctgatgacaccagaatagtctgatgcccaggggctgctgccagacagaagagcattcctgaaattacaggtctaagttggtggactgacacaggttcgagaacgacacagcgaaggtatagtatgttctagaagcatgcttttggctggggcaagagcaactgtggatgaaagagcaggtccccctgcttttgtttcccgcctctcttacagcatcacaatcactgcctgtcacacccagttactgtcacccagagtcacaaacactgttggacaatcagcaaattatagcctaccacacccaatagttaggtgcaatctaacacacgcccctgggaacattcacaaactgttctacctacctgattgccaaagacagccacggagcaggctgttgaaacctcattagccccgaaccagacggaagcgatgcgggagggcatgcccaggatgaaaacctgggccacagagcagatgagctggcccaccacggtgaccggaaagagatgcggcttcaggctgcccagcttcacccaggcccccaggcagttgagagccgagccagtgagagcaatggtgcgcaggccgaacttctccagcagccaagccactggcaggagcagagggatgtaagtcagcatgtagcacatggacagccagtcaatggcaaaggcactgacaccgtagaagtgcatgaagatgttattgatggagccgtactggatccactgaaaggagttgcacatggagtagcagctaaacaccaggaccacggcccaacggcgcctgctcaccttgatcacgctgaggtcctcagggcccgagctactggggtgagccaagccactgggttgggctaaggcactggggtgggccgaactgctggggtggacagagacgctggggttgatggagacgctgggatggaccgagacgctgggatggaccgagacgctggggtccgcttggagtgcggactccggcacaggggtgtcatcgctctcttcctggttgggaccttcattcaccatcgccacagtctcctctggaatcctggagaagtggtgaggactccggcagtcttaagggacagtggcctctgctggtctcttagagttgaaaggacacttgcctattccagaagaaacagagactagaggctgcgtaaaagcctcaagtggggcttcctgtgctcacctccaagctcctgctcccacttttgcttggggctctctgttgccacccgcggcgatcgctgtcccaaggccggccgcacacgccgcagccggctccggaccgctcctgccttgggtctccccacgaggcgttccttgtgcaggaaaagttctctccttgcgcagccacttcgcccgcagagtcctctcccgggccagcttggggcctcgcccagtcgggcacacgtgaccgccccgcccccgtcctgcctggcttcttccgcccccaacccccccgccaccactccacccccgacccagtgtctcttgccttctcgagcccggtcctccgggcagagcagttgtttcgccacagcttgcgggatgcattcctcccccacgccccgggcgccatggaaaccgcccggttaacccccaccctttgcactgcccctcatattcatttgccacccgctatcagcggaccctgcaagaagatccgccttcccgaagtaatgcccaaaatagagcctctccggtgcctgtccgcatgccctgcgcgcgtgcaccaaagcccggcgccacctaagtgttctggggaattcaagagggattccccaactttctcccccttggcttaggctcccagccctttgctgaactaaagagagatttgtagatttcccgggctggttgcgctcctgggttaaaggggagttacagaaaactcgctttactcgcttctttccctgcggacgtggttttgtcttggggaggttagatttgaacctgttatgtggggctatttttcctgatggattctgggcgaagaccctagggtgcgggggagggaaaggagagtttgaagaagccgaagaagctgtccgcggttgtgtgatggaacgcttagcacagagctggctccgggcttggtcttggaagcggtctttgaactcaagcagccctagtctgccacctgccggtcctagcccatttcaaagggcaaaccctcgactcgttgcactgacctctgtccttggcgagggatcctggtaaggagcccaaattctccctgagttcaaacaccagcttagctacaatgaggtgccactgtagaccaaggaactccacctctctgcgcttcagtttcttcatctgtaaaatggaaatgatgaaataatagtacctacctcaccgtgttgttctgagacttgaatgaattaatacacgaatgcacttagaaaattcctgccacatagtaagcattccgcgaatgctggctatcctagcaaaaagctaacatttgttgtacagtgctaaacaaattgaatgcattagctcatttatgcatcacaagaattctgtgataaagttactattgctggcctaaattttatagacaagaaaacccagactcagagaagtgaagtaacttctttctgaaggtcccagctggcaagaagagccataattctcgttcaagtctgtaatcattcaagctgtagcctagctattcaagcacagtctgtggttagcagcgtgggcacctgtgggagctttttagaaggccagaatcccctccagtgttaaggccttaaaaaacaaaacggcaaccacaaaacaaccaagaaggttgtcaggcccaacctagacccactgaattgaaagctgcattttaacaagatgcccaggagattcatttgtttacacattaaattttgagagctactgggcatcactgcttctttattttttttttctttgttaaacttcagaccagaaaatgaataacttgaagctctgggaagtggctctccattttgtctgcacattagaatcatatgaagaaactcttaatatcccaagtgttcgggcaacaccccatttagcgatctccgagggtggacctgaacatctgcatgtcacaagctccgctggtcatccaaacgtgcagccaagttagaaccactgattcccaggagagaactagattcaaatgatcactccctgcttgaaggcacctactttttggtagaaactatagagtcttggattataatggaatatttggagagggagttcagactcagatctaagaatttctacagtaatttaacatctcgtattgtcactattcctcctgtgtttcccatcattctccagggagcacagaactctgttcttttagaaggccttctgagacctctcactgcttcttttccctcggtcatc

SEQ ID NO: 1241329 - DNA, 4001 bp, Homo sapiens
aaatataagattctttactgtctgccataccgttgggtctagatttgaaagatactcgcaccaggagcagtggctcacgactgtaatcccagcactctaggaggccgaggagggcagatcactggaggtcaggagttcaaaaccagcctggccacatggtgaaacctgtctctactaaaatacaaaaattagccaggcgtggtggtgggcgcctgtagtctcagctactctggaggctgaggcaggcgaatggcgtgaacccgggaggcggagggtgcagtaagccagtgcatcccagcctggcaacagggcgagaccccatctcaaaaaaaaaaaaaaaaaaaaaggcaatcccatagtctaaggtcagataataagtaaaacacttgacctgaatcaactcagcaatccatcatttaggaattctgcaaagatcctgtaggtttttcatcaatgggaaatttctttacaatcttttgcagtcagccttccctgggacacactggtaggcaaaccaacctggagaattagctagattcgagaggtgaggatttcctttgctaccctaaattccatgaagtttaaatctccagttaaaatattttctctgctactttgtgaataaccacgtatcaagcccttgtttctgttataaatttataattctatttagtcataactgtacaataaaacaattattgttactaattttgccaaagtacaggcttccaacttaaagtaggaaatacaaaacaggtctctccaaggtaaagcctggagactgatctcactaagagatcttatttcagtaagcagcagaatgttcatttattagtgttaagaattatcctaaccacttctcctagggacagatggataaacagttccacatagcaaccttgggaacaattccaattagggaataagaagaaaaacaaaactatggttttgggcatatgaatatatactcattcgccaaacacttttcaaaatgataggttcgatcctacttctaggccttagggaatgattagtagtccaaaatccattctttctattagatcactttccaaactgttttcctgcctgtcccccaaccaggctcctggtcaggagctgttttatttccttgtacttccatcgtttaatattgtgtccgacacgtagctggtgctcaaatggctgaatgactaccaaaatgcccacccacgaggcgggcccccaaacctggcactgtaggtcaaaaattaaacagatcgtgaaacggcatgacagcagcctggccctgctctctgcctccagaagctgagggcaggttgggaaaagtgcactatgcaccccagaacctcccgaagtactggcagaacagagtgggctgtccgacccgcacgggctgcctctgtcctccaggcatagaacacgattcttctcgttctttagggcagaggggactcggctactgccctctcctccaagcccaaccttgaaacgacccttccccaagctggccgcgcaaacgctccacgacgaagcccaagcctgggcgcccggagcttcccagaggaaaggcaccgcggtgcgctgtgggagtcgtagttccccggtgagttccgcacccgggcggccctacgaacgggactcgcgctcccagaacacatcgcgcgggcgcctcgcccagtcctgccacctcacctgttctatggacgtgactgtttccaccgagtcgtcctgcaaccgctctcgcgcgtgctcgggcctcagactgtacagcggctctgaccagacgggggaggaagatggagggcaatagtaggtgaaagaactcggagaagccatgatcaggagagcagcagacagtgtgtaggactctgcttcgttaagcaacaacgcgcattgaaactcgagcgggctaaagcgctacggcgagcggatagaggcaaaaagattttgaacgcgaatgtctcctcccgcctacccgtctttcgagtgagttactgagatgctgccgccccccattgggcagaggagctgctgcaagagcgtagagtcctgaagcgcaagggtgtctacatccgaatttcatttcagcgagatggcgtaggacgcctcggtttgttacgcaaattgttaaagaactgtaacattctgctaattctcacttaattgtaatgcaattgtttgcaatttcaggtgcccaagaacccaatgaatgttaagtttgaaagcatttctgacagctctactgatttgcctcagtcaggcaattactaaaagaattattgtgcaccttggggtacttgacagcctcccaggagaaggcagcagctgctcaaacgtgcaaggacgccgtctcagtatcactcagtgatggagggaggggggtattatgattttctcctgtctcttggaggttacactgcagtagcgagaactgaaatgcagtacaaggaacaaggataagtgaaatagacagtcagtccgcagatatttatggaacacctgctatgtgtcaggcattgtgctaggttctaggaatacaaaagtgaacaaaacgaagtcccttcccttggaaaccttacattctaagaaaatcgacagaattgaatgtatccaacgcaataaatatatgaagacttgtgataaatgagatgaaggaaaataacagggtctatgagagagactaaaggggtaagaaactaattgaattgtatggtcaggccaagcctctctaaatgacctttcatttgagatccgaaggatgacgaggagtcatccagaagaacagtatgggaaagaactcctgaaaaaggaagaaacagcagcttttagaagacatgtgctgggcacggtggctcacgcctgtaaccccagcactttgggaggctgaggcaggaggatcacttgaggagttagaacatcctgggcaacatagcaagacctcatctctattaaatatcaaaaaaattagccgggcgtggtggcgcatgcctgtagtcccagctgctcgacaggctaaggtgggaggatctcttgagcccaagaagtcgaggctgcagtgagctatgattgtgccactgcactccagcctgggtggcagagcgagaccctgtttcaaaaaaaaaaaaaaagcaaaacaaaaaaacaaacaaaaaccataggctcaagtgaccctcctgcctcagcctcctgagtatctggaactacagatgctcaccaccacgcccagctagaataaaagaaattcttattgattcttatggagtggacttactcatcacacttgcctccagaacaaccaagtttaaagttgtgatttttaggaaaacgctgctacctttggacaagcaatagaagagaatttattttagggcatgcatcaaaagtactacaccaaaaattataataccaagagattaaactgggggagttgtatgtaggagattatagaaggtatgataacagacattccgggtacacttggagacaagctttacttcctgctcagagcacttcactctgttcccactccattccatgtcacatgtctaggatccagggattatagaccagagtgacatttgacaaccagccattcccctgttctcagtctctggtagtaaatagaagcactcacaaaaatttcaaagatgaggctgggctggcctaaagacctcaggtggataaatactaccaccatgtccattttagtggtactgttgctgaactaagacctagaggcaccagaatattaccaaatctggaaataaggggacagtatgggttaggacccatggataaggctgcacaatgtgaaatggtctcattatactgccccctgtattggcatcttactgtctttcccttagttatattttgggaaataaatggtctgataaggtcagggttatatctaaggattcagcctttgtcacaaagagtttctttgcaggagagctggaaacttaacgcttcaatcctgaagactgtgctattgaaagaat

SEQ ID NO: 1241330 - DNA, 4001 bp, Homo sapiens
atacagagggataaaggaaagcataagacacagtcttactcaagggcccttatgctcaatctccaactttccccttaagttttaaaaaggagcaacccacagagtacctaccgcttggagtgtatcagtcagctccctcctccggttgcggcatttggctgcagccatcttattcctttcccttcggattctccttttctcttcttcttctggagataactagaataatcacaaaaaaagaccgacattcagtaaaagtgtctgccatcacctccattcacccaccccagtagaactggctcctgcagcttccctgcttcctggcaccccactgtgaaaccatttctgacctgcagttgcagactaggtgtgacttgcatttaaaataagatcctcagcaagagaacaaagaagagcccagtctgaaagcatgcggtaagaaacttagggaagaaactatgagagtacttcttagggtgagactcagagtctgagttgggatggaatgggcttggagccagggctcccagttacggatgtgcagccagccccatcagtggcttcatcctctgtactgggctcctgcatctccggggctgcttcccacccagcccccacattcccaggaagagtacgctagagttcctcacctgttccaccttgcccctcctgccaatgctctgcgctcggcctcctgtcatggtcttcacaacgccagccctggagtaagccccagcggagggggcggggactccgaaagggtgaggggctctggtctgcgatggggccacggaggagacgagggcgggctgcaccagccactgcaggtccggactggtcgagatggcagtgaccgtgggaatgaagttggcactggagacggccaggtccgtgcagaagtcctagaacaaaacagaaggggaaagccgacgtgagcgagcaggttccggacacaggtggggcgagttcccagtgccgcatgcagcagtgaagagaaacgatcctgccacggacatttcatcttaaatgtccctcatcctggatgaaaggtctcccccttttcctcccaggcattccgcagcgcagtgcctgtctcttccatcctgccgctgcgttcccgttatcccttcagcatcacttgcttgaaagggggtttgttataaatatccctgacgtctgcgctgacgcaggcgccgctccggagtctccagaatgaactcgctttttatcaatgaaactgccttacacacccgcccgctgcaccctcctccctcatccctcctccgtgctccaggctgccgggggaggggggattgccgctttctgccacctccccggagaagccaggctctagttagcgagtttgtgcttgggacacgtctgctccagctaatgtcagagatccgtcctggagtgcagaccagaggttgctcagaacgaacctgcctcccgaagggggaaccaattcttactatggcaagcgtgcgtgcgctcagagcaagtcccgagcccccgagccggcaccgctccggccacggcagcctccctccaggcacaagggagccccctactcatctactggagcgtcccgcccggtgtctcctcctccgcgaccccaagcccccggccccgcggcgacgggaagccagccttacctgcgcgttgacaggcgagcccatgctggagaaggagtctgcgggtgagtggtagtaagagaggctatccccggccggggacgcgctgctgcagcgggaggatgacgcctcgtagtctgcgttgaagcccgagaacatcatcgtggcggttaggcaaagccgggcgaggggccgaggggcggagacaggtgggcgctgtggagcagagctgggtaggagcacggtcactgctcgttcgctgcgccgcggccgccggctcagtcttggcttctcagatgctcgctgcagatgcggttggagtacgaggcgccgcagccactgcttttataacaagcgttttatgaatgagtgtaaacgtcacgggctcaaccacggtggcgccagaggggtggcgcgcgggcctgggcgcttctgcggccgcccggctgcgtccccagcgctcgcagctccctgcccccgccttggcgcgtgtcctaatctcgtgagcatttcgcagttcctgtctcagaggtctcgtgggccccccaagatgaggggtttcggggatggctccccccagggctacagggaaaggccgtggaaacctgctgacgcagatgtcctaatatggacatcctgtgtaaggggggagggattgacgggaactgctcgcgggctgcagccaacaccgagggtgcagtgcggggggaggcgggggccgcggctgggggaggggaggcgggaacggcgcagaatgagagagaacattcgcacctggttcaatgcggacccttgttcccgaggtcgggggggatggggcagagagcgcctttttacccttgtacggaaactgaagacagttctgaggctcagagataggagaaacggcatcgagtacaggaccccgaggacttaagcctcggctcccgaaggaatgcgcccctacccccatccccaattctagccctaattcagtgcaaagcgtggaagcagaccttcatcccctaacctccagccctcgggctcgagcaatactagcactgttcctgcgtttggaagcagaaagtggaggatccaaaataagagaatacgataacctactttacgatactgggtactttatttatttatttttttaaagaagacagcgcatttatttatttatttttctcggccatgtgtgggaatattaaggaaactgtcaaatccctgagacaccagcagataaacactgtgcaaaacctacgtgcgaagacatttgaagggggtgtctgcccggttctgagctgggccccaggggtagggagtgcgaggtgtggttatgtgggcagggtggtcagttcgggatgacaaggcggggtgtgcttcctgcggggaactcaaatctgcgctgagggctggttcggtcccgccaggaagctgtgcttacgggagcccgcagcgggtgattttccagcgcggacttggagggtggaggacgggggctggaaggacagtgtccagctgcgcctgggcggaatacctcgactgctgggaccccaggagcggctccacgtcctggaacacggggctttggggaggcaaggtgctccagagtgtgccacgccccccaatctcctgccctgctgcgtaggacagccggggtcacgctgccggggctcagccccagcgcgctggccacctccagggcgcgaagacgcatgtccccgcacagccccggtcttcccttctccactcttcgggcccgggggtcggggcccgcggtgggcacctggagaggggcgaggcaggatgaggccggcgggcggatagttcggggcgcgcggggagccggaccgcagacctgcctccagccgccgcgcccgggagccaggagatcctgctatagatagtaacagggaagcggctgtttacagcaacacagcgccgccagggccgtctccaggcaacgccgcgcggccgggcgcgccgtcggcctggcgaggccaccctccctcccagctcccctgggccgcggcctccccggcccggccgcggccgctcccgtcgcctgacatcatccgccgggtccgggggctgagcggcccgcgcgaggctgtgcgctaacctccattcttagagatccaacccggcaggagcggggagggcaggaggcggggattcgtggaactgggccacttgctatttttgcattccctgtcacaggcagaggtgaaaacagaatttcatcattgtatgtcattggtttatgttggtgggaatttaggcgcttttttttctcactcataaaaagggagggaaacggaaaaacacacataatacgtaaacacagattccttggagctgctctgaatcctaaagcaattc

SEQ ID NO: 1241331 - DNA, 4001 bp, Homo sapiens
catgggaccccctgaatcatctgtttcccaacaagtggctttattgtcctaggggtttttgcctatggtgactttttgttgtttattgtatttagaagtagtgttttctacctgcttgtagcaactgtaatgttaaaagggaagcaaactcagagttaaataagttttggaaaaataaaactaaaagtagatccataacagaaagggctgggagggggtgctataataatctcaaagtgctatatgcattttattttaacatgactttacatgtacacctttgcaagctatttagaaactcgcattaattttgtcaccactttacagtcccctgtttgaaaaatttggtgacacagtttgtcaaaataaatcttttttttttttcacatgctgatgttgctgccgatgatttcaacgcctggctttgagattccgtgagtagtcttgaataatttaaaattcgaaaatcaaattctacttattttctcttaatgctattgtatttcctaattctcagctttaacatgtaagaaagtactttcgctaggggtcttaattgaatggtggggtcgagatgactgcgtcagaattaaatctctggaagacctctgagctccttttaaaatcatcaacaagcgaaaatccttatcaatagcgatgtgggaatgcattaggtacagtattttaaacatacaaaacctaggcatattaaaaagcactcctctggtaatttaataaggaataatgatgtccttaagtttattttaatcagcaagtatgactcaatttgaaaatatgagaacaaatagatttaaataggaacacccagtaaactatggtatgcaaataaactcagaggtaaacttgtgaatacataaatctaaataagtcagttaccatcaaaatattacgtgatcctatatttttctgtccacgtcttaaaagtattttttaccttggggctttattttctttccctcttcccaagattatccaaggcagttccaatacgcgttttcaataatggtaattaaacttttggagggtaatcgccagctgtttccagaaaaatacttttaataggtggtagtcctccctgtaactggttttccctgtaatccttttgtgcacattgtaaaaataacccccatgaacgtgccaccaaggggacaatgaagagaaacaggttctcggcccagagttgtgaagaagattttggtcgcactagcgccacccagcggttttagagaaggagcacacttctccccaaatagggcttttgaagaacaagttttacaaaatttagaaatcgtttcattattgagacacccaacttggcggcagagcgctttaatcagaagacgtctgcgaattaaacggtgggacgaagaggtcgccttgtgggtatgctccggctttctcagagttgcttccaactcgcaccggcgctcgcccgcccgctgcaccccgggcccggctcctgctcccgctcgctgctgggaagaggcaagcgcttcctagagccgctgttttcaaagcccggagtttcctaaaactccctctccggctgcgagagtcgggacagagcagggcagcaggtcccgcttccaggcccggccaaggcccggccggggccacaccggcgggcgggcagcggtggcaccgagaaggcgcccccggcccgcctgcctgccttgcctggcgcccaccgctccccggcctcccccggcacgggctccagcggcgccccaccggccgcccgcctcgccttgcctctcacctcctgcgtgtctgcgtagtagctgttccagtcgctggtttcatgcccttccatcttcacagttcctaacatcctggagccaccctgcccaatacaaccatccagccctgtgcgaagcgacgggcggccgcgcggcgcggggcgggggaggggagctgagcagctgcagtcacccgagcgcccgcgcgggcccaacgccacccgggcgaagaggaagcccagagctgcggggcgcggcgtgcgcggcggcggcggcggcgcggcgggcgggggcagcgccgggggcaggcggctgccgcggagcgcggcgccggggagcgcctccgcgggaagtgagcgggctgcctctgcgaggcaagtgcagttgagctgatgtggatcttacgtcgcttgagtgcccacctcctcgtcctctccccatttgtccgccgcacaaagacgctcgcacctacaaagcccgaggtgcacctgcaaggcggccgcccgccagtccggccgccgcgcctcccgccccgccgcttcaccgctgcgcgcgacccctcccccgcgacccctcccccaagcggggccctcactttgtttgcaaagcagtgtaattggtttaggcccggaggctagggaaagagggaaatggggagggagggggtgtaaccccctttggaaaaagaaaaaataggcggggccaggcgggcgggcgggctagggctctggatcggaacctcgcagccggagaaggccgggggcggtggcgtcggagactgggcttagagaccttgtgggataactgaccccggggtccctccccagaggtacacgccaccttccgagcgcgggctgcggcccagtctcgcgcccctcctgctctttgcttcctccctcctgattcctgacccaaagttcaaccccgggagactggagaatacagacttttttttttctttcctcctgagagcttcagactagaaaagggaaaaagccccacttttgcttcgtcactagaaaccgggtcatctgagtcagccgagccaagtgacgttaggccgacccgggccccgggctagcagagcggaggcgctgccacgaaactcgtacctgcggctaagagcaggtgagtcacagcaccggtttatatctttatgacataactttttttttttgttccgcctcggtccgctcctctccccttgtcatctgtagcgaccacaaagaggaagaaactgagagcagatgtctgtgtgatagggcaggcggacccaagtcgggccgtcctccccctgccgggctcctcctcccgccccccttcagccgcttcagggagtgagctggagacgaccgtctggtttctgataggaaaaggtcagggggaggggacatctcccataacacgcgcgttagctgggagagcaagggcctgggcgcgggaacgcatctgcactgcgaaagagatgccaggcagaagcccgagactgcccgcagcggcgcttggtcctgtctgtgacccggagggtccgggctgagatctcaggggctcgcttggttcctaatcggtcctggacgtcggtgggagagtcttcccaacgcaaagtctctttactctcatgaggccctgggtggtggttgcccacttgtcctgggagagagaacaactgaagtgaccgggtgataggcaattagttggtgatagattgggagatggtgcgtgtgttttgagtgtgtgaccgtttgtatatttctgagcatgtgtgactgtgtgtgtttctgagtgtctgtgaccatgtgtttgttgtactgcctgtagaaccactaggtttccttaagtaacaataaaataaaatctaaagtaattaagaatccgcaaaatcttcttgttttgcaaagtttttaaaatgttattaatctcattttaagaaatgtgttttaacttgtcttccaaacagatacctttttccctgtgctttgttcttttaaatctcttttacttgaaatctggcaagagaatcactttaaatccctgaaccaaacaaatctcttaagtcagcaggggagcagagagggtgaagatgtgcagttaaggaaataaaaaaagataaaagcattggattacattttttttttttttttttacaaaaagggtgggggggtagaaacgtcacatcataaggaaaggaatgagtgaaattaaatccacctggaactcagtagggcaggaaccctccctaat

SEQ ID NO: 1241332 - DNA, 4001 bp, Homo sapiens
ataatactgcacacatggaaatctggcggctcttagagatagacttgtcaggtttgaatgaaatggcaaagcagtcactatttagatacacattctactataatttgacttccaaaccttatattctacaatgtattctccccacattgcacctcgctgacactccacaccttgttagaataataaacaaccctagagactgaacaaacgtacagaaatgggaggggggggcttaataaaaaatacctggacttatttttttaattatcatttacaatgcaaatgtgtgtaaaacgttcacttacagtctggtcccagggatgttaatgtattaaagggttggaagaagacccctgattttgatgtgtgaaataatcagacagtcccccagacagtcccgtcgtaaaacttggcaaagagggtcttaaagactcacagggcagggtcgagggggcctgcggcgacgtggaggaggacgcggccctggcgctcatggacgtgctgctctgcgaagtcattgacgggtgcgggacgtgggggaaaaagtaactggtctggcccgcgagcaggttgacggagcaggggttgagggagtaggtcccagagcagggcaccgacaggccgcagggcaccgaggcggctagcgcggcggccgtgaggtggtgcgtggcgtacgggatctccccgttgaccagccggtccacgctcaggccgttggcggtggagaaggagtggttgttgcccagcgagttctgagtcaacacggagctgtagggcatggggtggctggggtaggccgacgtggtgccgttgtaactcaaagtgctgctggcgcgggggtggtgcagggacaggaagggcgacatgggccagtagagggagccggcgcggtccatgaaggtgaggccggtggaggtgaggcgcgcaccgcgcttgaaggccagcttggcccgcgaggtggtggagcggcgccgcagcttgcccgtggtgccgccgatgaacacgtcgtcgctcgacgggtccagcatccagtagttgcccttgcccgggtcgtcgtagtggcgcggcaccttcacgaagcacttgttgagggacagattgtggcggatggagttctgccagccctgcttgttctcgcggtagtaagggaagttcttcatgatgaactcgtagatgccgttgagcgtgagccgcttctcggggctctgccggatggccatcatgatgagcgcgttgtagctgaacggcggcttctcgtacttgccgttcttcttctcgccctccttgcccccctccccgtccttgccgccctcgcccgcccccttcttctcctcccccccggcgccggcgcccttctccttctcgtccggcccgacgggcgccagctcccccggcccgccgcccggctcgcccttgccgcccagcccgtccgctttagccccgtccagggcggcggccggtggtggcggtggcggcggcgggagcagcagctgctgggggcccttgtcgtcgtcggcggccggggcgccccgcgtctgggggggctgcggtgccgggggcggcggcggcggcggctgctgctgctgcggcggcggcggcggttgcggggcgggcggcggcgggtggtggtgatggtggtggtggtggtggtggtgctgggggtggtggctgttgtggtggccgtggctcgcgtggtggttgtcgttctggaccgcctcgggcaccaggctgttgatgctgaacgaggacttggggatcattttcacctctttcctatctcccatgtccagcatcacccagtcgtcggggggaaacggcggcggcggcgcgggagcgggacagcggcgcggcgggcggcggcgaccggtgggtgccgaacggggcgcggggggcgcgggcggcagcggcggcactgagcgctccggcagcagcgcagttggaccgcaggctcgggcgctggcaagtcatgtagcaaaagcagcaaccacccctcaggaattagaaaaaaaaaaaaaaaggaaaagaaaaaagaaagaaagaaaaaagaaacaaccaccgccccgggggtgaagctccctcgctcccaactgtacttcttggtctccccccccaccccccgctcccccccccgctgcttcctcctcctcctcctcctctcgcagcagcagtcacagcagcagcagcagcagcccaaagggggggagagccgggcggcgggcgggcgcgtcccggagcggccgcggcgaggctggggagacagcgatcgaggcggctatagccacaattaattttccgagctacaggcgcacactagggctgtaaaaaaatttttggtttaacctttcctaccgctgggccaatcagagctggcggcgtgcgggagcgtctctctcgccgtcgaccaatcggaggggccgggcccacccacccccgccccgcccgccggctgccgccccctcgggcgctcgcctccccctctccgcgggcctcggaccccgaggccgcgcggagccgcgtagggatacgccggcgggagcacgcggtgccgcagcccttccctgcgcccccgccaccccctccaccccgccggctccgctccaccgaaattcccctcctagggccaatagctcacatttccggcttcctcctcattgtactgggtcattttcgtttaagcgtcaatatttgtccttagtgattaaagtttgtatccaattttatttttgaaagcgggggtggtggtggtagtgggaagagtgggagtgcagggagaggatgcgagagggcaggaaatggaggaggtagaggcgaggcactacttttccgagtcggccttgcaggccagtgtctggcatttctgagccagcaggaaaattgtgccctttgtaggtaatagtctagcgcagctttggataaggggggagataaggcccaccgctggcgtgtgtgcgggggtgtcctttacttcgggggaggagggtgtgggagagctttgggagcgatgagatgaggaggaggaagtgggcagaggagcgcggggccaaacaggggttacttactcgattcctgaggcctgggcggcggcgagctccgggctccggcaccgcggggaaaccgggactggggctccgggtgctgctgcggcggccggggccgctcagtagtgggcgcctctgatggccttccgaaatgagaggtgcccagagagaaaacagtaccaaacaatctcgaaataaatcaggtaacacatgctatatacgtgtgtctcttccttttccttctctcctgctccagagcgtcgctcacgcgcggggtgactcgatgtcgttttctcctcgccgctccagcctcagcttctaatccgaattggaagcgggtagctgcgagcgatcaccctggaaatattttcgttttgcttgttgacattggagggaaaataagggtgggcgtctatttctttccggttttttttttaagccttcctattttcactccttttttttcctttccgtttctcaaatgcttttattttgtgcgggcctcattcctgaaataacagtatactgaagccagctcttgccaaccctgagtgctgctggaaagcaccggggagccttgggaacgtggatctcacagtcccagcttcttgggctttggaactgggaaggttcggttggaggttgaagtgaatggggaaattgcgaatcgggggctttaaaaggatcccgtggccaggggcagggctaaggcccagcatttcccagggattggaatttagtggggagcacattgatcaaaggctgtttcatcccacatgggcacgaaacataccacattttacggaggatgtagccccagagaagagggaggtggagaagcataaatgaaaggcaccttttccttcctctagaaggtaaataattataaaatgtaagcatttcttcacttggataaactttcattaagatatctggcagatttggtatttaagaaaacgaagg

SEQ ID NO: 1241333 - DNA, 4001 bp, Homo sapiens
cacttcctgtgtctaaatttttaagccaatcagaaaagtgtttatacatttaacaacttctgggacagtgcttctttaatgaaatcgctttaaaggctcaaatgaagatgttcatgggctttacagtttgtcttacagatataacatttcacagtgtttactaattcatattcttatatggtgcagaatgcccttcctcttggatgtgaaatgcattcgcctcaaagcagatgccacaatctctcagaatagtgtgcaggctgattttgattgtttgcttttcattgtcttttcctttcactgtcacagttttagacttagtgcatgaaacgtgctaatgcacaaggcacttaaattatcaaagtaatgatacagttaagcatccatctactgatggtcctttttttaaaagactcagatcaaaacccggttaggaatcattattctaagttgaacaactttgcattctacaacttatgagcagaaatcattgagaatgtattgtaaagtgctgtgtatacgtgtaagctagtagctgacgtctgcaaagaaatttgtcaccaaaatggcctactttatgtggatagaaacaacaacaaaaaattaaacataaaggtatctcgagcaaactgcacccaaatgaaaaaccgaccctgcagaaatctgtgcacaagagggctatctgaaactacagcacgattttaaaagaaggttttgggtgactgttttcataagtctcaatctaactgaccaatcagtgtgagagttaaagtgggctccagtcattcgtgcagccttcagagctctgcaccctccgagctgctctcctctccaaggcagagtcggcgatcaatgaaaaacagggaacaaaaggaatataacaggatgtcttccttagctaaggaaaacgattccctttttcctcaatgagccagtcgcaccctgcctacgacagctccacacgggagcttccagcagaccagtcctttcgggtgaggcacattttacatttgcaatcatgtgtcccaactgctagcaaatgtgtcaccttaagcacagcctgtgacggagggctccccgagcccaaccaattgaaactaataaattaaataaattaataatcccacaattaaaacctccggagaaagattgcatttcccttccccaaatgtcatcccgggagtataaacaaagcatgaaaaatagtctcttcagccttcccagccggcaatcatggttttcccctcaaaacaatgtttctccaaaaagagaaatcttcttattaccctcagtggaaactcatctgtagatgtcatatcaggataacccgttacagtatttgaaaagaggctgaaactgcccatagatttgacactgtttataattgatagccaaacagttgcgacagcaatgctgtaaactctgcccagccaaacaaactccacatttaacacgttccttccttgaaaataaaagtaacgcccggggagcccacagaagtgtgcttccctaaaagtaattaacagaattgcatcaattatttgattatttttataaatatccatttgtctgcaattttttaaaaaaaattttaaaaagcgactatccacacattcctaagaaactttttttttttttaatgaacttacttttgagacaaaactaatgaaaataagcaacttgccatggctggatctttcccatttgggctgcaagctataaatcaatctgaaaccaggtggaaataggggggcggacacctttaaaaaaaatcaaagagtgccccaaaatgcagcagcctgaacacggagggcttctcgtgacaatgctaaacccgagcagattaggaggcaggaaatgagccccattttcgttaccttcgatcgcctgcccccccgctgcttctcgcggccgcattggggggctgcggcgacgctggactcgcgggtggccccgccgccgggtcgcgccgtctcccggccgagctgcagcagatcgcggccggaaccccggctcctgcgcccggcgcccgcccggggtcggcggcgcggctcccaccccggcctggagccctgctgggtcctagtgcgcgccgcgcgcccgcctcgcggcccggtctgcagcccgcaccgagggcaggcagctcccagcgccgcgagtctccgggcgaggccgccaccctctcggtcccttgcgaaagcggccgcggggtgtgcggatgaactggagcttaatgtcaaatcctggcacaagatgttcaaaagaaagacattggctccaactgaactcttagaaggcagatgctaggatctgcagcccgagggtaagcgtaggggcagtacctggcagacagaggtttgccgggtgcactggtgacattggccgttcacagacggtgagacgcggtacgggatcgataaagatagatttcaaaaatataacgctaaaaagaaaaaaggttgaaaatgtgtgtgtttaaaacaatgttttaaactgtttttcccaatattttccccctgttgacaacaggcccttttgcatttcgccttcttttactttataatatgctcttttaaataacaaagccccatatggctaaacatgtagtcatttgattttcaaaagacctcaaaaattgcatgaaaatatgcactcatgtatctcctaagaaatcaacgagaaagaattaatggaggcatatggcgtgcctcatagagagaacttaattacaaattaaaacaaatgcgaaaattcacaaattcagtaaactgaaagtaaattatgatcctagatgtatacacaaatcagctcatgtacaattagaaagactgtaaattccaggtttctctttcacaaagggaaaagggtgtttgttacatgaactcatatcagattcccctcgtttgcccccaaaagggctttcagcaacctcttggcacattcatttactgcagcccacctggaaagcaacttttaatcttgcaagtgctcatttaagaggacaattctattagcccttaattcaaaataaaagtgctttagttagaaaagcctgtttgaaaggcttcaagactgggagctttttttcagtctttgatatcaccaagtttgaaggtcgcaattctgtaaaactgctaataacaatggcactgtggtttacaccataaggaaaatcaaatatgtgctttctgatttctatttttgaagcagaaaaaagtccctttgaaaagtattcttgccctccccctttccaattttagctaaacaagtgtaatggaagatttttagtattaattaaacatcaaaggcaccttctctgatgccttatatccacgccaagaactagttgtcatatgttacacttgtcaatcttaaattacttgcacatacatctcatgcgatctttaccacacctctgtgagaaagcagatacaataatctgcaattttcagatgagaaattggaggtcccaaaaggtaaagtgacttgttcaaaaatcacatggctggtgagcagagcagctggaatcccatcctgtctccgctttcaacaagccctgttttttgagtacatcacctggcctcccaactatctctctgtaagtactgcggaaaatgaagcatccgaaacaaaaacgcaggtaggtttttttagtcatcatttcttacctgtctcagagcagcaatttaccagcaagcaaatatgaggcttgttggaaatatgttagtctctgctaaaatgagaaacatggctaggaagacccacccacactggtcagatttctgtcctggagctgcccagggcaacctggccggcagaagacttcaaactctgaggctgagcaatgcctcatcccccatatgtctttttgctctttatcagaaattaagaactgactccacttgacacatggaggagtagtgttttgtcaaattgaacctgggtttctatgagcagtcccggcaccgaaaggcctcaaaaactctgtaaattcatataca

SEQ ID NO: 1241334 - DNA, 4001 bp, Homo sapiens
ccatcagaaaattttctgatgaccagcatatgcccacagtagagtataaaacagaactacccagccactgaagtcaactttagctctaaatgaaagttttatgtctcctgagcttccaaacaggaaaattatatcatggctgacagtaaagtaatttaattgcactgttgctatgacaacatgctgctctctttctttttaatttgcttatttgtcagtagcttcccagaggaactaacacgctattctccatgtttccttttgttttaaacaaacactgccagcaatatggttttaggagaaaaagtggcattgtcacgaagagagggttatgggagttcagtacccttggatcatgtgtgcgttttgtgctgggaccccgtactctccaaccactcactgcatccctataaatcccgcattttataccaacagggtgaagagctgctgatcactacagttccatgtaaaaacaaaacaaaacaacaataaccaaaaaaaaaaaaaaaaaaaaaaaaaaacagttcccagaaaccacagctgaggagttttccattattatactctaactacagatttcgccaaatctttttttcctcctgtttcagagggaaaaaaaaagaatctggatcatgtgagttgcagttaagcaaacatttttaatctgctgccaacaaggctgctccaccagatacgcaaatagttattcactggtgacctccttacaacttttctctacacacacacacacacacacacacacacacacacaccctcttttgttttttttatgacttgctgtgttttgttaccctctttattttttaacggagaaaatgcggcaagaaagcttagtttctcgcctagtaaacagaaggtctccaaataactgacaaagacattactggcccagctctgaacagatgttcgatgcgaactttaaaaagttaagaaatcttcccagagccgagcagtagcgagtttggggggccgggtcacccccgcccacccagcacgcgcgcgcgcgcacgcacgcgcttcactctcgtctactgtacttgtcaaaaacatttcaaggggacctgcgggagtggcgattggctgcaccccgcgtcaatcagcggcgttgccgggcaacgggggaaactgctcttatccccatatacagggcaattgggagctcgcataccttcactgccggtcagatgtcataaaccttttattggccgcaccgcggcgagcctcgaaaacaaatcaataaaagcccgccgtcccccaacttatccagggcccaaggagggtttcaaacagggccgggatgaggggggtcgggcctcgggggtctccggagacgttcgttgcctgtgccaagtctgcacagtttggccggggggtgatctttgttaggagcctgtttctcatcttggggtctccacttgatcggaaccccctccccggcccggaacggcggggaccccgtcctccgcagacaataccaactctgttccttgcgggcgtcttttcggaaaccgaggcaccgggaagcagcacgcacgtcggggcaggaaactcttcggacccggcaacttcccggctcgggggctcccggggtccacacccgaccctccccccaggacctgcggggtccctcgtcttcccagagcggcgaggtagtctccaggaccgtctcggacgcgcctcccgccccgggtgccccccgagcccacgcgggagccggcaggagcggggtgcaaactcacctggccggagcggggcacgggggtgcgggggcgccgctgcccttcagcaggagccgacaaactttcgcgggcgcccggcgggcatcgctcggtggccccgctaaggacgcgcgggcgcggcgcggcgagcccggggcggcgggcggcggggggcggccgcgggcgcgggcggcaggggcgcgggggtcgcggcgcggcatgggacctgcggcgtccgccgggcgcgccgcgcgtcctcccgccggccccgccgctctccccgccccgtcccgcctcccgctcgcctccgccgcggcgcgtcgggccggggcgcgccgagcggcgagaaattgtttccactgcaaacaaaaaaaggcgacacatgaccaggcaggaggaggggaagcgcggggagggaggagggcggagggagggacagagcggagggcggagggagccggagaaagggaaaacgtgggcctggccgccagcggcctggggcgcggggcactgacccgccggggcggaccctgcccgcgcccctcgcgcgccccagcactcagccagggcggaggccggggctgggccgcgcggcctcgcctcttgggccccgcggggcgggggtgaccggcgcgggtcccgcgacccagggcggccgcgaccgtgggcggtggggcaggtgggtcaggcggcgcgtgccctgtcccctccccgggctccggccacacgagcgggccggcgctgcgctgctggcaacgtgtcgcgggaacgctcctaccccatctgcatgccttacatggctcgaaagtaaaaataaaaagaattacgatgcgggcgaggcttgtgggggtgagaagaggagattccacgtctccccagtgctgcgtcctgataggacccccagggccttccgagccctctcccagcgaccacctcgtgtcccggaggtaagcaccgcagcgtcccacccaggtggccgcgtgtctcccgagggagggccggtggccattacaagacaagaggcaccgtcctaaaggccacgccggtggggcctctcaagtgggttgtgcggaacgccccggccggcctagagagaaaacaggtctcatttccatctcagtttgagctctcaggaaccagactgacaattcgcaagccacccagcgaaatggtgcagccaccactctaagtctctaggcacctccaaataatagcacccactgctaaagccacaccaaccagccgccttgggagaggatgagaggagagagtccaacaggacaccctggtggtgacaaaaataaaaatgtgattgcacattactcccaggtagccaaattggttggttcctctacagaggagaagcccagggcacccttcctgccaccccctcctgagccagtggacaggacatcgtgagcggtctgaaaactacagaaaaaaacagcgagtagacctggagaaagctttctagcatgcagtacttttaaacctagccaaaaggagggactaagggaaacaccagttaggcttctgaaaattttttctgtctcaaaaaatagaccccccccccccaatctgagagtcattccccctaacaaaggttcaagagggcaggtgacaagtcttcagcaaagatgtgcctttcagactcaccggagaccttactacttccaagttgtgtggcatctccccatctggagacaattaggaggtggaagcccaggggtagcctgaggtcatccagccccacccctttgattactgagcacttgatgcgacctacccaaagtcactaagcaaaaggcacaaggtggcagagacaagtcagatgatctttgaagtctcacgccagagattctcagggttagaagtggtaacaaagccaggatgagacaatgtgtaccctgctttcctgtagctccggctaatgcaggtcctgcccctccatcagcgcgtcagttgagggtgcttattctccgccagaggaaccaaggccagagacctttgtccaagcccttgctggcctagagaggacgaagtcgcccccttacatcttcctcttccatccccagcccccaaccccacccccaagtcccccagctacactcacacaatagccagaaatctctttatattaagtagaggtggcaccttattttcaccggccccagtcccctcctgctttctcagagttcaaaaagaggggatgtgagccaaaggtgattgtacatggaatatgtcattccatgtgtgtttttg

SEQ ID NO: 1241335 - DNA, 4001 bp, Homo sapiens
cccttggagacacccagggaagagtcttccaaaggggaaggggctccacccaccccactccccattcaacttcattcccagggttttggggagagggcagggcagagaaggtatttggtccctgccttagagcctgcccttagtcaagaaccagggcccttgcccagggaactcagggatcacaaacagggtccaaatctcatagcagtgctctcactattcttggccttggagaactggattttaaggaagcttgagcccagtactgagaggaacacagtatttattttcaacagggtgtcattcccaagtatatatagacaatacatatttttatagtaggtcagtacacaagcagtttcggtaactgggccaccttaagaattctgctacggtaactgcactaaaactctgcggttgtctttttgttggcaacacgaataagaggtaggtaaaggttactaaagaagaaatttcgcattttatacacacacacacacacacaaaatacacacatatatcgtccaggacctagcactgtgccccacacactatacacacgtatacagccaggacccagcacggtgcccaaaacacagaaggtggtgattaatgtttccagaacaagtggttacagagatgcatttttaaatgacccagcatttgtctgtaagccaatatatgagagtttctcctctctccctccctcatattctgtctctctctctctgtcataaatacacatgcagaaacacaagcacacactcacaatggcaaacaacagatagcctcaatatttggtcatcttaaaagtaatgtgatgacacagttcataagtagcttctctgagaactgattgcctagttactgactcacaaacttagtctgttttttaaaagtagacctagaaattctcataaaactccactttgttcttctccatattccctttatcacttccttctatcacacatgcatcatattttacttttacaacacttgggatctggttatgacaaactctgtaacagctcattgtattcattgtacagtttcttgtctagttttgctaagttatacccctcataaaagaagtgcaggaaccccaaatatgtaaatgtctccttttccaacccagagggtaagcatgtaactgatactaatgtaaccgacacctacttaatgtttcccagactcttaataacttcctttttaaaaacttatgatggtgtcttacaagaagtcattgttgggctcttgaaacatttagaataaaacggtgcatcaaagggaccggtcttctggtcaggttatcatctgtgtttttgagagtgttcttaccaaggcaagtgtgtgtctagagtacaggacacgtacataaacacacacactgtaagcaaaagtacagaaagcacaggcactgtcaagtcatgaagatgtgagtttcttcctagccctgacagcagtggctgttacattggacaacccaaggtacccccttccctaaagaataaatcatgagacagatcaacttcagcagcagaaccaactccctcagcagtttgggctggtttgcagacaaatcaaattatttaaacccttcgatgattctactgtgcccattgtacaggaatttaacattaaatttgtcttcagattatatttcataaaaaagggtaagaacaaacatttttttcctacctgctgctggagccaccaggagccaggctgctgctctcagaatggggcagactccaggcattaatcttcagctcctgcccctggaaccagaatcgtcgaaacaaaattttcagttgctgtgagtaagcaggctgtttacttccagccacttctttcccattcccatggctttttgagtgccagagtggggtgctcaaggaagaatgtttggagagaaagggattgagattgggggaaagggcaggagaaaatagtgttagttcacccaacacccttccttcaaggaggaaagccctctttctccagttttaatttctcatagaagatctgccactgcattactcatataattgctacattgccccttcacaaacagcagacataactttttgggcgagcctccagatttctgatgcatgcccgtacctgtctgcagagatattgctgtgcctgggaaaattgggagggcaacatacccacccaaagggaggacccagtctagattattaatcaagctctcgggataaaatataccacaaaaaaagcagaggccggtgtgagcttctccatccatagggcatccacctcattcatgggatcactggttagggatcgaacttcgttcaaatagatcagcagctacactttgtcaagctttgacttgtttccccaaagaggaaaggagtagcaaggattactatcacagaaagaatgtggctttcttactccaggcagtcaatgtaggagagtcaaagatgagagatgtgcaattagagttcctttaaattcaatatcatgaaatacagtatttaagaagacatttcaaagataaggcaagcattatagaagctccatgtttgattcattcctagtttccaagaaggtggtagtactacagtagagaggatgtagaaatagggcagaagttgttaagtcttgctctgctgttgactacccatgtgaccttgaataaatcccttaaactgatttccaaataagcaaaatgaaaggattgggctggaagactggcacaataacagaacaccatctctcagttttacatctattccatcttgtttttgtatcaaaactttgattttcctttggggaatcaccccttcctctcagctgtcgtggatgttgttgacaccacccccagacttcttcagaagtgggcctgtggccaagtctagccaatcaaaattactgcgaaaatttcagagacgggctcctgccaatgggagtcgtccctggaatttttgctgggaagggaggttctcattctgctgtggtttctaatcatagaagcagagcctagggctgctggtggccaccctagggaaagaggaactgcctgaagataaagccactgcagaagaaagcagatctcgttactacatcgtttgaacacttcattcagccatgacgaaagcaagcatttccctcagatttcttaaaaatgtcctttatctccttaagcccatttcagttagatttctaatactggcactaaaaaaattccagctaatatgaatttcttcctacttccctctatacctatcaccactgctttttaacattcatttctacagtatcagtggggggatttctagggccaataaatgagtttccttttgcttcactcttggaaatgtgtttcaaggctaagcctgcatagcagagagatgtcaaagtaaggcaaattctggtgaaagactttaaaaatctttcatcctttctctgaatatagttatttgtaaaaaatatttttaaaaaataatgcgcaaaggtgaaatgtacaaagcataactccccaccatttgaccttccaacaataactatggataacattttagtggcttgctattcaaaatgtgacccatagaacagcagcactgacctggagctggttggaaatgcaggacctcaggccttaatccagtcttgcattttcacaagatcccccaagtgatctgtatgtaaatcagagtctgaaaagcactggcttaatgtacagccatctagagattgttttcatatagtcagcagcattttttccagtacctataatttgttgattttgtattttactgattttgtaaaggaaatgtatatacaaatacaataaaccaaaaataatgtaatcaaaattctttataacaagcaattcatttacagggactgtaactataagccagttataaagctgtgacaaacccacactagaccttaggatactatatacagtaacaaacaatactgggacactgtacacgctagagcagcaggtcttcaacttg

SEQ ID NO: 1241336 - DNA, 4001 bp, Homo sapiens
tgtccattttaatatgaaatatgaatccaaaatgtttacaaacatactgggaaaagtattcaaatgccagctgtctcatattgtgaagtattttcatttttaacataaaacgtttatttctcaaagccacacctgagaaaatgattaggtgctgtggtgctgttaagttttatactacaaaggacatcagcaaaggcatctgttttcctgcctctcttctggtcttctcccctcccccactctccatcctgtaggtcctggtagttaaaatttctacaatagtctcataatgctctaaattctaaaaaaaaatttctcatcctttaacactgctgaacctaaattcatgcactgctctaagaaggaaacccaaaagtcacaagcctttttaatgacagatgtattacggaaaattttccccacaaagttttgatgctgtgaaatatcaactccctgaaatcacagaaaggaaatgacttacattcttggaaaatgaagccactagcagctttctccaacagcattttctaaaccccaaactacaccctgtggcaagagggagtatttcgtgcaaaaactaaatttaaatagatgcttataaaacccataaacaaacattgcccggtcccagagaagaacagaagggaatcatactcggaaaatccagcaagagatactttttctccacattcagaaatgctggagagcacaggctggaagtcagaagcaacctgagaacgcttgctgaagttttccttccctgctgtgagcaatgcacagctcctgagggaaatactggcaaaacagattttgcgtaaaaaaataaaaatgaaaaggtgttaagggggaaaacgagctaatatttctttggacactagctacacaactacacggcctgaaaatctgccagctttcaactttaaaatatgcttattttgacattttcccatctattcgtgcctttaagaaaacgcccgcaccattaggttatgctgtcccaggactcgaggtgttgttttaatctctgtagactttacacttacacgggtggaccgcagctgtccatacctgacagtgcctggccctcccggagccgaatccggtgctcctgttcgcctggggctccgccagcgcgccgtaagctcctccagaaacccaaattctgcaggccgcacccccaactcgtatctcacccaggcccccgtctggcgccgatctgccccagctcaacctccggctccgcagactaggcactttccgggacgcggggcagaccctgcgctcgggtcccttcccgcagccgggctgtccggcctctgcgcgcgcacaacaggcggcacggcgcagcccccgggagcgcgggactcgggtgctagtcccggcgcccagccacagcgacacagacctgggtgccggggcccgccagggagccctgtgatccggggacctccgcgatgcagagaaccagggaccgcgcacggagcccaggcgcgcagtctgcagccaggaccagcctcccgcccccgccgctgaagccgccccgagctccacgcctcccccgctgccgggctcggctgccctagggcctcgtccgcccgtcccagagtgagcgacctccgactcacggagaagcgaccttaccaccggtgcccgacacccagagctaagggagcgagaagaaggcgaagaaagaggcggagagcggtgcactgccttcgctgggactcgcgacttccagaaaccctcccgaaacccagtcccgccgccgccccgccggcagggggcacagcgggcgtccggggcgcggcggctgagcgatggggcgagcggaaagggcccagacgcctggttcttgttcatacctcggagaaagtcttgagcaccaggcgttgggctctctggtcacccctctgactcttcctaccggcgccgagcctgccccactcctctcagccccttggccccgccagccagaggggcgctccgcgtccgccccgccccccacccacgcctcccgacccgacccgcccccccgaatccccgccccctgagaccccgcccccgacccgccccaactggccgcggcggcagccgagccgcgggagctgcgcgctgagctcgcggcagtacggggagcgcccgcccgccccgccctggacccaaccaagcgtcccgcggaggggtgcggccacttgggggcaggagaaagcggagtacgccacccctctagggacccaggaagcgaggcgagcctcaggtggacgcggtggtgtggaccacggcgatcagggcctttccccctgctgtggagacggaggtgcgaggggacgccggcggctccccaccttctggccgagtggccttctccgcctccggctggactccctcggggcgctccctccagagccgagtcgggctggccgggggcggctgtttggcctgagtgtcgtcttactaaagcggaacgccggaggggaggccactccgagagaaggcggtccccggcggaggtggcttcgtgaatcctgcagccccctgcccgcccgccactcgagacgccgcgcctcgtgggtttcacgctggatggagggggcgccgccgaggatgcccagcctccccctctaattctacctctccagttcctcaggtagacacagcctctgtctgctgtggttttagtgcccatggcccctcagaaattatttttgtcccctcccgatagtggctttgggggatggagggcgagagatgcaaagggccagtggaagattttttatagcacaaggaatcaagccaggagatggaggtttcattgccacctcggggtctggggagggggcgagccacacctctccggtcagtctgcgcccaccaggacctgctgctgggaaccgcacacgaaaggagagacacccagcacctggcccctagacccgcagggcgtcaacctcctgggcttctgcctttctaggtttcctctgactttgctgacccaatgacccctggccacgggtggcaaaaacgccctcactgagcccttcgctaaaggagtgccggggtttatgtgtctggcttttaaaatgggatgaggagacaaggaaacaggacctgagaaaggacactatccaaaatctgatgctctcagaagtcaactttaaaactgccctgctccgcggtggctcacgcctgtaatcccagcactttgggaggccgaggcgggcggatcacgaggtcaggagatcgagaccatcccggctaaaacggtgaaaccccgtctctactaaaaatacaaaaaattagccgggcgtagtggcgggcgcctgtagtcccagctacttgggaggctgaggcaggagaatggcgtgaacccgggaggcggagcttgcagtgagccgagatcccgccactgcactccagcctgggcgacagagcgagactccgtctcaaaaaaaaaaaaaaaaaaaaaactgccctgctcttttcatccaaagatgaatatatgaagccagctgttactggttgaaagtgtgcctcttgtttgcatggcaaaggaattcagttttgtgtttatttacagctgaagctctcttgaaataattgtctcagtcacagcttttacattttggggaaccatgccattagaactgaatattaggaactgtgatcttttgtcttttcacaattgacaatacattcagaacttatttctgataaaactgggcagtttctaaggatactgtacttatgatttaaagtcataactccatgatgcaaaagagaacaagaaatatgtttcaatgactgccttttaaattagcggtactccagcactttgggaggccgaggtgacaggatcgtttgaggccgggagttcaagacagcctgggcatcatagccagaccttgtttctactaaaaataaaaaataaataaattttccgggcatggtggcccatgcctgtagccccagctactcaggaggctgaggtgggaggatggctt

SEQ ID NO: 1241337 - DNA, 4001 bp, Homo sapiens
gctgttctttaacgcagtcaaacacacaacactgcaaagtctcttttattacatataaactaaccattccattaaggcacaaagttacaacccagctgccagttacaactcaactgacacaaaaatattattcttgtctttcaggtcagaaatgtaaaacaaggaagaagtttagattccttgcctttttaatactggtgagaaataatacaataaaacaatgttaaaaatggagagtgcatttggggaatgtgaagttgatctgattttagaaactagtagactaattgggttctcaggggcctgttaatggattttaattgtcttgtttcttggttaagtgaaaatacttgcatgcctgatgtctgaatccagctcggaagtataatcatcacagggtccctagagagaaaatgagcaggaggagaaagaaaagatgcgccttctaggatgcaaaatgcaaaaaaaaaatgcttggagaaggctatgtgcacatttccaggttccagcctattcacattgttctaaggaactggctgaaacacaaaggtgagtatgtgttgctacagagaaagcaggctgaaaccagacaccagagctccacgcacatatcatcacaacaaaaatgcatccatgtacaacttgtcagggagcagactggggcctaacaatccccatcttctgaatcagcaggtgtgagatgaaggtggacagctaaagcagtttgcaaaaattactgtagtttttattcactgtggtttcacagcaatagccatgtggcccttggatgagtggcaagtgaagagaaaaaagtaaaagtctctaagttgttggagttccattgttctaaaataattaggaactgtggacctaataatttaaaagcttttctgtatctttacatatagcctttttactctcaacttcctgataggttcagagatcactatagttcctctatattcactagtatgctcacgagaagacaagtacttgccagcctgttttctacctattcctgtcaacatgttagcatggcctgggtgttccacatggctggcttctcttccctccctagtgctgtaccagaccctttccagacatttaggaagcttcacaccgttcagttacaaactgagagaaacattaaataattctgaaatgttttctaagaaatgtaaaatgcaacctctcatccccctaataatcactggtgtcaacagtgcagatcatcaacatgcctgtgctctttttactccctctgttgtaaaagcccagagacaatgaggtttttcatacgctactttggaaaataatgcagtaaatgtgaatacttatcctaggaataagctccagctgttgaataaagttaggctttaacatttttttaaatgacgcaaggcatgtttttgtttctcttctaaaccctatggaaaaatccttgtgatcattttctactaaaatgctaaaatagtgttttagacaaggtgactctacataaaattaagaaaaacacagactctttttatgctgttttttgctaaactaatgcccaaaaaagggcttttcatgttaaaatgataaagcccttaaatgggggtgagatcttggattcaggccaaagttgacccagagaaacttaatttcaggcctttttcagacctggaaaacccctaagtagaagaaactaagcatgtgtcatttcttcattcctctactgctatggtttgaatgtctgttccctcctaaactcaggttgaaatctaattgctatcataaatcatatgatatcaaatatcatagtagtaagacatgggagtttaaagagatgattagatcatgagagctctgctttcatgaatgggttagtgccattattgcagtagtgggttcattatgagaggcggagtttggcccccttttactctttctcaccctctctttacccttccaccttccatcatgggatgaagtaacaagaaggcccttggtagatgctggcccctcaatcccggacttcccagcctctagaactgtgaggaaataaagttctgttctttagaacttacctagtctgtggtcttttgttacagcagcacaaaacaaacaaagacacctactcacttaagcctccgaatacacttggtactatggttggcaatgaacaacgccctgtctctctgaaaactcaaaattctttgcaatttttaccttagaacctatagaggaaggtcattaattctttaaggctctgaagggatctcttaaggtcatctgaacaaaaaaaatgtactaaaatgctgcaggcagaaagctgatagaacaaatcaacttctcaaggtgccatgttagacgtttaggaatgaagctgacttggcaaattatgggctctgcacgtaattatgtcacctattctcacaggttctcctgcttcttcatcctcctcctgtccccatctgaattccttttcatattcatgtcagcataggagagatatatttgttacactgatgagtcatcgtggggaagaagtggcagtctagcagcagctgaagccaatacacctgacagttataccaattctctctgaagacacaggcagtttgtggcagacagtgaggaatgattcatgttctaatcgctacgaaattacaaaagaattgccaaaccgggtctcatttggattgacagagaatttttgagagaaatctatcagaagcacaaacctctacaaggtcttttgtttgtttaagaaaggatgggtatttgcctggtttctaaaggaaagatgaggtctgaggtgtcaaaacttgtctcagacatgaacctaaaatatgaatcttcaccctgatattcacacaaatacaccaaatccaatctaatcaaattactgttagatattactacaacatgaatttataaaactaatttttgcaaaacaaatctttgaaagcataaacaaaaccccaaagcattaaaaaaaaaaacaaacccaaatacgtaatgtagcagttttgaggattagggttggggtgtgttaaatggaggaaatccagggtgccacaactcaagataaagggctatcagattaatgtaaagttgaagtcggatgttacagacccttagcactgccttctttcccaccctgacatgatccccgtttcagggtccagtactctgaggccccagacagactgctttatttcatctgcatctcagcaaaggccccacaggaccagctgacttccctctcctttgtttggcactcttgctagaacagacttgggggcctcccagccgtcaatcagaggctgcagacacatctgtgacctacctttattgtcactctaaccctaagaaataatcacattggaaagaattccagaccacctgtggataatagcactaaggtgggtcagtgtaaatacaaagctctaaaatgcagataaaatctgagttgcagataaacccttgccctgtgcctttatgggtggctttttgcaagtattttcaagtcaggcatgggaaaaccttagagactgtacttgagagatagctaaatgcagtcacctcagatattctgaataagtgctacagtaggtggggctcaagcctaaccctttgccttctggaaatactgagatgtaaatagtaatgctgctctcaatctggagtgtcccagtcccaaaatccaattctgtaggagctcaaaacccccattcagagtaagaggccacaggtggcaaaggtacaatttgcttccacaccccagaccctgcaataccttcgttttcctccagcttccggatatggcgcaggacaggctgcagattcatatagaggcggtggctgttgctcagaagttgcaggaggtgtctggagcgcatggggcaccccgtgtagtatatgagcttccgggcagaaggcaagccatctggcaaaatctcaaatttcttaccctttggaaggaaaccatgaatcaaattcaggaagaaaaatct

SEQ ID NO: 1241338 - DNA, 4001 bp, Homo sapiens
gctgatggagactgaacttcagcaggagcctcttctgcagaagtctcctcagatagtggagactgagcttcagcaggagtttcatctgcaggagcctctatagctgctagaagctgaatttcagcagaggcctcttctgcagtggtctcttcagctaatggagattgaacttcagcatgagcctcttctgcagaagtctcctcagatagtggagaccgagcttcggcaggagtttcatctgcaggaggctccgtagctgctagaagctgaatttcagcagaggcctcttctgcagtggtctctttaggtaatggagactgaaattcagtaggagcctcttctgcaggggtctccatagctgttgaaagctgaagttctcgagcctcttctctaggagcctcttcaggtaatagaggctgaacatcagcaagggtctcttcaacagtgggaggctctactttagctggggcctcttcaagggcgccctcagctggtaaaggctgtacttcaatgggagccttttgtgctgagggagaccgaatttcaccaagaagctctactgaaggagacttttcagctggtggaggcagaatttcagcaggaggctcttctgaaggggactcttcagctgatggaggcagaatttcagccagaagctctacagaaggagactcttcagctgatggaggctgaatttcagcaggaaactccactaaaggggcctcttcagcaggtggaggctgaactttaacagaattctccgcaactgcagtggctgcctcagcatcaggagtctcttcagttgatggctgtacttggacatgggtctcttcagcaggtctgggctccgctttagcagtggcctcttcaactaatggaggctgtattttagctgggaatttttctgttgatggaggctctatttcagcagaagccacttttttaacagcagaaccttcttgtacaacaggtacagttacttcttccctaagctcatcttctaaaagtaccgggggaccttttttagtctcctgagtaaatgaagttctgctgatatttttctgcccaatttcttcattgctgtttgttgctggttgaaattcagggtgttcactagcaaaaatctttcccgacgatttatgtttcagggcatcttcctttgactttgtagaagaactatctggcctggaaataaccactatttctgattcactaaagtatgtctgttgttccttgtccactttttctacaggggggatgttcatcatggtccagtatcctgtacggctggtctgctgagatctgtccatttttagttgaactgaaggtatgtttggtggaatttctacatcctgaacactctctggcaattcaatagcagcttctctaacatcagctgacttttcttcaggtaccacggtttcctcaactaacttgacttcttttttctcttctacaatggtgtctgtctggagagacttactagtcatttcctgtccatgctttctctttgtccaagtttgctgaagctcagaagatactctaatagactcataggctttggcagagtagctgcctttgcttccagaagtattaccaatacgatgggtagctttggggctagatgattttggtatggccatgtgtttctttttctctattacatcagtttgctgggatttgcctaccattggtttgctgggtcatcttctctttcgaatttcttgcctacacgctgagataggctgattagagtcatcactttcttccatttctaagagtagtgatttcaaacttattaattttcaagtaatgaccaaaaatcacaaacgtaccaagtgtcaaagactttccctttcttaggtgtcattctgttgagctccctcagaaaaaaagtaattcataagctattgcattccatactacactcttgttggatcccaccttattcagtaagcgtctttcttctttagtctctgttataactaaatatcacttttagaagtttccttcaagggtctatgacatcatagccagttctgccttcaggattccatcagtggtattcctaggacttttaaacttagtatacatccataggtaatggctgcaagtgagaatctactttttgaaacaagttgaaaaaaagcatttgtctacaaaagaacatcaggtaaattccagtaatgccactttctaattgctgaaattgatgcttttttgaactttcaattctgttcttttcatcctattatcaaagacagtaatgcagaactcagaatgctgcagcctattttcaattgtacaaaacaacccataacatgagtgaggatgttctatcaatgtattttatatgacttgaaaggaagttactactgtttgaaaaacttgaattctgaagttcatcttcatataagctgcttttctacatccttagccttcagtaacacaacagcctattatcaaaatatagaaggcaggtttatcttctaaaacatcatgagatattttaatttttatttaactattttagagtgtagttgcatccaaaatttgccaactaaaagaatgagtctaaatacatgccaagtgagataaaatgcaccttttgaagtagtcacattagactctgctgagtacctacatgggaatgaatgccccaatgtagataaaaactttatttttatctttgtcttgttttttgagataggctctcactgtgtcacccaggctggagtgccgtggtgcaatcatagctcactgcagcctcaatcttctgggcttaagcaatactcctacccctgcgtccccagtagctgagattacaggcatgagccactgcaccagctgaagataaaaacattaaattgaagctatgaaaaggaggaattccagtcaagcagattgtagatgacattgtattagatttggaatacagataaaattttaactcatatcactcaagaattttactagaaagatgaatattgatcaaacagtatgcaaaaacattgtgcattagtctgaggaaaatcaagaagagaaaatagacttttaaaatacagttataggagacaatgtaataaccatatgccaaataataattatgactgcattaatctgggaatatttttaaatttctttatgccatattgcccctagaaaacatagtgaattgaataattcccctttttttcacatgcattggtgttatgagctgaatgtttgtggccctgtctccttacccacaaattcatatgttggaacccccaaagttatggtatttaaagatgggatctttgggagttacaggcatacctcattttattacactttgcttttttgtgttttacagatactgcactttttacaaattgaatgtttgtggcaagcctgcatcgagaaagtccattgatgccatttttttcaaacagtatgtgctcatttcatttctttgtgtcacattttggtaattcttgcaatatttcaaactttttcattattatgctatctgctgtggtgatctatgatcagtgatctttaatgttactgctgtaaatattttgcagcatcataccctatatataacaaatttaatagataaatgttgtatgtgttctgactaatccaccagccagctgttcccccatctctctctctctctctcctcaggcctttctattgcttgagacacaacaatattgaaattaggcaaattgatagccctacaatggcctctaagtgttcacgtgaaaagaagaatcacagacctctcatttgaaattcatgttgttttcatgcctgctaacacaacatccattctgcagcgcatggatcaagggttaattttgattttcaatgttattatttaaatatatttcataatgctatggctgccatagatagtgattccattaatggatctgaaattgaaggtaaatttaaaccctctgtaaaggatttaccactttagatgccattaagaatatttatgaataatg

SEQ ID NO: 1241339 - DNA, 4001 bp, Homo sapiens
agcagcatccaccgcctagcagagccgcgggccacagcgggacggcacagttccagcagggcagcggctgcgcacgccggctccggctcgcacacaggcgtaggccgccctctaccgcctgaaggccggaggctgagcggggcgcgagcggatcctggatcccgggaggagactcgcctccagagaatgctgtgctccctacagcgccgggaatggaccggcccgtgccagctcagtcggcggccctagggggcacccgcactagaggttttgaagctggctccttgctacttttaggggtgcgcgctgctgctgctcagcccctgcagcccgcatttggccgcttgactgctgcttccagcgcgatcctacaatggcatcgctcccccaggagactcagcgaagccctactttatcttgtaagagctgtttccacattcactcgaagagaaagaccccccccacgagggcctgagttcgatgcccggcctctcccgacccgcggctgcgacagcccctctgaggcggaagtttatttagtacgggaaagagaacagcacggggagaggggagaggctttgccctaggatgcgtcctacccgctcggactcggaaaattcccggcgcccgcgatgcagagcagtggaccgaagggctgccccagagcagcccagaccgccagctgagcgggaggaccggagcgcgccgccccagcacacaaagtagtcgcgggacgaggggtgccgccgaggccaatcagagctgcgcgccgcgtgagtggagtgcgagccggccaatcagagggccggaagatgagcttcccgttccaaactcttccctgtagccttgggacccagatcccaagcctggggcgctttacggtgggagagcgaaatggtgcccttaagacaagaatcatttctctaggcttgggcattttaaagtacataccggggatacttatcccaaagcaagtagcggcggccttttagatgttaaatattaaaagatcacagaaaggagatttaagaggcagtggcctgtcaaggttgcaatctgcctaatattcataaattcacatatttattgagaccttcttatgtaccaggaactctatcacagatacacaaataaggtactgctgattcaaaagaaaatcccttgtcctcaagcagctcaggttgtgagggaggctttcctagaccttgagactcgtatttattgtcagctctttaaacaaaaagcactctatgaagtgctgtactttacagtcgtttttatgattatctccctgtgagaaaagaaaattgaaaggaaagtagagtgacttgtccaagatcacacagaagatgtactagcagagccagaattatgttctagctcagtttgggtgtcatcattcaataaaataattcaataacaatttgtaaatgcatggatgctctctcccatgagatttctgtactaaacgtataagcaggacaaaattctggtataaaagtgacacactttggttgttggaaatgaacacaaattttagacttatgtgggattaaaggtaaaaatcttaccagtcatactttagataatttttagaagtcagaggtggggtggatatttacttcttagtttaaacacagcattttaaaaatattttaacaagcaagcgtaactttttttttttaagatagaagaagcaggaaggatcacttaagcccaagagttccaggctgcagtgccacatcgtgcctgtcagtagccacttcagcctgggcaacatagcaagaccctcatgtctaaaattaaaaataaaatttaaaaaaaagaactacttctagttggttaataatcatgatagtttacactgtataatactttgagatacccaagtacaaagctttacatttgcctaaaaattccatttttgtctggtgttccatttttacttccaaaatcctaggaattaaagcacttattttccctacctccttccaactgaaaaaaaaaaaaaaaaaaacctgtcctaggaatgttttgcccaggatttggtgcatttgtatagaacagtataatatacgttaaaataacaaataactttggtatctcttgaatacactcagaaactaattcttcagtggttttgaagtctgctttgttgaatcaatgtgcttctccacctgtgatggaacattattatcaaaaccctttccaaggcaggctcaggatttagctgccatcccaaaactggaggtctctgtcaaacaactgatatttgagaacaagtctttacacattaagttccaagccaatcatgaatttccaggaaattcacttatgaaagggaattttataccctgcctcttctcagtgtggataacagtcccagcttttaaaaaatacatttattttactctctccagacaagaaaattcctagaactcagtcgttctcttgccaggttaaattctgagagagaaggaatcccccaaaaggttctaaacatcactggccatcagaaagtatctgtgtcaaaagcatttttccacaagctgcaggtcccaccctgttgctgcgctctctcattctcttctcccaactgcttgcctctgctgctcatcactgccagtttgtaatagttgcttaagtaagtacaggtactccacctcttactccacccctccctcaccaaactaggttttggacccatctttgcttatcccaaaagttaaagacaagttctgttcaacaaaagattagacagaacaatcgttatgatctgttatacaacaagtaacagggccttgtcagtgcattgttttcttgtatatagcctcggtcaaattcttaaccatcagctagagctatggggactcgggtgtcccggggcaagaaggagtcaacccttagactatggaaaagatcaaaatgaaagttaaagtgagtacatgagtggccattttattgagagattagctagatcaaagttaatgaacgtgaatgctatcacatttcctaagttgtgaacattcatgtagaaactggtttgaaatttactaccattttattatgactgtaataaaaataatagccaaagtgtaatagtgctgagcaccaggcctcatgcaaaactctttacctccaccatttaattctcaaatcaaacctttgaggtggatcctgttattacggtggggagatctgtggagttccagcaaggggttgaggcactcagaaggcttagcataagctacttaccaaatagtttagaaatttttctatctctaccaacgtgtaccaactgactgtcagccatggaagcattctgaataattgttaattgttctcgttgttttataattgttgctctagctacatttcacttacaggatccgattttccaggaagtcatccaaagggcagcattgttattgccaagagcaagaaggggtgaccttgagataatcattttacccatctgggcctcagttttctcatttgtaaaataaaagggttggactaggtaagttttagttgttcgtcagttctaaaactataaatctagccaacttgacacaccattgacaataactacaaaaatgaaatatagggaaaaaaagtctatattttcatttttattttttagagacaaggtcgcagaatgttgccaaggctcgtcttgaactcctggcctcaagctgtactcttgcctcagcctcctgagtagctaagaatctatattttcaaattcaatgtgttttaagtcacttttgagccagctccttaaacaaactctatacctactcattaaaaagccagagcaaatctttcccattacaagagtaaatgaagtgattgatttaaagactgatgaaactagccagactatccctccctatgacttgcctccatggctgaaatttctgtcttctccactgggataaagcagcatatagttcacactattgatttctaattgaacattcactcccgtccttccttat

SEQ ID NO: 1241340 - DNA, 4001 bp, Homo sapiens
atcatttgctatgtggcacacactattttaaggtctttgtatatattaactcattcaatcctcacaataatcctacaaagtaggtaacctcatcatacggtagagggaaatgaagcagagaggttaaacagcttgcccagggtcacctagctatcaagtggtggagatgggcttcaaaccaaggcaatctggccccagttccatgtctttaatcaacacattataatgcctttctaggaaagatcaaatcagtgttttgaaaactcacagtattttctaacctttcagttaaatatgcagactgttcaatgccatcctccagacctactgattcagaatctgagatctgaagtgcaggaatcagcattgttgaacaaatccttcaaggtagtgtatacacaataaattctgaaactcactgatttaagaaagagcaaaaatccaatgaaaataattcaggtagaaaaaaataaagagattaggatatagcgatcaatttttaaaaattaccatttgttgacagcacatatgaaatgagcagaaaggcttagagaagtatagccaatgtctctgttacaaagacactatatgaaaaatgctcatattttaactatcctaaacaccgagtatttaagtctattcttcctggctaacacttaaaagttcaatagcaggaagaatgggggtgctggaatagccagcactggatgaaggaatgtttttattctgattattatgaagtcctacttttaaaaatatatttatacatttaaatggtacaatatcctggtgttaaaaccttaaaaggaacttaaaatatcttttcgtattaagctacacaaaactgacgatttttaataaagatgtaaaacttgtacacatttaaagttcccatttatagtttacatttatggcacacttttaaaccattccagaaggcatgactttactactgggttagacagagttccatatttcagatagttcatcattaaaaattaaaaaaaaaaaagcccaaaacaataaaacccaaagaaacagatgctcaaagcattagtggattacttccaaaaagactccataataacccagttggccaatgaatgagggaggcgaaaaggcagggcggtggaactaaaccttatccctattgtttgcaaactaagaccctagttaatcaccaccgctgttaccacagccggtttaaataggagtctcggatttttgcggtacatgaaaaatgtcaaccgtgaaagaaaaatatccgggttttaaatacaaaggacactcgaatttcagtttaaatcccactcaggcatttcaaagactgtcacttccctgcagtccagagttaatcaaggttgcccgggtatctctctcaggaggaacgcggagccacgtagagcatcttttcattctaaacccgccccaaccttccatctttcattaaaagagatttgtttaaacgtggcaacgccttcacagtgagatttaactactgttaaaatttcagcattcgagccgaattggtggaaataataaactacgggtttaaaaaaagccacggaggatgcgtataaacaaggtttactcgcgggggaccggcagggcctccgaatcctcaacactgagagctggctggcgtgcgcaaccgtcgagagcgctggtccagcaaacgcccccagtgccccgaattcccttagtctccaggccgggccccagcaccagacgtccccaaaagcactgcgaggccccggctgcgacgtccggcctcctgacaccctctcccaccccacggtcctgcttctctctctggaacgttctgcgtcttcccgttccccatttactcaccaaggagagctgggcagaagttccagagcctcagtgccacttttcccggcccgctgtacgtcggggcacgccgaccgcgagcagccacattcaacggcccacaggattcaaattcgtccacttccgctcgcaaacccggaaagagcggtcggccccgccctcgaggggtgggacccgcggaggcgctggctgtggggaagggcccgtgtgctcccgcccttctggcgctcctgcgctgctgctcggtgctaacctggctgtgtcgccttcgcttgtttgttttgtcgggtctctctccctatttaggagctcagaaaaactccgggcgcggggtcattgtttccgcctatttgctcttgaggggatcctcttttttccaaaatggacagagatgtgctgaagtttcgtcaccttcgaggaatggggcgaatgaaagcacgaacggaggcaggagggttttatctttcccttcatcctcgaggaaacagcagcagcagcaagaaggaaaaaaacaaaccctccaagtacttagtgcagcctttcctgggcctctcagtcctatcccggcacagtcagggcttttaatttatttctgtcctgggtttagggaaaacaaaaagccaagttcacccgtattcagccaaaagttgaaaataagtggtcggaccaattcctggtctcaaataaactatttgatggtgttagaaggcaataaattttatttcccccctcagataagggctcactttacgagattattaagtattgtcccgtgagattattgaaacaacagtatcttttcctttatcgaggaccacagtatgtctttgatccaaaacgtcttaagcttctgaagagacatctgggagcttccagaaactaaaggaaggactggaaatgctagggggtgaggggcgctaaataactctgacctttatggctgtgattgatgttgccaccagatcatcctcacatctaataacattgaattacctaaacggatcagtacaaaccaaaccatgacagcatacctttagcctttgtcaaaaatacagtttgagggccgggcgcggtggctcacgcctgtaatcccagcactttggtaggccgaggcgggtggatcacgaggtcaggagatcgagaccatcctggctaacatggtgaaaccccgtctctactaaatgtacaaaaaattagctgggcgtgatggcaggcgcctgtagtcccagctactcgggaggctgaggcaggagaatggtgtgaacccgggagacggagcttgcagtgagcagaaattgcgccactgcactccagcctgggcgacagagcgaggctctgtctcaaaaaaaaaaaaaaaaaaaaaaaaaaaatacagtttgaaaggtttactagatttctgagaacctatgctacaggtaatctgacacagggggtgtgtaaagctattaactgatgtactgtttttaacagtggaagatagaaaataatctgtgtctacaaataaggaaggggttaaatacatgtaagttatgatactttagcatctgatatactgacgctgcgggcactaaaagtaatgaagtagatcagcgggtactgaaatgaaatactgaaaaagtttaagaaggactgtagtatccttgtttgaaagtatgtgtgtgtatatggtatacaaagttttgggatggatacctaagctgtaaacatctctgggagcgggctggtaaataagagtaggaagagatggagaacttttacctttcactttatcaccagttgaatttttaagataataaactttttttttaattttgcaattttgttctttaaggaagattgctagaaattgaatacattctagatacaaaatcaggtttaatgagcgtataaatttctaatgtttggatagtctatgtccattcattcattcaacagttctttctacaattacatataatgatttgaccacacattttgtcattcatgatatagtgtattattttatgtttacatatctaatatgaccccgttaaatatattgctccttgaagtttcttgaaggcagaaactatgttatatattttcctatgtctttcataattcttggcaccttcccaccattcttatccttcacaggaattaaattctca

SEQ ID NO: 1241341 - DNA, 4001 bp, Homo sapiens
ggctcactgcaacctccgcctcccgggttcaagcgattctcctgcctcagcctcccgagtagctgggactacaggcgcgtgctaccaagactggctaattttttgtatttttagtagagacggggtttcaccgtgttagccaggatagtcttgatctcctgacctcgtgatccgcccgcctcggaagcccgaagtgctgggattacaggcgtgagccaccgtgcccggccctacattcttaactacttactgtaccataccgctttccctctctgacatgaagattaaatgacagcactctaaacacttactggcacaacctgggctaggaaccaaggactccacaaagaagtttaaagtggtatgcaaatataatgttgcaagaattttcattatttagtgagttcctatgaggagtaatgaactatatagggatactaataattgtatattctatcagattaggtaggagtttcctactttgaattacgaaatgattcttctcatcttagtaattttaaactgggcttaataaacctaatggaaacaaagacttccatttttcggtaagctcttaccctagatatagtatcacaagtaaagctataaaaaagatggggcctcactccatgaaatattggctgtttcaggtttagcccaaaaacataaaaaggagaatagtagtagcaaagaataaatgcattaactcatcggcccacaggtttcccctgaaatacacatcagcacggctggagagattgcaaattagggaatgaaaacataaaaatcaaaaaggatcagctaactccagggggaaaaaaatttcccctagcagaaggttatatcttgtggtcacactacagaccaggtcatccttgcagcaggcattcaagcttgttctgagttgaatgtaaggatgcaagctccatccaactcaaccccaaaaatccgagttcaaccttaacattttcaagaaacattagccctagatgtaatttcggatacaaaaccaaaaaacaaaaaccttctcacccaaaggtcggccaccatgaagcccatgggcccagagggagtacccggtagtttcaggccgctcgcttatcttccttttaaagagaccttgaggcaccagtcctgcctccaaacgaaatcctattcggcgctaccctctctggaggagcccattcttaccctgcactaacaactgcacgggacttaacgactccaccacccaccaactcctccaaaagggagagacacagccaaagcatcccactggggcgttctctttcgcacacggacgctcccgcactccctggccctttctggagcgacgctccccgactgccatctccgcgatgaagacagcctgtgccccactgcctgggacgagggttccagccccggctacttcactacttagacctgtcactttactctctgcacctatactctctggacctccggatcctcatttgttcaaacctaactgcctgtctggttcgtgttaaacgagaaagcacccgccccagccccgcagcgggcccgccccaaccgcctgctgactggcaccctaggggaatgcggcggagagtggagccggtggaaacgcagggcaacgccgcgggggcttgtggggctggccccacggggcgggctcttgccgccccccgcgtatccccgcagcttgccgctcaccccgccgccgctgaccgcgccgatgccgtcgaactcccggcccagcccgtcggagtcgtcgagcacgtacgcgccgccgggcgccagcagcgcacacagcagcaagggcaccgcggcgcggcccgccgaacccgcggccgcagtcatagctttcgctcggcgttgccaggaagccgagagtagccactcagccattgtgtgggtcacatgactccggcgcccagggaggcgggtcccgtcgccgccacgatagatacgggcaggaggccgctgatgctgacgccgccgccgccattttgagtgcgggtcaagggcctctgacgcagctggcggagtgttgagaaaagaagcagcgagctttttcttatcgctcgcgtgtctgtggtcagctactggatttcacatgtacttactgctggcttctcttccggcgtcacctggtggagcactttaacgcagggaaggtggattccaaggtccgccaaaggaagagggccatgagtggccctaccatggctcttccccagcatctcagggagtatctacctcgtgcgaggaccaggcttggacaccaggtcccgattccattgtcatcttggtggaatcactttgcttttggagcctgagttttcccttatgtgagatgaggcgagaagagcagcagagtgagggactgagagaaaagttaataagcactcagtacatttgaatgcattccacaagtggcaaatagctgagaaggttctccagtctggtaactaccccggcatattcaaagcttttagccttgaaggagttaataatataccacctcaaaatatgctgctgtggcatattgactattttaaattaaaggcacttaaaaacagcaggtgcaagatcactgtcatggatattatgtgtcttaaaaggaggagatgaaattcccatgtgaaagatgtcttccctataaaataacattgttatcttcaaggacagaaagttgaagtcgagggaaatctgtccaaacaaaatttgttaatccctatctttctagtcgcttctttaccccaagccccttcgccttatcatgtttcacaactactattttttgtccatttcactctataagcaattggctcttaactgctgctttaggtcttttttttttttaatgagggcccccgtgctatgtaaaataaacatttgtgtggttgtctcctgtcagtctattaatatcttaaatcaatttaatactagggccatgctgggaccctacagggacgaaggtgaaattttgcctcccctacaattttataaactatcttccactgtcagttgaagtgattccagacaggtaactctaaattggtaggaaagttgtgaattgccctgaatttctgccacatccagcactgtcctgagatttctgatttccttgttattgaagtaaattaaagagactctgaagagctgcagagaaagattttctgatccccaaatttctcttagcagaagtatggaactggttatcattgcctacacaagcccctgagataccacaatggcaaggaaaagacccagagactttaggacctgtgggatttgtctgcagaaccctatttggaatctgattattttgccccttaaccacaaacctaaatctaagtttcaagaactcaattatacttgaaggtcaaagctctgggcaatccaataaatatgcacattaagaacccgatatccctgggttcttaatgtacattagatatgtttgttctttctttctttttgaattgactctacgtctatcctggtttactaaggacagtcacaacttttgtctaaacataattactgataatgctcctttcaccctcagtagtcttctggcttggatcagttaaatagtcccctgtgtatgaaccacttattttctttggtttcttctttccccagtacaacacgaatctgaactctctgccttgccactgcaaccagtttatgatgcaagtcagtaattttcagttctgtggatttactgttacagaattcactctgatccatttgttctaacacagtattttaagcatgagctggagctcctgtggatacaagccacagtaaccattccatcaagtgaatgttaagcttctcttaccagctcttaacaagcgcataagacccacttaataccgtgactagatgggaaataccaaggtgatgacagaggaaactaccttacacataaaactaggaagttgcatgacgatgtatgaatacccagcatacaccatcctgtagtacgtcattgtgaaacgggt

SEQ ID NO: 1241342 - DNA, 4001 bp, Homo sapiens
atttagtgagttcctatgaggagtaatgaactatatagggatactaataattgtatattctatcagattaggtaggagtttcctactttgaattacgaaatgattcttctcatcttagtaattttaaactgggcttaataaacctaatggaaacaaagacttccatttttcggtaagctcttaccctagatatagtatcacaagtaaagctataaaaaagatggggcctcactccatgaaatattggctgtttcaggtttagcccaaaaacataaaaaggagaatagtagtagcaaagaataaatgcattaactcatcggcccacaggtttcccctgaaatacacatcagcacggctggagagattgcaaattagggaatgaaaacataaaaatcaaaaaggatcagctaactccagggggaaaaaaatttcccctagcagaaggttatatcttgtggtcacactacagaccaggtcatccttgcagcaggcattcaagcttgttctgagttgaatgtaaggatgcaagctccatccaactcaaccccaaaaatccgagttcaaccttaacattttcaagaaacattagccctagatgtaatttcggatacaaaaccaaaaaacaaaaaccttctcacccaaaggtcggccaccatgaagcccatgggcccagagggagtacccggtagtttcaggccgctcgcttatcttccttttaaagagaccttgaggcaccagtcctgcctccaaacgaaatcctattcggcgctaccctctctggaggagcccattcttaccctgcactaacaactgcacgggacttaacgactccaccacccaccaactcctccaaaagggagagacacagccaaagcatcccactggggcgttctctttcgcacacggacgctcccgcactccctggccctttctggagcgacgctccccgactgccatctccgcgatgaagacagcctgtgccccactgcctgggacgagggttccagccccggctacttcactacttagacctgtcactttactctctgcacctatactctctggacctccggatcctcatttgttcaaacctaactgcctgtctggttcgtgttaaacgagaaagcacccgccccagccccgcagcgggcccgccccaaccgcctgctgactggcaccctaggggaatgcggcggagagtggagccggtggaaacgcagggcaacgccgcgggggcttgtggggctggccccacggggcgggctcttgccgccccccgcgtatccccgcagcttgccgctcaccccgccgccgctgaccgcgccgatgccgtcgaactcccggcccagcccgtcggagtcgtcgagcacgtacgcgccgccgggcgccagcagcgcacacagcagcaagggcaccgcggcgcggcccgccgaacccgcggccgcagtcatagctttcgctcggcgttgccaggaagccgagagtagccactcagccattgtgtgggtcacatgactccggcgcccagggaggcgggtcccgtcgccgccacgatagatacgggcaggaggccgctgatgctgacgccgccgccgccattttgagtgcgggtcaagggcctctgacgcagctggcggagtgttgagaaaagaagcagcgagctttttcttatcgctcgcgtgtctgtggtcagctactggatttcacatgtacttactgctggcttctcttccggcgtcacctggtggagcactttaacgcagggaaggtggattccaaggtccgccaaaggaagagggccatgagtggccctaccatggctcttccccagcatctcagggagtatctacctcgtgcgaggaccaggcttggacaccaggtcccgattccattgtcatcttggtggaatcactttgcttttggagcctgagttttcccttatgtgagatgaggcgagaagagcagcagagtgagggactgagagaaaagttaataagcactcagtacatttgaatgcattccacaagtggcaaatagctgagaaggttctccagtctggtaactaccccggcatattcaaagcttttagccttgaaggagttaataatataccacctcaaaatatgctgctgtggcatattgactattttaaattaaaggcacttaaaaacagcaggtgcaagatcactgtcatggatattatgtgtcttaaaaggaggagatgaaattcccatgtgaaagatgtcttccctataaaataacattgttatcttcaaggacagaaagttgaagtcgagggaaatctgtccaaacaaaatttgttaatccctatctttctagtcgcttctttaccccaagccccttcgccttatcatgtttcacaactactattttttgtccatttcactctataagcaattggctcttaactgctgctttaggtcttttttttttttaatgagggcccccgtgctatgtaaaataaacatttgtgtggttgtctcctgtcagtctattaatatcttaaatcaatttaatactagggccatgctgggaccctacagggacgaaggtgaaattttgcctcccctacaattttataaactatcttccactgtcagttgaagtgattccagacaggtaactctaaattggtaggaaagttgtgaattgccctgaatttctgccacatccagcactgtcctgagatttctgatttccttgttattgaagtaaattaaagagactctgaagagctgcagagaaagattttctgatccccaaatttctcttagcagaagtatggaactggttatcattgcctacacaagcccctgagataccacaatggcaaggaaaagacccagagactttaggacctgtgggatttgtctgcagaaccctatttggaatctgattattttgccccttaaccacaaacctaaatctaagtttcaagaactcaattatacttgaaggtcaaagctctgggcaatccaataaatatgcacattaagaacccgatatccctgggttcttaatgtacattagatatgtttgttctttctttctttttgaattgactctacgtctatcctggtttactaaggacagtcacaacttttgtctaaacataattactgataatgctcctttcaccctcagtagtcttctggcttggatcagttaaatagtcccctgtgtatgaaccacttattttctttggtttcttctttccccagtacaacacgaatctgaactctctgccttgccactgcaaccagtttatgatgcaagtcagtaattttcagttctgtggatttactgttacagaattcactctgatccatttgttctaacacagtattttaagcatgagctggagctcctgtggatacaagccacagtaaccattccatcaagtgaatgttaagcttctcttaccagctcttaacaagcgcataagacccacttaataccgtgactagatgggaaataccaaggtgatgacagaggaaactaccttacacataaaactaggaagttgcatgacgatgtatgaatacccagcatacaccatcctgtagtacgtcattgtgaaacgggtcagtggtcagtggtctcgttgtctgaggtgttatccaagcttgttgtctcacaaccaagagaattaaggagtgtggacaccagagtgaggttgaagagaaagtttattatatgaaagaagaaagctttctttctttgccattttgccacttttacagttgaatccaaaagcttttataagaaactcctctcatctctgtagctgtttgtgtaacttacttgtaaagctatctgtgcagctccccttatctgtgcagctgtgggtatgtcttgggtaaggataaagttcagcttctcttgtttgtgtaactgtgggttctaggtaatcaccctctccacccccatgcaagttcccacagagcccaccatgtatgtgcctgaaaaggggaagaaac

SEQ ID NO: 1241343 - DNA, 4001 bp, Homo sapiens
ggcttttccttatcagttttctgtccaaagggcgacaagtgctttggaaacagtgtcctgggagaacagcccagaagggaacagtgcacctaatcaggcttgcccccagagagttcacccagactggtatctaggacaaaacccacaacctcacccccccgccccaggtctcctcaggcaaagccctgaaataatgtttcctttgcaggggactcggaatctggggcaggatgggaatatgaggggacactctccaatgaacttcccgatattcctggggttcagatccgcgtctggatgcgtttctcggattcggctccacacaagcctcagccctccggaccttgcacctcccccgcggatctcctcacccctccacccccaggcccagatctttccttgtcggaatcgccacgcttcctcactcctttacccccgccccactcggctctcctcttcctggtcctcatccggccaggctgccccgccctggtagttcccgagggtcgtccgaggctctcgtccaccaaccgcccccgtctggaagaatgcgcccgctcgagcgcactctcggcgggtgccaaagcctcccgcctcaacaggtgcccctgcctggccacgcacagctctgtcacctggggctcggacggagacggcgacaggatcgccccctgcagggcggctgcggctccgcacgcccccgcccgggtccccagagcgccaagggcccccgcagccccgccgccgcccccgctgtgccacactgcctttgtttccctgcccgcttagatgtcgcgaggctgacttcatgcaagggtatcgccaagttcgggcgctgacactgcccacctacccgtggtggcggaccctaaggttgggagtgagagacgcgtacagtgcgagacctctcctcaacccagagaactccggggaagctgggtgtccgcgccgaagaagcgggttcaagttgacccggctcagaagggggttcgaagccaggcgcagcgcctagagagccttcccctacccacgcccccacccgatgtcctctgcccccagaaggctggagaggggctgcgcactgccacctacgcgctcggctgcgagtggttcccaccgcccgctcgccgcgcgctgggcccggcagccttccggggcacacgaggctcccgcagcccccagactcccggccccggcagcgcagagccgggagagccgccacgttcccagccgcgcgcgcacgccgggcccaccaaacttgcagcactttctcccagcccccaccctctgtcaccctcccttagtcggtgcgccccagccccgccgcccggcagaggttgccataacaacgggcaggaatgctccaacatatacaaagccggcccggcgcagcgggcactcagccctggccgggccccgcgccctcggccgccgcgcagggtctggacgcgcgccgcggctccctagccggccggccgacgctcggggcgtactcacaatgagcgggatggtgcggtcctcgcggagctgctccgacctcctgcctgccctctgcgcgccccggccgccggaggatgctgcgtgggctcggttgtcctgccataagtagtagaaagtgcccaggatccaggctacggtcaggatggcgatggcattggcgcggatcttcctcatggtgggcagacgggcgccccaggtgggggactgggccggcgtgctctcggggccggggcgggggcgctcgcagccccagctgtttgttttcgctcgcgcctagctgctcagtcctgcagagcagaaaaaggagagaggtgggggggcgggggggtgatagggagagacaggatcgcggagcgatcctcacggtcctaatgcccttcagccccgagcgcgcgcgtcccccgggcgcccattcattcgtgcgcagggccggccccgcgctccagccgccgccggctgacccaccaggccactgcgcactgggagagaagcgcgccgagtgggaagcggcgcgggccttcctcccgcgcccgggaacccggcgagacagacgcccgcggcggaatggcgactggccaaagccagcctcggctcccaccgctaggtgaccgaacgcccggcagctgcccccgcgcggccctggtcggtcctgccgacccacacccacccccggaccgagcggccttgagtcaccgactggagacgcgcgacccccgacctgggcccgcgccgcgagctgcagttccgggctgcgctctggcgcgggattcaaggtgtgttcggcgagtccttgtgtaggggcggctgggcgggggagagtcctgagtttgtactggaatctgcagctgagattagccagaccgggcccgcccagaggagggattggaagctggtgcacttgacattcgaagagcgcgaaggggaaacgacgctgcctcacacccagtgctaggagagtgcgggtacggcccttccacatttttcgctggcctggggctcccagatttcacgatgcttccctctatcccgcctcattgacccctggacaaccctgaaatatcatcgtcagcattatttcatcggaaagaagggcagcaagagaggccggatgattctcccaaggccacacagctaattagtgggcagagcccagtctagaagccatctcaccatctgacacctttcgacaaagtgcaaaacgcggtggtgagagacgaggacacagacattaagattccgctccagccctagaggcactgagaatcagaacgtgaactactcttcactccaggcagaaagcaagaggcttggatgagttttaggaaaccagcacagtgtcgggcacagagcgctcaatgaatagatgtgtaacaacaaagtagggatccaacagaggaagaaataatttattgtaaggtggcctttgggaaagctctcagaaaggtggatgaatcacttaagaggtaaggaagggggaggtgaggacaggggagagactgcagaaataggccttgcaaaaatccagaggatggaagagcttgatgtgttcaagagagagagctgccaggcgttgcagggggcctaggatttgataggagttgaggttggccaggctgggtgagtctgaactcaggaggtccttgaatgccggggcagagttgttgaggagtctgcttcctgctggcactgctggacaccatggctactccgaagacccacatagggtccagcctctaaatgaagccatctggggaatcaggcaaactgaagtcacagcatcatgcccccccacaagcatcccatgagcaccaccctgacagatagaagtaaaatcaggtggcttttctccatttctccagcactcgagactgaaccgcacatataatagatgctcaatacatttctgttgaggtgaagaaaccctagttgggtttttgctgaggaaaacccagggtcattactgcaatacgatatcctcactcagaagactaattacgatgacacttagacaagtccaaaagtgacccacgcaggaatgggacctagaaagaagagaatgcacaaagagggcctcacaaagggtctacacaagtagcagggaatttcaggcataaggtgtggcagtcacaacaggggcaggagtctggagacgccagatgctctcccaggtctctctcccctggggagtttaataagactgcgccaggggccagggcttgtttgcatagatggagaaaaccactgccaaacctccatctggtttccgcaggaatcatggggcagatccagcggtgccatttgtgggaggccaggaaagaccttgctccttgggaatcaggctccacaggcctctcaggtcaaccaagaaaatgtaagggaactaccctcctggtgcccccattttcacacatctctcaggtgagccaggtgaaaacttggggagtagccctgttgtcataggctgctcccctcatcccagcctggtctgtgcatctctagtt

SEQ ID NO: 1241344 - DNA, 4001 bp, Homo sapiens
tcattacattgtgaaatatctcacacacacacacacacacacacacacacacacacacacacacaaatttaaagccctagacctccaaagagctgatcccacagaaaactgaaagtttatttttcagtctttgtattttgaaatctcttctgagattccaaacttttgcaattgaggggtaaaaaaaagtgaatttggaaacagaactagaagtcactgccggttttagagtgtagcatcatttccttttggggccccgtctctttcacattctgatttcccacccttcctttggggtgtggaagactgggcaaaaaataactttctttttcccagggtctatttggtggaatcgctctacactccttcagagaaataactggggcagggagattgcctttccagcgcactgtttttctttcaaaaaacagtgaacggtagaatgcttcttagggcaaataaataaatgtcaccaagacacacggaaggtgtagactggaaaataatgtctttggtcccagctgtagaagccagaagctttatttttttaaacacagaccaatactgcttctctggccaacaggcagcaaagtccccattttccactctccatcaccccatcttgcatcctacccacactgattgcatccccaccctctgggtgaaaagccgacacgcctcagacgctaacagcaccgggtcaacccggctttattttagggtgggagggtgcggggatgagactgagtcctggaacccacggagccctccgaatcccggagtagctttactgctttttgcggggttgggggtggggggaggaaacagatttcagcagcaaactcacccaatcaacctcacacctcaaactccggggaagcccgtgcccaaaattgtgccgaattttgtaaatgtcctgaactggagtaaacttgaggtggacaaaaaaaaaagcacaactctaagactccgatcccctggcaaatcagtgggaatgcaggtccccgaggtttcggggaaggatcgcgccgaggcttcaatccagatacacaccctgacaatgggatctcaataaggaactacccaggaagccgtcgccgcagcaagtgcccaggtgatccttatcgtgggcaagtttggaaccgcaggtaccccgagaatcccgcgctgggcgctcaggcgagagggctccgggctcccgtccacgcccacccggggcgttctaggagggctgcgcgctgggagcgggaagggcccctggaaggcggctgcagcgagttccggggctgagaggtcgctgccacccaggaagccccgactgtgccccacgcagggcctcggcagggcggcaggctagggcgggttcggaggtgacagcgcccggcttcctgcgccaaaagtgaggcaactccggaaacttcctggagccggcgcgcgtttcctgcaagcaccgcccccgccgcccgcacgctctagcagcccgcgggcgcactgacctgagatggtctcctggtagcccttggtgaagaactgcatggccgaggccgccctccagggcgtcttgagcagcccttgccgctgggggttctcgcccagcgagctcaggatggacgagtaggcggctgccaggttagggaggttcagctcgttatcctcctcgctgcggggccgctcgcccttccagccgtccgcgggctgcgcgctcttggcctcgggccgcgggggcttctccgccggcctgctgggcccgggccgcggcggatcccgctcggggaacccattgctgcacctggcgccccgcggcttctccgccggtgcccgcacagggcccttctccatggacccgccgcagccgctgccgttcgggaaggaccccggggcgcttcgaggtctgcggctaaactccgccggtggccgcggacaatgggctgtggccggagtcacctgaggaaggtacgcaacctgcttagatcacactccgagccgggagcggccacaggctggaaagcccggccgcgcctcctttttatggcccggcggctcagcctgcgccgcggagcgctcccattggccggccccgcctcgcgtcacggccctcgccgcgcccctcggcctcccgcccccggggtccccagcaggggtcgcggctccggagacgcccggaggggttcgcaagcgcagggagggaaggaaaagggcgccggcccctaggatcaggcgggacccctccacttattgcggaatgagccgaacccgaaaagaggcagtcgtccaggagctgggatctcagtgagaaagacgcggtctgggcgcccagtcgccccctcttcaggccaagagggcgctgcattgaagggctccggtcccctcgccctgtgaaagatcagcaaacaggtggccttgcctggagagagaccgagttaagccaccgattaggaaccaactcttaagctttcaaggcaagagaataatgtgacttcagactcttgggtttagttaaaaacgcacctgccacctaggggccaggtggcaccgctgtcggggcaagtgtcacatcaagtggcccttatgtgggtccctatgtctagaaggataggatttatggttgctagaactttgatcctggaaaaattgatttgcaaacgaagataggactttcacttaaaatccatttccgtcggtggctcacgcctgtactcccggcgcttggggagaccgaggcgggaggatcgcttgaggccaagagttcgagaccagcctggaaaacatagcaagacctcatctctataaaacccatcgcattttctagaaacgcagttgtgcagatttggtgctcaattgttttacagttccatgcaaagcgtctttccccagatgttggtacaaattgtgaaatgctattcaccaactgaactcttaaccagtgacatctgctgtaactgttttctttgagattaataaatggacctttttcctcacttgagggattatctcataatgccgaaggtgagctttaaaacatgtatcaaaataatattttttttctttttttttttttgaggctcacttcatcctccgcctcctgggttcaaacgattctcctgcctcagcctcctgagtagctgggattacaggcacctgccaccatgcccggctaaatttttgtatttttaggagaggtggggttttgccatgttggccaggctggtctcgaactcctgacctcaggtgatccacctgcctcggcctcccaaagtgctgggattacaggtgtgagccaccatgcctggcctaatgtagattttctgacatagaagcaggtattaataggcttaggatcaaacaaaccaatagggaagcctgtggaattattctatgctaacaatgtagcttggtcattataataagtaattagtatttatgatacatctgctctaggcgcagccccgttggaaacattcaggaaagaaatatggacattgcctagccttgtaggcacctttactccaaaatggaagaaatgttcatatcagtggggttatttatttatttatttatttatttatttatttatttttaaattttaatctatttatttaagagcgggttatgagactggctaatttttgtatttttggtagagataaggtttcaccatgttgccaaagctggtctcgaactccagggctcaggattataggcctgagccaccgtacccggcccagtggggtttttaaatagagaatatgaacatcctttggaaaacctctttgtcattttcctctttattaaaatttttaaattttttattgtaggtttttattgggagtggggccctgcaacatttttttcctctaactgtgctgcccactgtctgctgatacctcctggtcagaattatctgctgggtctcaagctatttcaagcatagttgaagacaacattcaaaggatgaccttgcatttaacaaatgaaaacaaagatactaagtgaggtacttt

SEQ ID NO: 1241345 - DNA, 4001 bp, Homo sapiens
gcaggcagatcacttcaggtcaggagtttgagaccagcctggccaacatggtaaaaccacgtctctactaaaaatacaaaaattagtcaggtgtggtggcacacgcctgtaatcctagctactcagggggctgaggcaagagaagctcttgaacctgagaggcagaggttgtgatgagctgagattgtgccactgcactccagcctgggcgaaaaattgagacgcaaaaaaaaaagggggaaaaagagagcccttctatgattcctctacagtagttctgtcatttattgattattatacatgcttattttcttcatagcaataatcacaatatgtaattatttgtttgcttgtttactctctgtcttcctcaggagggtatgtaaactctacaagggtaggaaccttttttgtcttaccctctgttgaattcccaatgcccggcacaacctagttgcttaattaaagatgtgctggataaataaataaatgaaaatgtccagagtgtgcaagtagctataaaagtgtaaggccgggtatggtggctcacacctgtaatcccagcagtttgggaggcagaggtgggcgcatcacgaggtcaggagttcaagaccagactggacaacatggtgaaaccccgtctctactaaaaatacaaaaattagccgggtgtggtggtgggcgcctgtaatcccagctactcgggaggctgaggcacggtaatcgcttgaaaccggaaggcagaggttgcagtgagctgagatcgcaccactgcactgcagcctgggcaacaagagtgaaactgtctcaaaaaaaaaaaaaaaaaaagtgtaagacatctgggtttctattcttaaaaaaagtgaaacttggtcaaattcagaacatgcaaagcacactaagattaaacaccaatccaataactggaaaaagttccttaaaaaataaaggggccaggtgaggtggctcacgcctgtgatcccaacgctttgggtggcagaggagggaggatcacttgaggccaggagttccagaccagctggcaacagagactccctctctataaacaaacaaacaagcaaaaaataaaagataacataagtaacccatttaaagactcctttgaaaggactggataatgtcctgaagtaagatgggcaacactccacaaaggctagagttacagaaagcctctttagaggcagtaaatgccaattgtctttctgaaggaaaaagtacaagcgaatgtctaactttgcacggagtagtcaaatcttacgtcataattgatgctgtcagatactataggaagagcgttagtcttttaattggggggttgggggtaatctccagacggttaataaaactcacagaaatattcacactttgcttccttttcaacttctttgggtcaatttgagctaccacaacatctggacattgagctgcttcgatcctacaaataagtaataaacgcgataaattaaatttctgttgtgctttgctcaggtgtagtaaaacaagcgatccacttccacagttcattgtgaaatcagaaaaaaattcagacttccaattgaggtactaaacaatgtatttctgaaattatctggattgaaaacaaatctaagagcacacatcttgatacgtgcaatcacgttcaacagaaactcgcccacgttaggatgtaatccagaatcctgaatagacctgaactcgcaacagactggaacgggaatagagcaccgagggctgtacccaggggcagggcagaagaccagcccacccgcccagggccgaatcactcactggacccgcctcaggtattcctgaggcgtcctcgggggtaccgagggatcgaaaccttccgtcaagtcgcaaggctctaccggcaatagccgaggcatcaactcttccactgcggactccgctggtacccacgccatggttttcaaaccagccagttccgctcggcgcatgcgcccattctaggtcacagcgcaggcgtactaatagacaccttaggcgcggagctgagcaagtggcagtttagggagcgttaactgcgcatgaacaaattgctgcttgcctcaaggttaaggctccggtggtgtaataaaggatctgagaatttaattcctagctgaattggttcgaacgcgtttctgggacttttaccctctgttttgtcttctaacgctgggtaaaggccgagggttagcaacttttatgcatccctagtagtgagggatccttaaaaatgttttttgaattaatgaacaatattactgtaattatcattcatggagctctaaattcttaaactcttcataaacacattttctcatttgattcttagaacagtcttgtgaagtgggtggtaatataccgctctcttagggcagggactgaccttccaaagaggaagaaccaattccaacctagatttatgcgatgccaaatgaatgaaaaattaattttctacagaaatttctagtgcttgaccacttcaaagatcactgtatgtttatttggaatgaatattactcctagaatagccagcactttttaatttttgttttaaagaaaaatctcttcgtttaaatacaaatagtgaaaaaaatgaaactaatgctaacacccagaaattaacaaaaatgttaggtcaatcttgttaggtagatagtattattatctccatttcataggtgaggaaacaaggcaagaatgtgcaagaaacaagtataatatctgattatttctaaacaaatacaattgagtgaatacaattgacttattttctaacactgatgtttattttagaaggttaaaaatttttatttatggcactgcctttagtttgcaaggaattgatttcaaaccaggatgtaagtctaaattgaagataaagtgaggatagtccttagcttatttaagtacttaatgcttaggaactgtaactaaacaattgggacacttggaaagatatcacctggctgcaaactacagttatttggttaacaaattttcactggttttgggaaaaacagacttagaatagggagaaatactcctgtcgtccaacattttggtgataatcaaggacaaatttgaaaaagtaagtagtgacgtgaggactaaactgaatttttttttttttttttttgagacggagtctcgctctgtcgcccagtctggagtgcagtggcgcaatctcggctcactgcaagctccgcctcccgggttcacgccattctcctgcctcaggctcccgagtagccgccgggactacaggcactcgccaccacgcccggctaatttattgtatttttagtagagacggggtttcaccttgttagccaggatgatgtcgatctcctgacctcgtgatccacccgcctcggcctcccaaagtgctgggattacaggcatgagccaccgcgcccggcctgatttttttattttgcccaaattcctatctaaggggtctggggagtcatgccctacaaatcataaattctcatcagatgggttttatttaaccctatatatcacgatttacttttcaacctcacttcgaaatgacattacgagacaaagaagaaaataaaaatatttgaccccaaaacatgtttctttgccgtattttgaaatggccctgcaaagctgttctttgtggaggaaattttgcatccgtaaagaatcttggccaggcgcagtggctcatgcctgtaatcccaccactttgggaggccgagctgggcacatcacttgaggtcaggagttcgagaccagcctggccaacatggtgaaaccccgtctttggtaaaaatacaaaatactacctgggcatggtggtgggcgcctgtaatcccagctacttgggagcctgaggcaggagaatcgcttgaatccaggaggcggaggtggcagggagcccagattgtgccattgcactccagcctgggcaacaagagcaaaactccatctcaaaaaaataa

SEQ ID NO: 1241346 - DNA, 4001 bp, Homo sapiens
gcacatgataaaactgagcccagtaactggtggcatactagttgacaaggaagacaaaagggtcatgagaataacacatggtaatattacatatacgtggtaatttgaacctgccctctcgactcctcaactcaacatgctttctaggtcccacccaccaccactatcacctacagcaaatggaggatcagttatccccaagagtctttaaggactagataatctgggaaaaaatacatttgaaaaccatcaagtgctaatacgaagccagctaccatttaccgggtgctttctgtgccaggtaaaataatacacactttctataatttttactttggcttcctaacacaaactttgccaaattgtctcattatcctcaaatgcaggtgagtgacttaagttttacacctgattagccacagaagaggatgtcaacccaaagcttttccaaacaccagcctgtctcatcattgtaagcaatgactatgattagtaatttcgaatttagagtaacagagaacctggcacctatttttagcacacaactggcacctctttttagctagggacatgcagggactcagtcactgaaagtctctaactgggatgcaggtatcctaagtcactctctagaaggaaaaggtacagccttcccagttttccaccaaccctgaccatcctggccaaggagcaggcccttgtgcctggcctcttcctcctcccctactcagataagactggcgaatgcacgtggagtacttggaaaagatgcttattagctgcagccttccctctcccggcctaatccatctggtccctggtgccctggccccctgggctccaaggctgagccagtgagttagcccagggcccaggagccagggctgcttcttttccccacaaacctctccaagccctggcccacataaattcagccctgtgcttgagtatctaaagccaaatgtcatgactcttccccgacaacatagatcccgactaaggtcagccgacagctgtcccaaccctttgcttgtagcaaccacagaggatgatgcttgacaccctgagccgtgagccaagcgagatcagcctccgacctcactagcctcaagggcaacctcagccctctccccaccatcgacagccctagaccttacccacgagtaggccaatggcttccaacctccccaaagtgtccgcgaaagtacctatctcacagtgggtccttactatgagtttcctaaccgtgcagagcagtcaggcagcgggccaccctcctccgagtcagtcattgacaaatcgccccgaaacgcctatattagctcgaagtgaggataagtgaacctttaggactttacctactgctcaagttggcaacagtacagagccccagatcctcaagacccagtgaaatcaactacaccctcagcccagactctactccagggcagtactcctcgccctaacccggctcgaaccttcagacagaccccggcggatggagccccgctccccagcccggcgcggcggaacccctcggcctcgtgcagcgatgctcctgggcccggggcggagggcgcctgcccggcacactggcctgaccttgtcggagctccgggtcgtccagcacgttgtaggccgcgtaatcgcggacgccgtgcagccgcaggatctgcaccacggcgttgctgaagccgcactggggctgctccggcgtccccttgaggaagaccaccaccttgtccttcttcaccagcgcgtccaactgctccgccgagccgccgccgcccgcgcccgagcccgccgcccgcacgcccggaccccaaaggccaccgccgcccgcgccgcgcccccagcggagcagagccgccgcagctcggccgagggacccgctcatctccgcacgcaagccggagcccacgacggcccgggcccacagctggccacccagagcgctccccggcccgcggcagtccgacccgccccctggaggccctcattgggccggctctaaactgccctccgtgattggacaatactgatcagtaattactcgattccaccaatcatgttgctcgtcccgcccggcaggtaggaggtgggccttatgccggagcctcatcctactgccttactattggtcgtcggcaaccgctttgttagttaattggagagactggatgtccatcagggtcacgcttgcagggcaacgagaggcaaaacaagagggaagacgactttcctcctgtgagccaatgaggccagctggactacgccgagacaactgggagaggcgcgggactcgcccgttccgcggaacgccgggaaggggtcacctcctgatgaagtttccggttccggtgtcagcggcggttgaattgccatggcaatgcggtgggcgcgcgcttgtcgtgttggtctcttgggaggtagcggggctaggccgggcgggtatccgcctctcccagcttaggtgagcgtccccgggcgcctccggagcgccgcggccgcatgcagttcgtcgtggcggggagccggagcctgaccggggttccagcgctcgggccgtagccttggctcctggactttccctggctccgccgccacgtgggagctgaggctctggggcttccgcctccggcgcgcgattatttctctagaacagttttcatttttaaaatttgtaaagcgcttttgcctgtgtgatttcctctgggttttttttttttttcttcctttttgtagagacggaattggcggcgggggcggggggtcgatgtctcacttttttgcccaggctggtctcgaactcctggcttcaagggatcctcctgcctcggcctcttaaagtgctgggattacaggcgtgagccaccgcccccggccgcctctgagtttccagcctcgttggccctccagccttttaacctgttgggcctaggatcaggaaaggtttgttgaatggggaactaagaagtgaattcgttcgttcgacaaacgtttcctgagcagccgctgggtgctaggcgcagtgccagcgcggaatgtccagggagacctggtgcccaaagcttggacccatcgtgagaaatgagaagcagatacaaagcagtgtgggagtgcagaggagacaaagcaagcctcatcaggcccattgcttgctctgctctcccttgtacttaccagtgcttgacaatatacagttatttactagcttggttattgacttcctacccagcactcagttttattcactgctgtatcctcagtgcctaggacgatgcttggaacgtggtaagtgctcctattggcgggaagaataaatccggaagagcaggaccagtggacttgctacataatctgtagtcttggagccgcacagggttggtggtaccctcgagcacaccagacttgcagaaaaagcatactccagaggaagctgaggcatgcctgctcgagagccagctgttccatgtgcaattttcctctgatagtttctggtcactgttgccacggtgataatgactgggctatgtcattatctatccgccaacagtaagagaagctttgcagtcgagatattgtttagcagatggagtgttttctgttgaacactaagtactgccacaagttacttttttttttttaaactttgagtatttttttacaatgttgctggaggtgatctgtttatgctttgagagtgttcgaatttaaaatcagaaaatcatgtcagtgagtgagtctttcaaataatccttcggcatgaaacctgagcctagtaaactatgaaagtaaactcggcacattacccgaaagtctcaatgtcatattttcacccccatcaatattattgatgattgctcattttctaatgtgggacctgaaatttaccaggtgcttaaagaatctttttgtttttcagattcattgattccaggtaaatcagaggaacaagcaacatgaacagaaatatgtagaaaaagctattatgcagaagc

SEQ ID NO: 1241347 - DNA, 4001 bp, Homo sapiens
ctgaggtggctttgaggagaccaagtggaggaaaagcttcccaggggaatggtaactaaatattgaaatattaatatatagatctggggtcaggcgcggtagctcacgtctgtaatctcaacactttgggaggccggggcaggtggatcacttgaggtcaggagatcgagaccatcctggctaacatggtgaaaccccgtctctactaaaaatacaaaattagggccgggcgcggtggctcacgcctgtaatcccagcactttgggaggccgaggcaggtggatcacgaggtcaggagatcgagaccatcctggctaacacggtgaaaccccgtctgtactaaaaatacaaaaacaaaattagccgggtgtggtggcgggagcctgtagtcccagctactcgggaggctgaggcgggagaacgaacggcgtgaaccagggaggcggagcttgcagtgagcggagatcgcgccactgcactccaaccaacgcgacagagcgagactccatctcaaaacaaacaaacaaaaaaacaaaattagccgggcgtggtggcacatgcctgtaatcccagctacttgggaggctgaggcaggagaactgcttgaacctgggaggcggaggttgcaatgggccgagatcccgccattgcactccagcctgggccacaagagtgaaactccgactcaaagaaaaaaaagtacatacagatctggattggatctcagaagcaaggtcttctgagctgtaaattcacaagtcatctgaatatagatggtaactgaagccatagtttaggatgaagaatacagaatggaaaatgaaggattaggatgaaacctgggactccttcgagcattgtccagggaaaggagaatagtctgaaagggaaacagatggaccaataggagaagtaggaggagctctgtatcccagaagccaaaggggaagaatgaaggaagagaatgcttcaaaaacaagagagtataacactctggaatgcagctaaaaggtcagagaagacgaaaactgaaaagaatccattcgattcagtgaccatgacaagatctattcgatgaaagtgggctgagaattgagtggatggtcacagagagcagtgttttgttgtttctaatgaaatttacccatattttaaaacctaatgggatggatccaaaagatccttgatggcgatttatttaattttccactttatttttatgcttggggtccatcccatgtaagaacagaagccacagcccccagaaccaacaaaactaaagttattgacaattactttaaggcccagtgccaaagctttgggtcgaaaggtttccaactgccataggaaagcaaagataaggagaaatcctctgtaggaagctagggaaaggagcagagagaaagaagctaaggtgaggccgagagaattcaatcggaattcgagtcctcccccaaaacgccgccaggtggaagatgctcggggcccaccaacccctggaacctggccacggccctggcagggaaagcaggaattgagggagccctccgatggggcagacccctttccctccaacctacagctcagaagctgaagccctccaaccagaaggacctggcgtggggcctccccaacccccctgctcgtggccgcaccctagtcccatggcccgctgggcgggtccaccccgggcccagctggaagatgctgccctgaggcgtggtggcggcggcagaggccaagtactctagctatgggcactggccagctgctgggagcggaagcggccgccgagccctcctgggcgctgcccgccgccgccggctccggaaaccgggaaaacccggctggccggctcgcccagccctccggcccccgccctcccagcggcaactcaccattttccttccggccgtcagcggcctgtcgcctacactcgggcgcctttaagaatggcacggcggccgcctcccttcctgccccggcgcctggcccagtcgcccccacctatcaacgcggcctcagcgggccggcacgtgatggcggacggcaaaaggcgcggctcaaaattagacagaatgcgatcgcctgatttttttttttttttttttttttttttttttcttttccctgctccctctagaggaggacgctctgcctggctgcaagtgagaaacaaacccaaggtgcatacttaaaagtcatgccagttctccggacctttttcgcagtcttcaagctctgagagcatgttaatggtgacatcaatgttttcaatggtaaatgtgtgtactgaccgcagcctaccttccaaatttgatctccctcaaatctaggcacacctcctttcctcccaccctctccagaaccccacttctgaccacggctgccttccaggacttggttaatcaatctctctctctctctctctctctttctctctctctccctccccctttccctctctctcttacacacatttcttctctctcacacacacacacatttcttctctcttctctcacacacacacatttcttctctctctctctcgtctcgctctgttgcccaggctggaatgcagtagcacgattatagctcacagcagcctcaaactcctgggttcaagcaatcctcctacctcagcctccccagtagctgggactacagccgtgtgccaccacacacccggctaatttttaaatttttttgtagagatagagtctccctatattgcccaagctggtcttgaactcctggccacaaacagtcttcctgtgtgcctcccaaagcgctgggatcacaggcgtcagccaccatgcccagcctcttttctccatacaagttatttattgaagtatgaatgaatgatgattggtgtttcaatgagcactcttatgggccactgcctaagtaaacatcaagaagtctctgtaccagatgcagacttagtggaacaagtccagttttgaatgcatgaagaaagtggtttgggagaagtaaagtttaggctctaggattcaacaggtaccttcaataaaacaaactgcctggggcagtacctcattttgttatgaccatgggttcttggtctctcaatgcaaattgacctgaggccaaaagagtttctccaggcaaggcttcattggagcttatgccggagcataagggaggcagcataagagaatgagagaattccctgactgactctcctaaaagagcacaacaaattaggggtagtttatgcaggtcagcattatctgtttgccagggttgtcttgagtaatgggccacccaatggtctggtttgcggcaacaaggctgtgaatcaattgttcaacattcctctccaaggtgggacactctcaaccttggttatctcctaaggccagtcattggaattctttaaataaaaggactattagcagtaaggtagtggtgtgggtttgtcatgagtggaaatgcatgaaaaaaatgctctagtgtgggtgagctgaagccaagccccatttctactgtttttcatttccccttataagattttaccttccttattcttaaggagaaagggccaaagatcttatcttctaaagctacttcctgctgaacagggttgtcatccctgcttaaccccggggggcatggaaatctctcaccgactgttctacagacttgaagggacttggaatagttgaagcctggaagacataaactttaacaactgtacccctattgaatataacaaataattattttaaaagccaaatagcacccagtgataactaataaaatgcttaagctcagtttaataatgattgtaggaagagattagatgccatttggaatctaagtgaatagtctcctgttgtctgaaatataaggcaacagacttttaataagaggcatttctatggaaacagaagaaaaacaaacgttaatggttggtataatctatccagatgttagactcaaagcatctttagttacagaggaggaaggca

SEQ ID NO: 1241348 - DNA, 4001 bp, Homo sapiens
actatcaaccttaaagaaatgacaagacattccacaaagacacagcaatcaaaaatagaaaaaggatatgaagtccttaagactaatggagccacaaacaatagcagaattcatcaaccagggctacatggatcaaccagcagagtgcatatgttctcaaagtgcccagataactctctaccttctcagcaacaagtatagaggcaggtaatagtactgacaggagcagcatcttccatttcaaagtgaacaacttgtatataagaaaaacacatcccatttggggcacatcccagaaactcccaggaacctaggacttaaagaagaggaagattaaaaaaagaatggcagaagtattcttttattaatgaattgttcttattaaagaaaattaataagctgcttctcctaggatcttctagttaggatttttgaatgcttaaactgtagtttctggactaaaacagtgaatgcttaatgtggacaatcgcataactgaagggatgcatgtgactgtgagggggtgacctgggtggtgggaaaagttggcaaggtgtacaaactgctaaacaggacaaaagggaaaattctgttcatatatcagaaatatcggagcagaacttagctttgaatctcactaattcagatggccttttgaacttatcagataaagggcttcagtagtggaaaaaaccgtaaatcagagcatcctgactgctaactgccagagaactgactgggcatgggggtggggatgcaaacacctctgcagtcagctgggctaactggacaccaatagggatggggcatgaggaaagccctaccttacagagaaccttggccatctcaaaggtgcccacagtatccatattggcagcaatgatgggaaccccagagtatgtctgctttgagttccgaaatgaaaaggatcttgtgagatccacctgcagatatgaacaggaaattgaccatttcattaatccaaaaaacgtaccatattaggacaaggacaggcatctttcttggttgtggcccaccgggagcgtggggtcaagaaacagcaagtagagaagcttgctcacctcacttcgagacttaagggtactgcgtttgggcctcaaaaggacatccttgaagtccagtttcacatcgttgtcaatatgaggcatggcgcttagcctcggggtagcgatgaatctgagggctggaaggcaggaagtcataaggaccaatcttcccctgggctttaacgccctgttacggctggtggcctctcttcgcttaagttgtggaaggtcgggcaaaggccgaagtgtggtccctgaagcctgtcacctcgacccatcccgtggctgcgattaccctagggctccatcccaggtactgtttgttggggaggagagctgggaaagggttgtgagagaccctgacggtgcattccttaccccgctacacttccttcttctacccctgcaaagagcaatggggcaagaggctgatttaggggaacgaaggaatgttggcgacggggggcggggagggttcataactagtttccggaatagaggtactcacttcctgttgccttggtccaggcggcagttgaccaaagaccaccttgcttagcaactaacctcgtgcaatcccgctaagccttctgggccacgccaacaggttcctctagttgccggcgagaactactagccgacgaattccagcttcggcggcggcagggcgaggccttctggataacagagttcacgcactgaggttgctgttggatccgagggggttagactacaactcccagggggaaacgggcgggaccgcctcctggcacgatgggagatgtagttcgttctgcccccacttttcgctagcccgggctcgccagggactctcagaatcgcagagtcgtcatctctgctgttgctaaactggatgcctcattccaatttacgacgtcactgaaccgaaacgcgggagcaaccctgagcctttccggaacccagtgggggggggggggggggtggagccagacagtgacccggaagtagaagtggcccttgcaggcaagagtgctggagggcggcagcggcgaccggagcggtaggagcagcaatttatccgtgtgcagccccaaactggaaagaagatgctaattaaagtgaaggtgggagcacctccagccttgccaagacgcagtagtactgggctggcagcagtgccttacgggagacgtggggaaggaaaaccacgcctttccctagcctggaggacgctgactgcctcagggctccgcgcgaggggtggtgggaaatagggggacccagaagggctttgagagcggggcccaggtcccacctgacgaccctggggtattttgccatgcctgcttttttgccaggactgtgctatcacccagaatggggtcgcttttgtcgggtctcactgtattcgaacccccgcagtcatagagaaggcctagcagcggcttgactcccccgtctctcagattcttggagtaagcgctgctctccattcttcattcccagggtacctgcttctcccagtccctaacgtaggtcgcctccgagcacagccctaaaatcggggcctcccaagggctagactatgagcctttactggtggttgccaaggtgtggtatctcacccgtcctacaggaaccaaagcggggagtgtgttcagtcagtacctgcctttctgagcctggcatcctggaccagcctcacttccttggctgaggcaggttagttaccgctgccctagttcttgctactagccatggtttccttcatctgcatctctcaactcccgtggtggttcttcaccaatttccagccctcgttagtcctatctgctgtttcctcttttgtgccttcagacagacagagacccccccccccacgcccccctcaaaaaaacaaaactgctgacaagtgaagtctaatgctagtttggcctttttgtagctaagtaaatctatcgttatttcatcagcttcttagcatatttaccgtacataatagtcattcttaaccttctcttccccagtccttccaaactacttcttagctaagatttgaggtctagtattaaaatagtatgttaaagatgattttttttaacgttgagtagcggcctatataagagtcgtaacatcaatttaataggtgaatgggtcactggcgccattaaaaagagaaaataggctgggcgcggtggctcacgcctgtaatcccagcactttggaaggccgaggcaggccgatcgcttgagcccaggagttggagaccatcctgggcaacatggcgaaaccctgcctgtacaataaattcaaaaaattagccaagggtctgggcgcatgcctgtaggcccagctattcgggaggccgagatgggaggattgattgatcctgggatgtcgaagccgcggtgagcagtgatggcaccactgcactccagaccctgcctgaaaaaaaaggccgggcccagtggctcacgcctgtaatcccagcactttgggaggccgaggtgggtggatcacctaaggtgaggagttcaagaccagcctggccaacatggtgaaaccccgcctctactaacaatacaaaaactagccgggcgtggtggtgggcgcctataatcccagctactcggaggctaaggcaggagaatcccttgaacctgggaggcggagattgcagtgagctgagatggcgccattgcactccagcctgggcgacaagagtgaaactccatctccccctgcaaaaaaaaaaaagaaagagagagggggagaaaataggaaataatatagtgctaggtaaggatattgttttatgattttttttttttttttttttgagacagagtctcgctctgtcgcccaggctggagtgcagtggcgccatctcggctcactgcaagcttcgcctcccgggttcatgccattctcctgcctcagcctcccgagtag

SEQ ID NO: 1241349 - DNA, 4001 bp, Homo sapiens
atctagctaaagctggtattgaattctgctttctcaacaactctatcatcaacatactgataagcaaagaaaagtcaccataggataggaagtcagcagatgttggagatatactggcagagtgtggcatgatgagcacatcagattacataccaaacttagaaaaagatgtttgcttgcatccaacctttttattacagtaagacttggctcttatctctaaaacctgatttctttacctctcgtcagcaatactgaaagccaggctccacataaagcatcaagacagtccccaaaaaggttcatgtattacagcacgcctgttaactctgcagtcagagtcaccaattctgaactctactggtcagggcagatggacagtgggcaacagaaagattcctaagcagttactgaatggcaataaaaataaagtaaaaataaaactgcataactatcaaccttaaagaaatgacaagacattccacaaagacacagcaatcaaaaatagaaaaaggatatgaagtccttaagactaatggagccacaaacaatagcagaattcatcaaccagggctacatggatcaaccagcagagtgcatatgttctcaaagtgcccagataactctctaccttctcagcaacaagtatagaggcaggtaatagtactgacaggagcagcatcttccatttcaaagtgaacaacttgtatataagaaaaacacatcccatttggggcacatcccagaaactcccaggaacctaggacttaaagaagaggaagattaaaaaaagaatggcagaagtattcttttattaatgaattgttcttattaaagaaaattaataagctgcttctcctaggatcttctagttaggatttttgaatgcttaaactgtagtttctggactaaaacagtgaatgcttaatgtggacaatcgcataactgaagggatgcatgtgactgtgagggggtgacctgggtggtgggaaaagttggcaaggtgtacaaactgctaaacaggacaaaagggaaaattctgttcatatatcagaaatatcggagcagaacttagctttgaatctcactaattcagatggccttttgaacttatcagataaagggcttcagtagtggaaaaaaccgtaaatcagagcatcctgactgctaactgccagagaactgactgggcatgggggtggggatgcaaacacctctgcagtcagctgggctaactggacaccaatagggatggggcatgaggaaagccctaccttacagagaaccttggccatctcaaaggtgcccacagtatccatattggcagcaatgatgggaaccccagagtatgtctgctttgagttccgaaatgaaaaggatcttgtgagatccacctgcagatatgaacaggaaattgaccatttcattaatccaaaaaacgtaccatattaggacaaggacaggcatctttcttggttgtggcccaccgggagcgtggggtcaagaaacagcaagtagagaagcttgctcacctcacttcgagacttaagggtactgcgtttgggcctcaaaaggacatccttgaagtccagtttcacatcgttgtcaatatgaggcatggcgcttagcctcggggtagcgatgaatctgagggctggaaggcaggaagtcataaggaccaatcttcccctgggctttaacgccctgttacggctggtggcctctcttcgcttaagttgtggaaggtcgggcaaaggccgaagtgtggtccctgaagcctgtcacctcgacccatcccgtggctgcgattaccctagggctccatcccaggtactgtttgttggggaggagagctgggaaagggttgtgagagaccctgacggtgcattccttaccccgctacacttccttcttctacccctgcaaagagcaatggggcaagaggctgatttaggggaacgaaggaatgttggcgacggggggcggggagggttcataactagtttccggaatagaggtactcacttcctgttgccttggtccaggcggcagttgaccaaagaccaccttgcttagcaactaacctcgtgcaatcccgctaagccttctgggccacgccaacaggttcctctagttgccggcgagaactactagccgacgaattccagcttcggcggcggcagggcgaggccttctggataacagagttcacgcactgaggttgctgttggatccgagggggttagactacaactcccagggggaaacgggcgggaccgcctcctggcacgatgggagatgtagttcgttctgcccccacttttcgctagcccgggctcgccagggactctcagaatcgcagagtcgtcatctctgctgttgctaaactggatgcctcattccaatttacgacgtcactgaaccgaaacgcgggagcaaccctgagcctttccggaacccagtgggggggggggggggggtggagccagacagtgacccggaagtagaagtggcccttgcaggcaagagtgctggagggcggcagcggcgaccggagcggtaggagcagcaatttatccgtgtgcagccccaaactggaaagaagatgctaattaaagtgaaggtgggagcacctccagccttgccaagacgcagtagtactgggctggcagcagtgccttacgggagacgtggggaaggaaaaccacgcctttccctagcctggaggacgctgactgcctcagggctccgcgcgaggggtggtgggaaatagggggacccagaagggctttgagagcggggcccaggtcccacctgacgaccctggggtattttgccatgcctgcttttttgccaggactgtgctatcacccagaatggggtcgcttttgtcgggtctcactgtattcgaacccccgcagtcatagagaaggcctagcagcggcttgactcccccgtctctcagattcttggagtaagcgctgctctccattcttcattcccagggtacctgcttctcccagtccctaacgtaggtcgcctccgagcacagccctaaaatcggggcctcccaagggctagactatgagcctttactggtggttgccaaggtgtggtatctcacccgtcctacaggaaccaaagcggggagtgtgttcagtcagtacctgcctttctgagcctggcatcctggaccagcctcacttccttggctgaggcaggttagttaccgctgccctagttcttgctactagccatggtttccttcatctgcatctctcaactcccgtggtggttcttcaccaatttccagccctcgttagtcctatctgctgtttcctcttttgtgccttcagacagacagagacccccccccccacgcccccctcaaaaaaacaaaactgctgacaagtgaagtctaatgctagtttggcctttttgtagctaagtaaatctatcgttatttcatcagcttcttagcatatttaccgtacataatagtcattcttaaccttctcttccccagtccttccaaactacttcttagctaagatttgaggtctagtattaaaatagtatgttaaagatgattttttttaacgttgagtagcggcctatataagagtcgtaacatcaatttaataggtgaatgggtcactggcgccattaaaaagagaaaataggctgggcgcggtggctcacgcctgtaatcccagcactttggaaggccgaggcaggccgatcgcttgagcccaggagttggagaccatcctgggcaacatggcgaaaccctgcctgtacaataaattcaaaaaattagccaagggtctgggcgcatgcctgtaggcccagctattcgggaggccgagatgggaggattgattgatcctgggatgtcgaagccgcggtgagcagtgatggcaccactgcactccagaccctgcctgaaaaaaaaggccgggcccagtggctcacgcctgtaatcccagcactttgggagg

SEQ ID NO: 1241350 - DNA, 4001 bp, Homo sapiens
cttcaaggagttccatggtttcaatactagcagtactttgtctcttaggcatggtgcaggtttactttaatgagcaaaaaacctctgagaaatagactttttttttctttagtagctataaaagcttcccatctctcaaaatgtgctgctactccacagattttgagaagccatatcgatttcataaagatagcattaaaaatagccctatagctcttaacaagtgagaacgatgataaaggaggaggcatatacatacatacactctcaactagcatatttggtatctaagaacctatgtttcaagaatctgtgagtgtcaaaatattgactttttttaaatttttactccactataagcagttttttctctttcttttgaaaaattatctcctttcattatagaaactctagaagaaaaacccttttatcaatgactacttactgcttaactgtactttctgttgaagattaaaaaagcttaattctttaaatcgtgctgcatgagggtattaaactccctaatatatcctgtcagaggaatctcacaatctcagttctcatctgctagacctatttagtgtacttttacatatcattcataaatatgaacaagtcatagacccaggctctcattaagaacatcctttgctcaagaaaatcaaagaataaaaatcatgttctggttttactacttcagtctatctaccagatattcgcgtaaggaaacaacccagctgcacttttttattttgtccctcaccgaggctaacatgcaccttgacctagaggtgaataaaatgcatataaacataaaatccatgcatatgctagtatctgattctggacaagttactggccttaaacccgccacgctcctttgaacaaggatgcaactttaggataagacctactggcaaatgatagctgtgtctgaggttatcctgaaagcagctgcacaagctgagggaggaagacactgttttttaatggtaaatactgcccctcacatacgcaattcaagcctttgttggcaaaatctaagtacaaaagaatttaactcccccaaaagccaaatcacagccattatttttgcaaaacagaagatatcccagtgcaatgtgtaagaaagagaatgcaattaatattttacaccactcactcccctaaaacaaggggactgccgggctccgatgaccagaccacagcttcacagccccagatggatttcgactcagccctggttttcctccgagagaactatacaaacagcttcttgtatttagcatgttggcctgtttagtcatcaaatctaagcactgatgatgaggtttttttaaatcaaatgtgtcataaatgtggttattctcaaagacccttccaaaagaatctaatcatttcccctagtcctgaagcgatgtctctatcatcccttagaaatcggaccttaaaaccacaagcgacggtcgtttttctcaattaaaaacgagcaacatggaaaacgtttcatttaccttagctcccgaggcttggtccgaggagcgtggttttcccctctccggagctgatctgtgcaggcgagctccggcgcagcccagcccagcccagcccagcccagcagtagtaggagttgcccacggagcgcggcggcagcgttgtgagtatgtgtagcagcggctgcagcccagggactagtccccacccagctttgtcttcaatcaacgttctttctacaggaagcagcgcatctcccacttcctcctcttcttggtagctgttagcggcttgcttcttttccctctcatttccatttcagggcttactctggtggttttgtctgctcctgggctgctgacagtgatttgactttaatcccccttctccctttgttcaagtccctctggtgctgtctgttccttccttccccttttctcatccccccacggtcacctccacgacagcttccacacactgctcagtcggcccccttcctggcacactgcctgcttttttagcctgaacctggcttgttgctattgttgttcttgctgttgttgtttctactgctgctgctgtttttttttgggtcaacatcccctggccaggttctggcccccgagatcccacaccagcctccactgttcctcctgatttactgtggtccccatcaagccagctagctgggagcttgcagcttgcagcttgcagcttctcactgcagcatttttctctgtggccaacatttcagaggcttcatttctccaaggtcccactaccactgagatcttacttaacccacatgctcagaaaagaatggccctgataagtattcttatggggcacgggaactaaaccaagttggcaatgctacctataggcctaatagtgaggactattcccaaaagattctcatagatgggaaggaatgaggtggtgctgaatgctgcacattcccaacagagaaactgaatactcctctccccattccacacacactagtagggctgaaggaccctcatgatcctccagtcccttcccttcatcttaggaggtaatatcgtagaacccaccagggtagagcctgcaagctgtctctgtctgccagaatttcaatccaaattgccattaatgactgtatgaacttgggcaaattatttaacatctatgtgcctcagtttcctcatctgcaaaacatagttgatgatagtcatgctctacattggaaatatgaggattaaatgagatggtatacaaggtgctaataatagttctggggatataggacgtattcggcacatattaactcttattatttttagaggatgttgggcctcacattcagcaagtgatttcgccagtcagcagccgaaccctcaccagtacttggttttccaattcctcactattagtatgttcacaattgagcccagatgctttaataacaatttattcaacgtgtgagtcattctccccctagtactaacacaaggtactttggggaagctacagattaaacatgagatgggggaaggggaatcctgttctagtgtccaggcaacattatggagttaaaaacaaaaacaacaacaacaaaaaacacctcttctcaggaatcagtgcctggaaagctaatcttgccaggaaacagttaattccccaactcctcctttttaatccagttttgccttaatcctccagcaagtaaactaacaggaaatgttagaaatctaggactgatggagaataactctccagttgagccttccaaacacatcgtgaggaccacagcacgttaacctagaaggtacagaatttaatttctatgaaatgttctgagacagtcccaaaacaccctttgttttgatttgaacagtttgcttattttttcaaggaaatctttcatcaaaaaggaccctgatgtcaactcactcacacctgaaaattacaaaatggattgatttaagattgaaaatgagcaactagctttgatccaccagcagatagaaatgcagtagtgagagggattgggcatgaatccaccaacatgtgagttatctccaaaccaggaacccttgtgccaaaggttaccaggaacttttaaatgtaaatttaaatatgcatgatgccaagtctaagaaaaatgagaagcatgttattaatggttggaaacaagactatggttaattttagacaagtaggttctggcataaactctagattcaagtacagtaattttttgtgtctttttgtttctaactctctctcaaccatcctccgatggttggtatttatatttaagcctatataggttggtatttatacttaagcctatataggaaaacctctttcaaacaataaaatctctaggaattttgcctgctgccttttaattagttcttccatctctggcccttataaaactcacagtaggttaatcgccagtgttgggaggtgccaacaaaactctatacaaagctaaaaactagattttaagacctctc

SEQ ID NO: 1241351 - DNA, 4001 bp, Homo sapiens
taaataagtaattttatataaataatcttttagcatcttcaggtgcccagatattgcaaaactaggaaatttctgcgaataaaattgcacagttgtgtgaagcggaatctcatcatatcattaggttctttaaagtttttagatgaactttaaacactaatcctccttaagtattcctcagaaccttttctgattaactgctaaattagcaggcgtttagaagacccgtttaagcctaaccctagcccaataatgcctagtgaatgaataacgaataagacttacctgtaggtcacatttcagaaaatccagaaggacaaaaaaaaaaaaaaaaaaaaaaattcccaaactgccacaatatcgcggaaagcatacaccaaattcatttttactagtcatcacatcagttgaatattttttcactcaattgaatattttttaaacaaaacttcaactatttggcgtctgagcctctgtatcaggttggaatacgaatggggagagaggctgctgctagaagcaaccaacggagagcaacaagtaatagacaccggagatgaagattttaaaagtcgatctacaaattttaaaaaatacaatctaaggccaaatctaaaccagcctatgtatttctcaagagctcctggggaaccttctaagtacaggtgaatgggggaggggcggacttcggattcctttatattcattttataacaatttcgataacaagaatccattctgaatctattccgttaaagatttttaacacacctggccatatttattaaattgtgtaactgcatgaatgttcaaaagtattttctgatagtttgacctttacaatctaggcgttattcccagtctaccgatgaggaagctggagcacctggaactcccaagacttgccccttaggtaacacagcaagtaagtgacttggggctagaatcctcgttttcgcatcttgagctcgattaccatcctcaacagaccccaatctttacatcatcataccatacagctagcgctctctcccctatttagcaaatcctgcctaaattaatttcttaagatccattctaggattcgttcatgagggattatcctaacaaaacgaatcctataatcgcccgttcaattttgtatgaaaattttaaattagtttggcttacataaacatcagctcccgcaacagaaatcacagtacagtactcggtatttctaggggtaggagcctaggaaaaagagacaaagaatgtccctctgtaccctggggaaagcgccgacctactcggtgcggaggtggtcttcggagcagctgcctcaatggctccgaccaccgtgggatgcgcccgggaatgggagaagagaaggggcctgggacgttcgtgcccattcaaaaccgatggctgcagagagcgcgaccaactgtctcatttcccacgccaaagtctggggagcgaagttccgaccccagtcccagttccagccctgccaggccaagaccagcgtatggccggaccgctggccatcatccttaacctctgctccaggcgcgcgtgcgttcaacttcctgggaaccgcgctccacaccatgtgcacccagctggcgaggattaacgcccagctcctccacacaacacccccgggggcctggccggggcaccagacacacctgttagataaacctgagggcaggcccgccccagcccccaggacacacggtcctgctctcgcgccccggccccggtccctcctcacccgtagaggccctgcggtcggcgctcctagccaggcgcgtcggactctcccccaccagtgtgcacagcaccggatccggatccggcttcagcgccagccccacctcctcctccaccgcccgcgccacagttgggaaccgcggcccagacgtggcagcgccaacgcctccacctcgcctctgccccctcacgcagggccgcgcgcaggcgagcggaggcggaggccaaggcgccacccgcccaggcccggagagcgaggggcggggcccggagagcgggggcgggaccaggagggcgaggggcggggctcggagagcgggggcgggaccaggagggcgaggggcggggcctgaggctcgagtcgcggcgcctggggcggtggccgccggaccaaagctggcctctcccggctcctcctcctcgctccccaaggcctttcccaccgcgtcattgtctcggtttatctgcagatacgtctacctagcagtcagcccagcagcgtaagtggtgaccagtgtgggcctctttgatcctgagaccgaaggctcggccactggccctctccatttgttccttgttgccctcccttcatgattcaatccattaattaggacttttcctaccagctggcagttcagagctccgcatccccaggcctctgagtcacagttcctgccttcatgaaactaggagttggggccactgcattctactccttcgggactattgtttcatttctcagtccctcaaaccctttattggatgaacatggggttaggacagcggttctccactgcaacagttttgcctcccaggagacatttggcaatgtatgaatcattttcagcctctcatctggggtgagatgtcattggaatctacagatggtggagggcacaggtgagtagaggccgggaatactgcttcacgccttacagtgcgcaggacagcgccgcacaacaaagaattacctggcctgaaatgtctggagtgctgaggtttagaaacctttcgttaggagaagaaaagtgacttttttcagagccccatttctgaagtgtcttacctaagtagcactttgtccctattttaacagatgaggaaacagaggttcagagatgttacataatttacaaaagtctcatagctagtagctccccttccttgccttgtaccataattttcaatttattgaaatcgcaaagtattttattcttaagcaatagtattcaaagaaccccatagatcatataccagaaatcatattttttgctcatttgtgagatttaaatttcagttaactcctttactgatttatgctttctcagaacttcaaacatcagtgagttgatggcatccatatctctgtttttatctctgtttttacacccatacatacaaaagaatatatagggcatgagcagaatgtggtggtatgcatccgtagtcccagctactccagaggctgaggcaggaggatcacttgagcccacaaggttgaatccagcctggacaatagagcaagaccctgtctctaaaaaaaaaaaaaaaaaaaaaaagaatatgtaaggcataaataaaataaacactcatggctgggcgtagtggctcacacctgtaattccaacattttgggaggcctaagcaagtggatctcttgagcccaggagtttgagaccagtctgtgcaacatggtaaaaacctgtctctacaaaaaaaaatactgaaaattaggcaggcatggtggcatgtgcctgtagtcccatctactcaggaggctgaggtaggaggataacctgagcccgggaggcagaggctgctgtgagccatgattgcaagactgcactccagtctgggccacagagcaagaccctgtctcaaaacaaacaaaaatttaaaaaaatgcttatgtacacaccactaatcttaagcatatggccctccccgtttttcttatcagacttctggtcaaatgttttcagtgagtttatcctgtacaacaaactgctgtatgttttataaattagcaaaaagtgaaacataagcaattctaaaatcacagaacacaaggcttgtaagaggtacccccagagatctcatactttccacatatactcctccttacccacattgggccataagaacccaatttctccttaatagacaaggtcgattactctggccagtacagttaacccctttctttgcctgtaggttcacttggcaatgaggagcccaagata

SEQ ID NO: 1241352 - DNA, 4001 bp, Homo sapiens
cactgaagtttgttttaaagtgctaaaacttgaaaaaacgtttccgttaaatacaaaagctatcttaatgttaaactgcagcactattacatataatttaggtgtgcacataatttatctaaagtacatgttcaataattcacatactcaatacctaccatgtgcacattaagctaagtccagaataaaaaccaaaattgcataaccactcattccatacatatatttgagtacttattgtgtgccacaatacatcaaagtaatgatgaagatatagatacagaagggctctataataaagtccacaaccatttctagaatgtgcacgttgttccttttgccaagaactctttcatggttaactttcttgttcttggtcttcactcaaatgtcatttgcttcagagttctcctttccagctaagttaggtcaatcattatctgtacataccctattcttttgcttcacagtccttcatgttttataattacgtatttttttaacatgcttcttgttcttggggaaagtggggcagtggctggataaagattatgtctgttttgctcaccaatgaattcccagagtctagcacacagtaggcactcacaaatactgctgagtggaatttttatatgactgatgctgtacacaggtacacatgtatcttttatcacatgtaattttcacagccacgttatgtggtaaacagcaatatcctttttttaaagcaaatgtggaaagggtttagaaagatcccagagtttagacagcagctcagatactcaagtctaagttaccctagtgccaaacctacttttaacccttgcctccctataccatacagctcaaaatctaaaaaacctcaagaagaaactcatcctttaaatctgttctttacacatgtgactattaaatgcctatgtatttcggagtttataaaaaatcaaatgaaaatggagatgaaatgctctgtaacatacagaacaccatacaggccaggcactgtggctcacgcctgtaatcccaacacactgggaggccgagcggggaggaccacttgaggccaggagtttgagaccagcctgggcaacatggcaagaccctgtctctacaaaaaaagtaataaaaaatcaaaacacgctcattaattctttatatcttgcctcccatttcaaaattaattgggctttaaaacataccatgcaactgctactaatgttgcaattaatgtcgattacctaattaaatacttagatgggccctgggcaaacatctcaaagacacgaaggacttcagaggcacccgtcaattccccagacactgcccaggggcagagagtgcgtgggatggggatgggtctgcaaagggctgcggcagggcctgcttcgaaggccaggcgtcagcacagagggagggaggctggaggtcagtcggtcaggcccagtccgtagagccctggggtctgtcagtttggggaatctcaggtaagcgagcagagacccccactctgctccccacccatctcgttccgtgcgggaagaacggccaggccaggcaggggtcaggagaaaggaagacagaggagggcagtaaacgacgtcggctgaagcccaaggagtctctccagttaccctcctcagcccctaacagggcgaagatgagcgcgacccgaaagaaaacggagagaccagggtctccactgaagggactgcgcccccgctcctaggaccgttaacacccccgtctcgtccagtgggccctcgcctccgcctcacctgaggactccggagaggctgcactacggcctagccgccgtcctgggccgcgccccctcggcggctggcccggagggggcccaagctgagtaaacctcctccccgacccgccggggccctgctaccgcttccgggagacgtggaagggaagcgaggaccccacaacagagtggctttcgagctgcctgcacggcagggagacgcgaacagccacctgcaggcgactcaggcggtggcgctggcggctacggggtcctcgcgcatggccacgccccttttccgcccgcggcgagaacaggcgcggcgcatggcctgcgtgcgtgtgacgtggctcgccgccggtggacggcccgcacgccgtgaaaggccacacccacaaagggcggggccttactgcgggccacgtgggtgaccaaaggcggtgcccagcctggaaggaacgcgaggcctgagttgggcggggcttgagacccgggtggaccggctagacctcgtgtttctccctttcctcaccatctcccctaagttttacagacgagaatgccagaggtccacggcagaaggtggaaataagaaaacatgatccggattgcatggcgcttactttctagtggcagagacagatattacgtaacagtgaatggacaagacaatttcagggcgttaccagagttgtaacgacaagaaaacggggaaaagtgactggaggcacgggaggtactttaaatcaggtggtcagggaaggtctctctgagaagatgatatttgagctgagacccaaaggatggaaaaggcagtattgtggttatgttatgcatacagttcattgactatctgaaataagtctaaaatccacattcactaattcaaatactcagcacccactatgtgtacaggattgggctaacttggccctaatgacaagcctacaacacagttccaagtctcaaatctttgaattgaggaaagtaaggttcaaacagtttaaataacttgtctaagatcatctgtcctaataaggagtccacattactccaaagcctattcctcgtagactcaaagctttattgtctccaaattaaatattggaagtaattacagctcctgcttttattgctctcaggtgaggtttagcccagtacggtgaagagaaaaattttcagcagcaccaggaggtggtaatcataataatggcatctaacatttatcaaaccttttattaagtgtagaatactgtgttaagcattgcatgtgcctcacttcattttaatctcacatgcataaggaaggtactattattctctggtaggtggtattgttgttcctaactattaagttgcttttccagttaaggattacacatcatcgcccgttgccatgcgactgcagtgcatcctgtaggaggagcattctttccagcctcactgatgtcaggcttgattgtatgatcttcttttggcagggggtctttctgagcagtagtattaacagttattacgtatttcaaccagagaaatttttcctttcatgagaatagtctgtgtcagatggggctgctctttcagccttggtcctggaagaaaaaggggatgtgaagcagctcacatttgagatgtcacatgagtgacatataaacttttgctgttataagtcactgagatttaggattgttttttacacagccctacctaataaaatcatactactattaatatattaaaccattttacagatgaagacactgagattcagtgaggtttagttacttgcccatggccacatagaagcaaaagtagaacaactgggattcaaacttgggacagtgtgactctagaaacagtgttttaattgtcgaagggatgagaatgaaataagttgaggaggaaccagtcttccactgtattggacgaaacctgacctgagaggaagaaaagcaggagctgtaattactcccaatatttaatctggagacaaaactttgagtctaagggcacaggcttcggagtaatgtggactccttgttaggactgatgatcttagacaaattacttaacctatttttttgggttttttttgtttgtttgtttggttggttttttgaaatggagtcttgctctgtcgcccatcctagagtgcagtggcgcgatctcggctcactgcaacctctgccttccaggttcaagtgtttctcctgcctcatccccctgagtagctgggactagaggc

SEQ ID NO: 1241353 - DNA, 4001 bp, Homo sapiens
gaggtattgagaatgaatgaaaaactgttctttggcctggggtcactgctgacaatgaccatggcagaaagaaacagaaagacaacttagtgacaccatttaaggaagaatgcagttttcgtgatccaagaaattgtagtgacccaggtttgaagtcagaatggagaagagactaagtttgcgcccattctggtaccaactaccacctggaagctaccaggtatagaaccttatacagtatgtcatatatttttgaataattaacaatttttaagcccctctcctaccctccagaaaataaatgttggtcctagttatgtgcttcagtgccacacaatcacagaaaactaggatacaatagcagctgaaatgacagggatagggtgaagtttctaagatttctggccaaactgctttccaaaatttcttatttttctgttcatcctcaaaccaaacatcacacttcaggggtcacttcagagacaaacatttcaagaaatgacagtagtaggagcaatcttcaaaattcccccttaaggggaaatatttaatttgtacagcatctaattaaatacatattaaatttttagcacttttctcttgcctctatgcccaaagtatttcaagatcagcttaaaattctaagtggtgccactctctgaccatattcccattcattcagttttcactttgcaaagggctttctaaaacctattttcatgctgtgcctatgccaatgaacttaaagacaggaaaacagtcctctggcttatctgccacacctgtaggagcaatagtgacacctacttccaaaactaccatacaaacgaagcttctcaaagtgtccaaaagcacatacatttaaacaagaccaagttcttttaagcattaagaagtggtttatcaacacctgtgaaaagaaggggaaaaaatgggaaaaaaaaaagtggattaaaatgccatgattgaggtttgggagacaactgtccctaagaccaaaataaagaaacaagtgggaacagcatgtcaaaatctacttccctaataaagaattactgctttaaaaactcaggcaacaaaaatacaaaaaacaaaaacaaaagaacaaataaaaacctcaggcagaacagcacaaacttgaacatggaacgaagtcatcaaacaacttgcagtcgaatgcctgtgcagaatcctttcctgcctcaaagcctgtaattccaacagtagtgacaaaagaaccctagaactccccatctccagtcgcggatgcacactctcgagaggacccggcggccaggcacgcacccgggcagagatgaggctgagtcacgcacaggaaggaacgggtagctggtggacagcaagtaagaagagagacaggagcagggtggaagtgaggggcggagtaggaggtgggagaggcaggaggcaactgctcatttgggctcacgaggggcggggatcggctcttctagggcagaaactgccaaaatgcaagtcttggcgactgagctccctccgggatcgggggtcgcaacatggccacatatatgacaaaaactgtgtttcgaaggactctccaccacgccccggcccgtccctgagggctggggcgaccatggctcgggacaccaagccctcaggctgcagcccgccccagagaggcagaaagaagaaaggggaagagggggctgtggccccggagacggcccgacccacatccccagggatggggacaagggccctgaaaagcaaggccccaccaccctcaccctccggccgtctgccgcagccccaagacgcccttagccgctcagccgcggcttggcgctccgatcccctctggtactagcccccaggaccccaacactctcaacccattcctccccctcaccagctgccgcagccacctccaacggccgccgctttttgggccgactctcaccgccggggcttccctctctgacctcatttccggtctgggccggaggggtggggcggtggcgagtgggaggggctggctgcacgattgggcccctgacccagtgcttccgcccgtggccacacccacttccgccccgcggtgggcggagccacaggaagccaggagatggggcaggggacaaggaggggtgttgaatagggtctggccgggaaagggcgtctcaggggttgaggtgccccacgtggggaaagacccctgcatgctggcctcatcttccttaggggcttccagaaattgggcgctaggcagggatgtcagcttatctcttgctttctgacctttttaatgggtctgtgaagttgaggggaaatggatcttaatgacgtctaccctgtgagctggtacaacctttggaagaggttgttttgcactgagttactcagaacatttcaaattgccttgagcaataaaacaagtgatattggattataactcaaagtacaaaagaaatattcatgagcccatgccgatataagtgattgaataaattaacgaatgaggaagaagagataaatcccccacagaagaatctcaaataacttatgtagacagccatcctgcagcataacttctgcctccttaaatgtgggctgtgcatagtgacttccttcccaaaagtacaacatctgtaaaggggaaaatgagtgattttacaggggagaaacctggcaaacagtaattcagccaggtgatcaagactatgtgctaaatcatgttgatagtatgtggaatgatatatgatgagaatggcactttatggtactttccttccaaatctcataacccagtctaattataagaaaaaaaaatcagacaaacccgaattgagggacattctgcagagtgcatgaccagtattcttcaaaattgttaagatcagcaaaggcaagggaagtctaagaaactcagagccaagaggagcctaaggaggcatgacaatgtaatatggtgtcctgggtgtgacgctgcaattgaaaaaagaacattaggtaaaaactaaggaaatctggataaagtatcaactttagttaatcataatgtatcgggccgggtgaggtggctcacgcctgtaatcccagcactttgggaggccgaggcaggcggatcacctgaggttgggggattgagaccatcctggctaacagggtgaaaacctgtctctgctaaaaatacaaaaattacatgggcatggtggcacgtgcctgtaatcccagctactcgggaggctgaggcaggagaatcacttgcacctgggaggcggaggttgcagtgagccaagatcgcaccattgcactccagcctggtctacaagagtgaaactccgtctcaaaataataataataataataacgtatcaatattggttgcaattgtgagatgtgttatacttctgtaagagtgaatagcctggtgtggtggctcacacctgtaattccagcactttgggaggttgaggtgggcggatcacctgaggtcaggatttcgagatcagcctggccaacatggtgaaaccccgtctctactaaaaatacaaaaaattagccaggtgtggtggcacatgcctgtagtcccagtccctactcaggaggctaaggcaagagcatcgcctgagcccaggaggcggaggttgcagtgagcagagatcgagccactgcactccagcctgggcgacagagtgagactcagccgtcacaaaaaaaaaaaaaaaaagtgaataataggagaaagtgtgaattacacagaaactgtaacaatcttcataatttttatctaaacccaaaattatcctaaaataaaaaagtttatttaaaaatatgcacataccttggaccctgaaattttgccccaaagaattgtattctaaggaaaaattggaaatgggcgcaaaaatgttaaatataggtaaatcatctctgcagcatttctgagggagagatgaggaaactagaaaaagccagaagttctacaacaggggttagttaactaaattatggta

SEQ ID NO: 1241354 - DNA, 4001 bp, Homo sapiens
caggtatacagacctaaacagtttttcctgttactgacacagcctcacctcagtgttcctaagattaatgtctttgtttttaagctaaacttcagaaaggtcatatgttctacagttgggaaagttaaattgagacagaacaactcaaagggcagcacaacatggtggttaagaatgagctttggaatcaggcttgattcccagttttggcactgggtgatcttaggcaaattatctaagctcttataacctcaacttcccttctgtaaatacaaatagtggtatccaccatatagtggaattgtgaacattaaataagagtatatgctaagtccatagtacagtgcctggcccatagttgagtgcttaataaatgccaactaatattaacaataatagaatacactggttctcaactgggagtactcaatccacctagggatcacccctggaggcctttgggttgatacaatgaaaagggggtgtgaataatgcagagatgctaaatattctgcaatgcaccataaagaattgtcccatccaaaacaccaatggcatcctcactattaagaaaaagataaccacagattaatattaataacattaaagtatcaagctggggggtatcaatgttcctaggactatctgagatgtaaaaaataaaaagtcaccaaaactacacttacatttttaaacatgtacccattagagacaaatttttctggcttgatcacatctgatgtaagactaatgggactcggtactgttattttcaaagcccaccatgtgttcagacaatttgaatgtcagccataaaaaaataaattcaatataatcaaaccacaagtagcagaaaacagaattatagccaaaaagcatctaaagccatgattcttaatgaggacaggcaacttaatggaacatttataaactccgtatacctggcgctagcatattctctctcacacacacacaccagcctctgctgagacctgagttctaaacaacaatatttatgtataaactgtatggcataataagcagcaaattgttttttaaaataaaattattagttttgcatttgaggtacgcgttttaaacagtttttagaaacaactgtgtttctattacatatagccttcctgacagagggaaatagactcatgaatggtaccttaaaaagctaaactactgattgattcaaggaaggcttcaaagtcaatactagagtggctggtttgaaagaaggtagaacccactaagaccatggatgtgcactttgggaaaaattaaccaggaaaatctttgacttagtaagggagatctcaccattctgacatgttctcatcagagccctgtttttgttcatctgtttcacactccatcctttctttccttcctgttttgcttaggaaagtcctattttctgctgattcacacaatccgtggcctgatgaggtccagggagtattctccttccagcgggacagacgctgcttcttagcagacttgaacctgcagcctctctcatagctccaatctgacaccttcagcttctgctgaaggctagcagccacctctgatgtcactcgcttcaccttccgcctgcgcctgagtggtcgacaaggtgcattttcagtaaaggagtcagattcatgccaagaatgttgcttactcttgacaatggcattgagagctgggtgtcgtttggctaccattgtgtcatcagagtcactaaaattggtcaccggagccacttctcgacagtccttagtggcctcatccagacttgactcagaggcctcgctgtagcagcaggtatgctctgccaggtgagtgaagtcagaacgacgcttccgacctcggcgtttccgaagctgccgcctctgctgtcgggggctcagcgccatctcctcccacagttcaccaagcttattctgctcagatgtctgctccaaggctgaggctaagtcgtgtaccagctcatccatgaggccacatctgccaaaaggaagtttaggaaaaaaagaaagaaagaaaagaaaaagaaaaagaaagcctgaaaaaggatctgttgttttggaataatttgatgaaacagatcatggtagtccacagttctgcctgtctaaacaaaataagtcacctttcatctggctacacttagattctgttcctaccacttccttaagtcactaaaaatagatgttttgtcccttgttaaatgcctgaagtcaacatattcttaagcacaaaaacctactaaccagaagacaactgggacaggacccaaaacaaattcgggggactagatccttctctcttttccccaattaaacttgtcattgaattacctaatgatgagatccagaaagattagagactgtctcactagacaggaacagaaaaacatacaacttcaaaatcacactagagttgtggaaacacagagtagcacatggtctcatcgaggtattgagaatgaatgaaaaactgttctttggcctggggtcactgctgacaatgaccatggcagaaagaaacagaaagacaacttagtgacaccatttaaggaagaatgcagttttcgtgatccaagaaattgtagtgacccaggtttgaagtcagaatggagaagagactaagtttgcgcccattctggtaccaactaccacctggaagctaccaggtatagaaccttatacagtatgtcatatatttttgaataattaacaatttttaagcccctctcctaccctccagaaaataaatgttggtcctagttatgtgcttcagtgccacacaatcacagaaaactaggatacaatagcagctgaaatgacagggatagggtgaagtttctaagatttctggccaaactgctttccaaaatttcttatttttctgttcatcctcaaaccaaacatcacacttcaggggtcacttcagagacaaacatttcaagaaatgacagtagtaggagcaatcttcaaaattcccccttaaggggaaatatttaatttgtacagcatctaattaaatacatattaaatttttagcacttttctcttgcctctatgcccaaagtatttcaagatcagcttaaaattctaagtggtgccactctctgaccatattcccattcattcagttttcactttgcaaagggctttctaaaacctattttcatgctgtgcctatgccaatgaacttaaagacaggaaaacagtcctctggcttatctgccacacctgtaggagcaatagtgacacctacttccaaaactaccatacaaacgaagcttctcaaagtgtccaaaagcacatacatttaaacaagaccaagttcttttaagcattaagaagtggtttatcaacacctgtgaaaagaaggggaaaaaatgggaaaaaaaaaagtggattaaaatgccatgattgaggtttgggagacaactgtccctaagaccaaaataaagaaacaagtgggaacagcatgtcaaaatctacttccctaataaagaattactgctttaaaaactcaggcaacaaaaatacaaaaaacaaaaacaaaagaacaaataaaaacctcaggcagaacagcacaaacttgaacatggaacgaagtcatcaaacaacttgcagtcgaatgcctgtgcagaatcctttcctgcctcaaagcctgtaattccaacagtagtgacaaaagaaccctagaactccccatctccagtcgcggatgcacactctcgagaggacccggcggccaggcacgcacccgggcagagatgaggctgagtcacgcacaggaaggaacgggtagctggtggacagcaagtaagaagagagacaggagcagggtggaagtgaggggcggagtaggaggtgggagaggcaggaggcaactgctcatttgggctcacgaggggcggggatcggctcttctagggcagaaactgccaaaatgcaagtcttggcgactgagctccctccgggatcgggggt

SEQ ID NO: 1241355 - DNA, 4001 bp, Homo sapiens
gtgggcaggcctcagggggaagagcccacagtcactacgtaatgtgatctgctggggtgctgaatagctctcttcctcttcatcactcaaacagctcctcttagcccaataggattttaactttgtttgagagtgttatctccactttaaattaaatgtctctaaaaaggccaggtataattgaatatgaaggaacttaatggatccgtcagtgataaccccagagggctcccagagacttgaggaggaaaagggctgcagaagaggcagtgaaggggtctcacccttcactgggaccaacgctcacccttcagctcagggcctctttcttggaaactggctaatttatccaaaatgaggaaacatagggaggagtttgggtcacaagcttgaaccacagattgattcccagctttacactgacgctctacgtgactttgcagccactctcccttgaatccctccatgtcatctgtaaaacgggtagaacagtacatcttgacctcccagagatgattcccagatacatagacacaatgtaaaccaaattcttaaccttatcaatgctttgttagaggggcaacatcatgtttttcaaatcacttttggaagatgccaatcatagttttgttttggttttttaagtccacaggaaagggcagatgtcccagctctacctcatatcatttaaaaagtgaactcttaagaatcagacccaagctgctggcctagaagacactgtcatctgcacaacttagcaactcacctcccaggtctcacagcgaccccagcaggcatccgtggtgatccgaaggcccctgcagcctggcttcttggccaggaaagtaaactccctcacggcacagcccacaaaggtgcgcaggttcccactggaggcaccgaggacacagccatagccagccagaaggaggagggccatggggccaaggaagaggaatgccagcttcatgctgctcttccggagagggaaaggacagagtttaacagatctggctgccttcaatggcacagccaaccatgcatttgtcactatcaaagggaccttgctcctagcatttcagggaaaatgagcccagaaattgtaaatgcccacaaactccaacacaggcatccagagattcctgtaactggtgccagtgtggattccatggccctctctagatgcccatcctccaagtgcattctcaggcttttccttattgtaacttaactgctgcagttgacttgtgtgttaaagaagtttgtcccagtggtctttccaaaataaacataaaatatgagtaacaccaaaactaatccataatccaacagaatacatgaatacatataaattatttttattcaggtccagggtatttgggtgccatgttacatactttgctcaaaactatattttcagtgtcatgatggggaatgatttggaggggttgataaatattaataatagtattccctatatgcatcgttactaaaccaactcaccactaaacatggatatgcagaagatatcatgaaacctatcacctgagttggtggccattcataaatgtgtcctactcactgtaaattgcttctgctctaggcttccactgcaacagcatctacttatgattcaatttaaatccaaatgatggaaagcataggagttatttaaaacataacctcaatccaccgtcaagtccaccctctctgggtcttggtcattccccgtgctctttccggagccagaatcaacccccttcatgcttggcccactagacagaactcacgtggattttgaagtataaaggatatggcattcatggacctttaccccctactgaattcattattctcacagttcctacttctgaccttactgtagcaagttctctgggcttcccctcctctggaatgaggttacaaatacggagaagcacttacctaatcttgcaggagcccactcttcttttagagctgaaacttgcactaagatttcaggaagtcacaatgaatggtagaagtttgccctgggtaaatgtctctaccttctgttactgggctgcttgattgctcaaatatataggaaaagtcttgtcaatcaaaacaaaagagaggcagatccttacaggaactactaaacacatcaaagccatggaatagaaagccagtctctattttccaaaactgattaacttaaagggtgttgttttgtttctcaacatcacctactgaaatagaaagttaccttggtgggtggcataatcctaaggaaatagtcagaggtagttccacctggttctcaggagaacaaatgcattgtggcagatggattaaattttccttcatggtaaccacaagtttcctttgaaacaggggtaagtgactagcagctcatggcaaaccctttcctttaaccgacaacatgtttcaatgcactgaaaaacaacaaaacgataattcttgctggaaagaacacaggatcactacctgaaaagatggaaatcacagtgagaagaaacatgtcgaaagtcttaaaattagctaagaattagatgatattaataacgccttaaaatgaatcatttaggaaaaaataccacgatgttccaagtgattatcttccagcatgggaattaaagaaaacttttcatttcctttatatggttttcagcatttttcacatgttctacattgggcagacttttgtaataaagagtcagtcaatatcaatgttttaaaattaaaataaaccaaaaggtatgcatttgttctgtctgtaaggacattcagtgctgctctgatagagaagttttacagatttttggtcttaaatgattcaaataagaacaaaatatttttatgagtatgggatatagtttatatttcaatctacaataacagcatatgagtggattaaaaatatacttgttcatggcatttttctgggtgctctaaaaagtaaatgaagcagacatcatctttgcccttaggagttttgatatcatagtaaataatgatgtaggcagagacattgaagatgcacactaactaactagtgaaacaaagtaaagaagttaaaccatttccactttctgcaaagaaaagtgttctttaaataaatgtactgctcattgtagatttcattttcaaaacagataacaatgcccagtgagtccatcaatttaccacccctctctctagagcagaattattatacatgttttatagaatattgaactaggcttggaaaaaggactttcttcagcgcttcagcctgtgagtagcataaccagaactggagtactctggggacggactgctcagctggcctgatcttcctaacttgctggccaagagctggccagtcggcagtgagctgccatcctgggctgtttctgaagacggctgcccaaccctttaagacctgaaacatacacacttgtgtctgcagagtcacacaataaagacagattacaaaggccaagagcatctttctttcacaatccccaagttctttataatgcagagatgtggcatcatgcattccaccctgtcagcattaactttataaaaatgacaatttggccgggcgcggtggctcacgcctgtaatcccagcactttgggaggccgaggcgggcggatcacgaggtcaggagatcgagaccatcccggctaaaacagtgaaaccccgtctctactaaaactacaaaaaatagccgggcgtagtggcgggcgcctgtagtcctagctacttgggaggctgaggcaggagaatggcgtgaacccgggaggcggagcttgcagtgagccgagatccgccactgcactccagcctgggcgacagagcgagactccgtctcaaaaaaaaaaaaaaaaaaaaaaaaaaaaaaaaaaaaaaaccgacaatttatagtcactaagcatctactatggtaccatggaatctgctgtgctcttacatatgttatctctagaccttacaacaattctttatgt

SEQ ID NO: 1241356 - DNA, 4001 bp, Homo sapiens
ctcaccagcctcgggacgctctaccggggtgggggttcccagaaaggagggggagaggagcccgagtaggggaatcctgccctctcaagtaaaaagctggatccccggcagcaggctgcagcccgtcctcgctaaggaaacgacgaggcagacagagggccttttgcgcggaaaggcagaaggcagacactttccgaggtccggacgcaagccgatcccccatcccccgagggaggcgaagggtgccccatgggtggctgaggggacgcccggcccgcgagggacaacccgaggaggagcagtttcatctgattaacacctgagtctcgtccaggcaagcacagatactggcgtggggccgcccaggtggggggaagggaaggagaggaagggggtggagatgggattcccccctctctctgaagagcactagcggaggatgcgcccaggccagccgagagcggcatgcttcagactgcggagccgggatcccgccgcctgcaccgacagcgcggagccccgcagcgccctccgcaccggcccctcggtccccgggggcccaggactttgcttccgaaggcgctggggcctaacatcccacggggtcgaccccggctcctggggcctgggggaggggacccgcgggaacacccccaatctccggcggttctcagcggttgtaaaatgcacccccgcggttcccttcttcagccttccctcctcccgaggccgcagagaagggccaccacaggcgaaaagcctaaggcaatgcagggacagcagcctcataggtcccagacctcctcccccggttacctgtaaggactccgacacggatttgatggtcgtggttagtaaggatcattccctcggtcgccatgtttcccagcgcagtcaccgcactgacaggagccgggagaaaccggagcccggagcgcgcgggccgggagcgcgctcgccgaggagagcgcgacagctagggagccagagaagcgcgaggagagcggggaaggagggggaggccacagagtgcacggtggcctgcgtgggggagaggccgcgccgggagtgcgcgggtccgcgggaggggaaggagtcagggcgcgcggccccaagtccggcaagaaggaggcaagcttggggggcgcggtggccgcacggggagagcgcgcggaggcggcagaacgaggccggagagtgtcggaacgctctgcggagcgcgagacccaaggcagctagatggcaggactgagaggaaaggatagcacacgctctggaggttgcgggggcggactcggggacaagggcggagctacacccctaggcgtggaactcgtggagagtgaggggaggagtgagagctcgggtgctgagtattgggagcgggaaggagccggcccagcctgagtaggaccgcggatcgctcctgggcgcgcgagtagcaccggattggctgagtgaacgcggagcgtgtgcgcgcgaggcacgaacgcaacctcggccgggccccagacagaagcaatcccctgccgagcctgacacctcgttggttgtccgcgccttaggctggctctcgccggcgggccggctttctacgcgggggcagcgaggctggctcagcaccccgggcctcctcttgcaaccctcgggaatggccggccgccccactgaaagcgctggggaaccgagaggtgtcttagaaagctgcatgagtggcagaacggtggctactatgacagagaggccgccgtgggcgaagagggaggtatcctgtcctgcctcgtgctagccgctggcttcctcagtgggctctccctgaaggaggatttccgcttcacctatgctttaggattccatctccagtcagtgcctgcaagacgatcctcacgtgcgaaactgaggagtctgaggcagggcagctggagtggagatacctggcttctcttcctcctgctgtcccacggttttgtggccttaagcctcttcgccatgagcgctgcttttagatgaaaagcatcaatctccttagcgaacgagaacgtgttccacctgaaccacagtccattgccgcggcgattttcatttcagtattcgtgggatgtgagattaccatgaaagtagcttttgttgccatttatttccatgtgcctttcatgaaacgtgttattaatcacctgtggctattctacgttagtttcttactatcgttctggacctttcaacttctgaattttaaaaagttatatgcgtgtgtgtgtgtgtacacacactcatatgtatatgttttctcttcttagctgtagtaacctggaggcataaaagtgaaaagcaaagtattaaaagatgtatatcagtgtttatacacaaatttcaaagtcactttgataggtttttttttggttttggttttggttttttttgatccggagtctcgctctgtcgccaggctccagtgcagtggcgcgatctcggctcacttgcaacctctgcctcccaggttcaagcgattctcctgcgtcagcctcccgagtagctggaactacaggcgcgtgccacgacacccagctaatttttgtattattagtagagacggggtttcaccatgttggccaggatagtctcgatcaagatcttgacctcgtgacccgcccgccttggcctcccaaagtgctgggattacaggtgtgagccaccgtgcctggccgattatgagttttttattgttccgttggaacatgaaattacccatcctctgaagattcacgtgcttatgtatttcattttaaataatggggcctaaaagtagatgatggatggaattgaagtgggtaaaataaattaatggcttttttgcttttgtttttgtttttagtatgtgtattgctggtatttttgacagtaattaaaaatttaagccaggtcatgaactcattccctatcattgtcaccttagatcctggtggccaacgggttgttaactagtttgaaatgagagataaagataagaaagtatgtccaagagaatgatttccgttatctcaaactaaacatgaagagcaaatagttggttatattgttatcttcctaacctatctctattctctgcaacacactctaaatgattagaaaatatcttgagcttatcgtctgtcttacatctatcttagacgtaaggtctaaacctgcccactaacaggttgtgaccctaaacaaatttgggccttttccttcatcctttaaataagatggtagactaaataagtaccttttaagtatagtggtagactaaataagcactcctttaattagaatattctgtaattattcatggaagaaaactggcactttatttcacaaatcaataataagaggacaagagactaactttctgcattcataaaaggggtgatggttaaattcattaaaatttaagtgggaagggtggatatgaattaaattttctaaagcagcagtccccaacatttttggcaccagggatctgttttgtggaagacaatttttccatggatggagatggggagggttgatggtttcgggatgaagctgttctagaaaactgcagatcataaggtattagattctgataagaagccacaacctaaatcccacgcatccgcagttcacaatagggttcatgctcctatgacaatctaatgcagccactgatctgacaggaggcggagctcaggcagtaatggttactgcctgctgtgtggcctggttcctaataggccacagatgggtacctgtccatggcccagagtttggggacccctgttctaaagtatatggaggtttattaacattcattatgttttactgactgtaagtattaaaattcctaaaaaataataatggaactaaattataatgcttgtctttcaaccgtttttcttaagtgtattcatctttctcaaattcagcaaccttttacaaaccttacaaaggaaaaacgcagtgactttactgtctagagtgaa

SEQ ID NO: 1241357 - DNA, 4001 bp, Homo sapiens
atttttagtagagaaggggtttcgccatattggtcaggctggtcttgaactcctgacctcaggtgatccgcccgcctcggcctcctaaagtgctgggattacaggtgtgagccaccacgcccagcctgttttgtaacttatgatggaacttttcagacagacacaaaaggacagagaaggagccctggcccctgccatgtgcagggagcagttcctcattccagcccatttgtcaaaaacagctcctcaggctgctgaggtctgtcttgtggactatctgtaatttctttctttctttttttttttgagacagagtttcgctctcgttgcccaggctggagtgcaatggcacgatctcggctcaccacaacctccacctcctgggttcaagtgagtctcctgcctcagcctcccaagtaaatgggattacaggcgtgtgccaccacgcccggctaattttgtatttttagtagagacagggtttcaccatattggttacgctggtctcgaactcctgacctcaggtgatccacctgccttggcctcccaaagtgctgggattacaggcgtaagccaccgcacctggctggattgcctgtaatttctaagctgtttcacggttgctggccattcctagccatttccgtcttttactcccacctgctttggcaccaggcaaacctatgacctcttttctgccgtcacgtttgagacaaaccctagggagggaaatgtggagtcaccagctccaacctccctgctccaccacacccatccaaagcccattgtcaactttcttatttttcccaatttgatagtgttgcccaggctagagtgcaatggcgcgatctcggctcactgcaagctccgcctctcaggttcaagcgattctcctgcctcggcctcccaagtagctgggattacagacgtgtgccaacacgcccggctaatttttgtatttttagtagagacagggtatcaccatgttggtcaggctggtctcaaactcctgacctcaagtgatccgcccacctcggcctcccaaagtgctgggattacaggcatgaaccaccgtgcccagcccctatcctcatcttcttccaggagcctctgctctcccacctcggcctggccaatctcctgaaatatcattttgtgctcagcccaactggccagtcttcagtggtcagtcccagtcccttgcagtggtacagacccacgtcatgcacttgacagaaggtattgggccccccgccccgctgtgcctggtgcgccgaacgccactccaaaggccggtgacctgcccagctccaggatcttgtcacgtgactgggccaactgccactcaccgcagcacagcccccactgccctgcttttccctctgtgtaaccccacaagcagcacaggccccacagagagaagcccagcccttcagtgccccccgaccaatcacggaagcaagtggccaaggagagattccagggacaaagtccagccccctgactcacccccatctggaccagtagccagggaagccttttccagaagaaagtctccaggaaggtggcggtgacaaagatacaatggaaactgttgtccctctcccccaaatcctccggccccatcacatctgtggtcactgggggtcctgggttctctcgggagggaccccagattaagaaccctcaacaaagcctccatctttaccaacaaatcacctttgccttcagatccccctctgcccgcctccagctcccagcccccagccccatcccagagcctggccccccaggcccactccccagcacgcagagcccagcgacttacccagggccccgcctgcgtggctagcctcgcacccctccctgcagtcctagctgaggtttcaggaagtagcaggggtctaattatgttctgtctagaactcccctaaccacaaacagggctgagctaggggttagccaaccgggctggggtatcttactggtgatgacagcatggcctcgtcaccttcctgagggagggagtggcaggaaaccccagtcttacctcttttagcaatagcagcactcagagccaggctccactcactcaggagctcccaggcaggtgctggggcctggcgcggcacagcggctgtccgtgtgtccccagacaggcaaggcaggacaggggtcctggaaaggctgcagggaggggtcctggaaagacaaaatccagctcctctgcagctcaggcctggtgttgcccactctcgggccaggcaagcacggagcagggtgacttcccagaggctgtgtcctcccaggagtccctgtccggggtgccaggagtagagaggctgagtgcgcccactgcagccccgggaccaggatggcacctgcatgtcctggaaggctcggcacagccactgcacacaagcaccctcccctccccgcctccctcttcctacatggggcagggccgtgtgggaagaacagcctactgcacactccacattcctcccccagccctacctcaacccctcctgcatccagaaccaagcctggcctggcccaggagccctgcgggtgggcttctctgtgaggggccctgtgggaactggagggtgggcaggcagggttgcctgggacagtccccctcactgtggggcttccggccatgatgggcccagtttccttggacaaagccagctggctgtggacagcacctacaactccactcacctccaggctgcttctgagtttcagggcacagacccaccctggtgcccactcccgagcctgccaagctccatccaagccaggctctttcagcagtggggacagggccgggctgagggaaggagctggggaccacaaatgtctccaagcgacactgcccagcaccgcagcagggacggtcactgagcgaagaagccgccatcctgggtgggtacacccacggccaggagaggccggtggaggccgagcccccagtctacactttcccccagacacgtggatcacagctgccccctgctgcagggccgcatggctggaggctgcctccgaacagcgatttcagagggttttgtgtgggtggcagtggagtccctggaaagctgggctttcccattgccctggcggggaggcgcaggtctcagggcagggcctaccttggctttccagaaacacttgcccaggggacagtgatcctctaggggatctggtgcaaacacacgcctccacaggccactgctcatggggtcactggcctcccgggtctttgggccagggcagccccaccctcggagcagcaatagacgaagcccacatcaggccagtgggggtgatggccagggacagctgtgggttcctgtcgctggccccagcagcctcctaggacctgccccgtcctgcgccccactgggtggtctgtcacgttcaccaggcctcctctgcgcccccggtgaggggtccaggagtgacatgcggacccggctcaggccattgtcaccctccatgccttctggcctttgccaggcagtccgggaatagccgattcaagtgaggtcagttgaatcctctctttgggtccttcactggggtctgggaaaggaaagttgggtcccttgggtggcaggagctgtgggtatgaactggggggttggcagccgtgtaccggctcccctgcccctgccaggtggagaagccaggctggggtggagggcaggcaggagcctgggagtccaaacactgacagcctgggggtgtggactggccctgcctattcccaccgggccttcgggaccagtggaggctgccccgggctgtgcggcacctggggtgttgtctctgagaagcccgtcagggagatggctctccctgctctgaccccagcaaagcgattcatacccagagaatccctcaccaacaggagagcaggtttcagacaggaagtcacccgaacatcccacggctgagtcacgtgccagaacagctccctgcggcccagacac

SEQ ID NO: 1241358 - DNA, 4001 bp, Homo sapiens
ggggctttcaagcagctctgaaggtctccattcattcctgaaattctgtgtagttgaacaatactggttgcattcaatgttttgtttgtttcacagtgtggtcctataatatgagcttttcagttatagtgaatgttatttttgtcatttttggcacttacagttcacaatgcttggttatgtggtttaagattgttttaatttttgcattttacattccttttggcacttttgaagaagggacattgtcttttatgttgtttggggaaagtggtaagcctcccccgtctctagctttaaatgtttggctttatgaaatccacaactctcccccagaatcttccatcattaaataatgcgagtggaaatttgccttcataagctggccattccaaccgtcttagaggctggtatccccagcttcggatttaggctgtttggtcactgccgtcaccggctctggtggtccctctcggcagaaaagtacaactggatttttgcgggcccacatggccacgtcccctgccactccgctggccgggttggaagaggacatcctgttgcaggcccccagccggttggcatagcggtttcgaaggcgactgcggcttctggcttgcagacccgggccctggctgggcaggaaagcgtccacattcctagtccggtagccctcctcgcggttgcgccctaggagcatcgaaatgttgggattgcggatggcgtagatgacagggttgatggccccattggcccaggtcagccagacggccaccacgctgaggagcgagggggcctgcatggtctgggcctgccgggcggcggccagcagcaccaggaagcagtagggcccccagcagcagatgacgaagacgatcatgatgaggacggtggtggccgtgcgcacctcgctgaagaagcgcagcacgcgcgcgtaggtgttcaccggccgcacgcgcacgtccgacaggcgcaccgtcttgcagatgtggtagtggcagaagcacatgagcaggaagggcagcaggtagcaggccaccaccagccccacgctgaaggccgcgcccagctgcgcggggtccggggaggtccggtagaggcagccgtggaagctctgcgccgccgcgagttcccggggcgccccgagcagctcccagggcaaggagaagcccagggccgtcagccaggcgcccgccagcagctgcagcgcgcggcggcggccgatcttctcccgcggcggccgcacgatagcgcagtaacggtccaacgagatgagcgccacgctgagcgtggacacgatgccgaagcacgagctgaagaagcggctggcggcgcagaagccgcgccagggccccgcggcggcggcaggcgccgaacccccgggcggagtgaagaggtccaggaaggcggcgggcaggcagagcagcgccgtgagcagatccgatagggacagcgacaggatgaaggcgttggtgacggtgcggagctgccggtgcttcacaatcacccccatcaccgcgcagttgccaaggctagacagcaggaagatgagcaggaggacgagcgcctgggccgccactgcagctccgtgcgacagcagcggcgccgcctccgggcctagcggccgcctcaccgccgcccccgcctcccgcgctgccccggacccgccaaggccgccgccaccgggagcggcagctgtgccgcctccgcttgcgtcgctcaggttccccagcgccgcggtcgccacggtgctgaaggagagcacggccgccgtggccgcggaggaagtcccgccaggtgggccggccgcggagggggcgccggagtgctggctgcccagtaaggccatgctcgctggtgggcggggcggctgcggctcctccatggggcccagtggcggccgcggatctcctcatcccgcaccgggggcggcggccgctaggtcggagtggtggctcggggccgggggctagcggccgccgcggggagctgggctcggccggaggggtggcggtcgctggggacctggcggagcctttgacgtgggttccagcgttgccgagggaaccgcgtgtttacgcaggagcgcggggcgggacggcagcccagtacccgctgcaaagccgacccgcgacaccgccactccggaggttaccggcccgggtgttcgggtttccgagagtgccaggtcgacctcctgagggaccaatgtccggccagataaagtgccgactggcatgcaaacaaatgaccagattcaacgaaagttcactcttgctctcttttgtagggtacaaatgttctacaggcaggccttttggggagtggtggggggggcactctgcttcctgtgggtgcttttggtatatacaggtaggaaaggaatctagaaagtgaagtgaaagaaaaatccagaagtctacatccagacatcttaaacttgagaagcagactaatttaaaccagtaattctcaaacttgagctaacagaattcacatagagggcgtgttaaaatacaagtgacgaggtctgaaccccagcgtttcgaatatgtctggggaagtacccaagaatttgtatctctaacgggttcgcgggtggtgatgatgatgctggtcccaggaccacacttacagaagcactgatgtcaagagtttcataaaatgcagattcccaggctgacagaattactaaggatgggcccatgactctaaaccccgtaggtgattctgatacaggtgctctgaggagctaggatagttcctttagatgttacttcatttccaagggcctggacctcaggcccctactggctgataaatggggggagagggattggtgccttgccctgctagcagccttcatctgttctcaggaatggggtatgttttgagtctaaggtgctgccagcctggcaatcaccacagatgcagctccaggtacctggctgggagatacggggaaaagaaaggcagggctacccagggaagttgcatctcaagtttctgggcatggcctctaatggggaaaagtgtgataaaccctcaggttaactaaccctgggctcttcgctaaagcagtggttcacagagtatggacattggaccagcagcatcaacatcccctggaaaccttgagaaatacaaattatcaggcctacagtgcataggatacccctgatctactgaaactcctgtggtggggcccaggcacctatgttttaacaagccctcccagtgattctgatgcacaaatttgagaaacactgctctaaagaatgactagtatatttgtagatcttagaatcaatggtattagtattggagtgcttatttcattcagaaaaaatatcctacaggaaatttacagtataaatagaagaacgtttaaggtggcaaaccaaaactgggtttgtcagcctaagcgtcatggacttttgggccagataattctttattgcaggggccatctatacattgtatgatgttcagcagcatccctagttcctacctacgagatgccagtagcacctctcccagctgtgacaactaaaactgtcttcagatattgccaaatatcctcttgggagcagtcaatgccagcttaatctagactgattttgtcttaattttgtcaatcaaagcaaaaatataattatcatacattaatttatttggcaaacacaatcttctcagattgtgcttagttttaggaaacaacatataagataggaaacccagcccaaataagcttaagccaccggccaacacagtatattacagtgtgctaaatattgtcttaaaaatatgtgagtgaaattatttgtcttcctgacaaagactttgtacaagaggtgacattagactttttaaaaaaagaagaaagggaaagaacatttgatgaatgtgcaaagtctggaggttagtgttgaagtgagcagtgtctgaattctaggatattggagatggggagtgaagaaggaaataaatgatcaaagttt

SEQ ID NO: 1241359 - DNA, 4001 bp, Homo sapiens
tgaacctggagtaaaagcttcagcgttgagaagtcactaacgcactatctgaaatggtggcaggaagattacaatgtatcagtttaagtataaagggtagaagtgttataacagcttaaacgacaactagattagaacaccctcaaataagtgacacgactatggcatcatttgatttgtgataacctatgcttcttatttccgcttactggtttgcgtttttgtcattgtattgtttggactttcaaaggatggagaaggaaaataataaaagttaaattagttttgttgttttcaactattgtttttagtgtgctaaatagctgacattatgactgattataaaattatgcattctacttcctattaaaggagaaaagagttggtttatgcaggaaatataaacacttaatatacgtcattttttttttttttacttttgcttggaactacattaattccatcacctccaaaaaagcctttgagaggattagctgcataggccaatattattctatattagtctgtattaagcatatgatgtcaccttgcttcctcccctcctcaagcttttcttttggtgggaaggaggacttttttgggggaaagtcttaaaatattatggcttaaataccacaagctgacacacatgattgacaaccttacactcccaaacctgtttgaaatgggtcaaatacctaagcgctgcagaacaatgcaatccaaccagcaattccccataaaagagaaagggggtgtgattaggttccagatattaagcaagttattgcaaaaacagtttggtggttttgtttctgcaataggcacaggttaagctagtatttttttctcttaattagctccaaaaaagactatgctaataggaggtaggataaaccgctaaagcacgaagcaactggggcaaacattaagggctttatggaggtccttatcctgatcctcagcattggttattgatcatcaaccctgctggggaactatcgaacgaaatttatgtgaggcttatcgagccacaggaaaggagatgcaggagggaatataagcttctaataaaagaaacgcagcaacaatagcagaggaacagctctgcctggtgacgtaatggctggcagcagtccagcttcagcagagctgctgctacctcagcatccaacctccctcaacacagtccggcttcggcagagccaccggggctgctacttcttgcgatgccactttgttggtgccaccaacgccttacctcggagggccagaacaccgaacaaagggttcgttccgttgctgttttaagttgtcagacacacacactcactcactcaccccctagcccgaacccctcagtaatcaagccaatcagccacttaagtttaaggcgaaaacactggctcacactccaggtgtgcctcagtttccccaggctggtttccagtccgcctctcgctgcccaccccccgcccccgctggtcctcagcgggagttgatcccggcggccccgcgcacccgcccgggccccgcatgccggccctcccgccttacctccgccaggtagaggttgaggagacagagcgtggagaactggagacaggaggggaagcagtagagcagccagtgggggaagaagtgcaggtgagcgggcggccggagcaagggcagggagccgctgagcgagaaggcggcggagaagagggtggtcctgagcgctgcccacaggagacagaggaagaggcagaggctctggtaactcagccgccgctcgcggtacaggagcagccgccacagctgcaggtaggcaaaggcgaacagcgcggcgtagagcagggcgtgcaggacgctcagcgccaactgcacggagcccggcaccgcggcgcctgaggctgcagcgacggcgcctccgcctccgctgcccccgccgggcgtggagggctcgcggccggctgcgggggcggcagcggccgccggacccggcacggacaccctcatgagggggctgggggccgggcgagcgagcgcgggaaggaaggggctggactcggagccgccgtcgaaggggagaaggactgcccccttaccccccacccaccccagcctctaaccccaggaagcgccgtgacgggacccggagtccagcgcaaagcagccgcggctcccccggaccccgcctcctctttccccccaccccccgggggtctcggctcctcctgctgcggctcggctccgtagctgcaaaaaacaactctcggctggagacaatcagctgagaaacccgagcatttgaggcgctcgctccgcactgtgggctcgcgccgattggcccaggcaggcacgccccctgagcgccgcgctcggaaggccacgggccgcaggacccgtcgctcgagggccccgagatctgattgggcgcgtaatttccctactttctcccgcccctgtacttcccacccacgctgctgattggccctgctactgcaccgcccgttcgcgccggcgggaggactctgtaatcgtctgtcactctcgctccgcccaccacgtttcccattggttagagagtgcctcgcgtagggagcacgaggagaaggaggagcttcgcaggttgttttttcccaggaggccgactccgccgagtcggtggcggctgcaggctgggagggagaagtgctacgcctttgcaggttggcgaagtggttccaggctacccggctagtctggcacggccccgtcttctgcctcctcctccgtcgcgtggcggcgggaactgttggccgcgcggcctcgggaacggcccaggtccccgcccgcaggtcccgggcaggtaggtgacagcgctggcccttcaggctgtgggctctgcctgcagacccggggattcagacgaagcagctttctgtagccagggctgcactgcacagctccggagtctgacttaagacacccgtctctggggcaccgaagggcctcacctggagcctcctgagggcattttgctttctcttttcgctgcatgaacggcgggaaacaccggagccctttgtgggtcgaggggatggaaaggggcgacggggagaatcggagctcttaagtgaaagaccctttcctcccaaggccaagggaaatgtctcttaaggaagagtagtagtagtatcagatggatgttgaagcgatctgtgagcagggggaagctggttctttcaaacgtagaatttgggaagatgctctgggcttaagttttgggaaaaaggcagaaacagacttgtaagtatgatgattgcctggagaggaagtagaatattctgtactgtttaaattccacatgtatcgaagccttggacctgtgtatggtagatggtggcgctattcctgggcctgagagagaaaatacatgctgtgttactgctgtgaagaaccgaggaataatcagatcgactaacgtatattgggccggcacatagttgttgacttttttttttcctatttggaaataagattagcaagtagtgcaaaattaaaaggaaataatttgttttctttagaatacacagcacattacgaattcagtatccttgtgaaagacattgctacgtttattggagcaacaaagacccagcttttcttacctcaccatcctttgtcctatgcttttttttttttttttcctttttttcatgcagggtctcgctctgtcgcccaggctgtagtgacagttcactacaaacctccacctcctgggcacaagcagtcctcccacctcagcctcccaagtagctgggactacaggcactggagccaccatgcccggctgattttttttttttttttggtagagacgaggtttcactatattgtccaggctggcctttgtcatatgctttgcccaagaagagtgttgctgtcttttttcctagctaagtattccacagggaactttaaagtctattttgtagattctgggacagtcgtttgtccaggtaccagatgctagt

SEQ ID NO: 1241360 - DNA, 4001 bp, Homo sapiens
tggaaaatagctgttataacagagtcatatcagcaaattggttttagataaattggataaagcaatggaaattactaatgatgcttttttcctcactaaacaaaaacattctaagaatatatacagagaagtaagataattgctatttattttatttttgtttattttttagagacagggtctctctctgtcacccaggctggagtgcagtggcacgatcctagctcactgcagcgtggaactcctgggcttcatcaatcctcccgcctcagcctccagatagctgggatcacaggtgtgcagcaccacatttggctaattttaaaattctttgtagagaaaagggtcttgctgtgatacccaggctggtcttgaactcctggcctaaagtgatcctcccacctcagcctcccaaagtgctaggattagaggcatgagctgccgtgcccagccataattgctattcaaaaatcacaacttcctaagttaattctgccttctaagggagttgcaaaatttttctctaaagtagaaaaatgattcttcatgaaaataccttagtagtcttctttgggaataaaaagtggagtctgaagcatatgaaatggacaggcaatggcaaataaaagaatgagaacttgagagagaggttttgtgaaggccctgggaccttaagaagagggtggaagacgaggatgattttaagacaggcagcacagaaaaaaactcagcaggatgttaggagccctacagaggagaaagggtcaatgaagtattctgagaagcagaaatgacacaggggatttaaaaataggaatgtctaataattataatctatttgctatgctttgatatggtatagtgtcccttttccccattaaccctcagctgtcttgtgttggtggtggttctggggaatcaaagtctctgtggtgtttttatccatggagtatgtgtagaggtgtgtctgtgatcagtgtatgtgtatctcagtgtatttgtgtgatctctgtgtatgtatgtgtctgtggtctttgtatgtttttctgtggaatgtgtgtatgtgtagtgtttgtgtgtttgtgttgtatgcgtgtggtctctttatgtgtgtgcatatgagaaactagatacccgaattatgggaaagatttttttttaattgtgcatctgagctctagaaggacatctgaaagtaatgtagaacatgggcaaaatcatagtaaaacttttctgatcaatgttggtagtgattctgaatatcatataaagtttcctaggaattctgatttattgcacataaccaggagatttcttcatccttaaacacctttaaaatgatgttaaagtacttgagaataaataaatggggcagatctcagactctggcatcccacagacctgggtttgtatcctacctctaccacttaccagctctgcaagttcagataacttgttgagactttttctcctgctaagcccctcagtttttttttttttttttttttttttcagatggagtcttgctctgtcccccaggctggagtgcaatggcgtgatcctggctcactgcaacctccgcctcctgggttcaagtgattctcctgcctcagcctcctcagtagctgggactacaggcacctgccaccatgcctggttaaattttgtatttttagtagagatggggtttcaccatattggccaggctggtcttgaactcctgaccttgtgatctgcccgcctcagcctcccaaagtgctgggattacaggcatgagccaccgtgcccagccacaggcggctttcaggaagaccccacctccacttgggaacactgagctgctggcgcaggggaaggccacaggagcatcgggaagctaatgtgcaataagcctagagggtcaattcggatgatagctctaggataaacctactagtccagagaatcttacctcagacctgtatcttcatgccagattggtcttgagcaggccaaagtgactctacaccatcaatttctcactaggaacagagtgaacaaaatcagtgacactttgccttcatttcatatgtctttcttcttgctgatgctactccccaagcttgaacttgctattatttaaatactcagtgaggtcttttcctctttttggttcctttttttctgtggaatttactgctatagaggtatagagaaatgagtacttcttcaaattatttctccattttgaggggcattaaaaaaaatctgtaagtgaccaagtgcagtggctcacacctgtagtcccagtgctttctgaggccgaggcaggaggacaacttgaagccaggagttagagaccaaaataaaaaaaaaaaatagccgggcctggtggtgcacacctggcacacctgtagcactagctactcaggaggagaggctgaggcaggaggatcacttgagcccgggagttcgaggctgcagtgtgctatgatcatggtggtgaatagccaccacactccagcctgggcaacagagtgagaccctgcctctcaaaagagagagagagagagagaatgaattgcataagctaagtcatttcatttaaaaggttaataaacttgtttcgggtgttaattcccttctcgtattgggtcatcccgccaggcacccactctgcctcaactctagggtgtttattagcagatggatggatggtgttgggtacataaggaggtggtaaatatcaggcagagaccaaaataaactctggaaatgagctatctaatctttctggacagaaaatagttagaaggaaaaacttaaatactgagtttcacattaaaatggaatttatgaggacaggccagagatttatattattcagtttgggttgatgaagactgacaggcagaacaatctgcatttgtatgatggttgtagaacggttggaaaaaaacagaattggttactacatcctagaagatgatctcattataaggaatcttccaacacaggtaatgcatttatgaaccattactgactgagttctacatttcctatgttcttctctctaatctatctctgaaattttttttggatccccttctgtgctgacctcagtgtcctgatttttttcctgcctgctttcctcttcatctcttcattaccagtggagaaaatacatcaaaaccactgtgcagcgttggtggtcaagagtttaggaatcaaaaccattacccagtctttgttagacttagaattttaaaactttaactgctagattgtagccttattaaaaataggcttaaatttcagttcttaattcatttgtggctgtgaccttcaacctaagaactgatctttgcaggttaaggataaattttcaaacctgctactgtgttttaaaagggattttaaaaggaattttgacaggctttcatacccttggggttaattcacagatttggaagcaatctgagatattatttggtccaaacccactaattctgaagattagcaaactgagactcagagaggttaaatgaattacaaaaggttttcaccaagaaaagctaagggctccttcttatgctatcttctcaattaaaaaaaggaatttgggccaggcttttcctcttctcccctcactctctgtttctcaattctataatttctaaaattcataaataacaaatatattagggactagttcttaacttttctcctcaaatatgtactagggctagtacaaccattagatagcctaaaatttgattattatatatctctcctcagaaatacccttaatagtgagtattttcctcccataggtgattaaaccaatgatattaacaatgttaggaaatacacagagtgtatttgaggaagtaattctcttctgtggctttagtaatgtggcttctttcagttcacttttcatatttcaaatcaagtcagatgatttcaaaaaagaacttatggaaatggaaacagttttatgttgttttgatataaccact

SEQ ID NO: 1241361 - DNA, 4001 bp, Homo sapiens
aaagagccagagaggaaagatggactacctatgaaggatggaatttagacggacaaaagacttctcaacagcgataacagacagcagaagattaaaagttccaaattgctaagaaaatatatgtcatcctataattatatactcaacagaactaaatttcaaggaccagagcaagaattaggacattttcaggtaaactaccactcagaacatttacatccaaaatccccactaaagaaacttctaaaggatataactgaagtaggaaaaggacactagggtaatgtctgcgatgcaggaagattgaatcagcccccgcggatgggactctgatgcacacacaacacgtccaacaccaggctcatgtgtcttgggaagaacacctgaaccatgaaaacatcctccccttaagaccaggaccgagaaagtcgggtaatgggcagcatgtgcctcttcctcctttgtccgtgttactcaatagatagtcatcattttctttaaaaatggtatgacagattaaatgaaaaaatgatttttagaaaggtttataaagttttcaatggaatacatttctctagctgtaaaagcatttcctgccttgacttaaccacaagacaggatgggttgatgaagcagaggccctcttctttgtagtgacgcagaggcagtacaggcttgtggttaagagcgtgggctctggagacaattcgaatgcctctcaacagcactctgggcccattggtgtttcttcacctctctaagttccagttttcacatgtgtaagttagtacccagtttctaagattgttgtgagggttaaatgaaacgacatatgaagcaaagttcctagcacatgggaggcattcactgtacgttagctggtaatattgttttaatgacattggtagtctgcaccaatctttgtgctgtcccctacattttctgaaaagaaatcatctttagtcatctagccacagcatagcagaaaagctggaggtgctcagagtgtaatttatatggtaacacttcacgtataatactaggctctgcagataatagttgttcatttaatttgggtggatctgagattttagtggaatactgtatataattcctattacagtattcacatatcttttcagatattattttgcctcctttaatcaaattttgagaaaattgtttttagaacaagcactgagaaattttggtgagtttttaattttttaatttttaccagatgtcaaaaaagacaatctacagtatattaaagtatatctattcttgaacagatctaaaaatagtacaaatcattgatgacgatgaccaaaagtacaatattttcctacagtgttatagaaaatgcttgctttcatctatcagtttaatagttacttattaagactctactatatatttcaggcactgtggtagtcacttattaactaataattattacttgacatttattaatactggaaatattctttcctaatatcacatttttttctgatggatataaaaagtatttactggaccattgtacagatgagggattggtgccagatagctctaaagccaggggctggtaggcttcttcctaatactgaatgaagtttgccaaagcactgtttcctgaaaagaaaataaagtatgaacaaccccctttttctatatctatggttttgcctaattagttctaaatttaaagtttggccctttaccactgctcaaagtagaggaaaccatgtgtcttcctcatttctttctctcttatcatgctttgcattaccacatttatacagcctaaaccaggaagaatgttgcgaacatcactgacaattatgccaaagcatgttatctactttaaaatattattttattttttaatcttatacttacccatatttcttccggtgatgtgtttgttgactgaggagcttgataaatctgtgcctgcatcaagtcaagaagagaaaccaacactgctgaggggacaggaaattgcactcatatttcagcacaaaccaatgaggaagcagcatctcaatgagaagggtgtgcgttatccaagtttgaacaaaaaaagtctcttaaatacttttaaagatgtttttatttattgtttactgtactgtaatttttataactcacttgtctcattgcatcttaattacaagtatgtactgatattatattatatgccctttacttaatggaatatatgttaaatattttatttatttctttgttcattcattcattcattcattcattcactcatcatgccagcagtgtgcggggagatgtatacgaactggctatcaaccaaaagcagctttttttacctagtaaaggagaaagacatgtttaataatgattgtaatgcaatggcaaaatgaagaagtacttcaagaggggtacagataaaatagaatgaaccatttggatgtgtgagataggggaggatattgtaggtagattcagggtgataaagttcctgggacaaaaacagaaaagggagaattgaggctgaggggtttaatgatggatattgtgctgcttaaggcaggggttaaggtagccaacctcataccgtctttcttttctttttttttttgagagactaatgggattagatatatagtatttgattgtagaactattttctcctttgattctctcctcttggaaacagagatggctaaaaaccagttgaattaactagctgagacaaataattttatgaaacttgaaaattttatttaagacttacattgttattataaaaactcttgtactttagcaagttaaagttaatgccaaatctataagtggtttaatatgaagtgaaattagctcctataactttcttactattgatatataaaaaagtcagaaatatcacttttgaatcttgccctcataaacttttattagaaatgaagggaaaatattatttgaaagaacagaatttatttgggatgaaaacatttgacttaattttaaagatgtaatcaggacattttgaatctgtgtttgttaaaggacattaagggttgttgctggtgttttttttttgttgtttttttctccctacccagagatagaaaagattagcctgtatataagcaaggctttccatattgaagttgatcagggtatatcaggaatgtaaagattttcaatacttccgttgtaggtctttctttgagaataataaaactaataccttacatttataaagcacaggatagtttataaagtaatttagcatatagtaaattataaatcaatatattgttactgaaataataaaaattaagtataaagtaaaaaattaacaataaatgtcttgaagttttacaaaaatgaaaagtaacgatttcagtttacttgtgactgtaattcaaagttctcatttttgcttggtttcgtacatctgcttatctgtggtttctatacatgatatatctttttttaagttcggggtacaagtgcattgttacgtaggtatttcattactctgatgatctcttactttatctgaatagactatacttctgcttttagggaaagggtattttcatgtccatatctaatattcatgtattttgcttttcaaaagaaaaagattatcattaagaaacataagaaacacaaactttcacttctgattaaagaggagaaaaagctggagctgacctatgctaaaaccttgccaactctacacaataagaaatttaccagcttttaagaaatttgcttcttaatatggaaaatatggcaatactgtattttcaactatagggctatcttttataatgaacggttagaaattttaaatcattgagtcactgtgacattttaacaacataacaatgagataaagacaattagtagttattcagaacactgccttaacggggttggcatttctgaccagtcaattatttggttttctgtggtcacaatctggggacccaacactggccagttgg

SEQ ID NO: 1241362 - DNA, 4001 bp, Homo sapiens
gatggaagggtgggtgggtgggtgggtgggtggctaagtggatgggtgaatgtgtaaatggatgcacaggtgaggggaagatggatagatggatgagggaatgggtggcagatggattatgggtgggtggataggtgagtaggtgagtaggtgagtgagtggataggtaagtggtggggggttgaggctgggtgctgggacagtgaggatatcattaatagaaacaggaaagtgaggaggaggaatcaccgtggtcccctctctgctcagcctgcctgagctggtctgagggtcctgatttttcaccagtgccttcccttctactgttccctgaggacaggcacccccagatggaaactctgacttgccctctacctcatctccacaggaaccttcctcctcaaaaatcaaagaacacagtggatgcgaaaatattccataaatggaaaaacgtagatgtagagaagaactaagccacatctgtcgagggccctgcacttgccaggcaagtttctgaatgtctgttctctctttcaacaccactctcatcagctcccactttacagataaagaaactgaggctcagagagatgaaccaacctgctgaagtctctgcagttgagatgcggcaggccaggtctggaactcggactggtccatactttccttcatgctgtgctgactatcatgatcatcccagaaccaccaccctcaagcccccagctcagccaagctccagtcctcacagatgctgcagcaatggccaccaggcttggtcctggcctggccccttcacctggactatgctttagcaggtcaaccatgttttcaacgcccactgaggaaaaccagccacgtggccagtccgtagtttgggaaggcattggagaaaagaatcaaaataacactttattacccagctaaaaaattgagaaaaactatagagtgactcaacgcctgaaagcaaatctttagcaaatgcaaatcagcatagaggtctctgaggactttaatgaccaagagaaattaagctcccaacaggaaggaaaggcctctctgactaagctaggagtctcttgcatgtcccaagtcagaaggcggaggtgcctaaatgctggattccagctggcacataaatagtgatctaactcgccccccctttcgtgcagcacacaccggcacgcacacagacagttactcatggtgccagggctgctcacggaaccccaaacccacaagagctggggagtttccccagggcccagcttccttttccttcagttggccaaacctctgcatgctttaagcaaggctgtttcattttctgaaagtgctttatttttccctctgaggagaggggaaacatcaggatgcatttttccttagtccccattttccccccagatcgcctcactccagcaacaacgtggaccatagcatctcacttctagaacccttgtcactgtttcaaaggtcagtcccatctgggcccacgaagtccctgtgagtcaggtgggctggcattgctaagccatttctcagaacctgaagcccagagaggctaatgcagggaggctcaaactcacacagtcagttggggtggatctgaatccagaacccacgtgtctaggcaccaacttgctgcctttgagctttttggatcacaagcaatagcaagaaatacacctgacatcgcgacccagaacacagacacacacacacacacacacacacacacacacacacacatctgtacaaagcaacaaacttccccaaagcaatacttaccctacttcttgccacgcactctgatcatttctattctatttcaattttttaaatgcaggtcatgagctatgaagttgatttactgacccatgaatgggtcacaacccgcagtttggaaacagctggatggacccccacctgtgctttccagcttctcctagagcctcagggccccaggaaggcagtgtggtctctgcaaccaggtgaggagcaggcagctgctgaaatcaggatggagggagtcctctgaggggggactctgaaacgagtcctctctgactctgcctgccccagctaggctctgccttcaaacctcaaacagctgggcttcctgcagaggctctgcaggagcctgggcacccttgcagccacgatcccagctctccctccagcgacttcccgcagcctgaacctcccagctccggctagaaaatccccagctggaggctgcccattcccgagctgaggcagaatcatgtgaactccaatctggtgtcaggctgggcggttgccgaggaaccactcgccagccagaggctgagggcggcggaatggctctctccacgcatcttcctctgctctccatgcaacccagagtcagtgagcagcctcgctgggaatgtgaaagcctgagctaggggcaggtgccctcaggactgtggtggggggatacaggaggagggggtgggctaattctagccacctttcagcacctacaggataccgggatccaggcaagggtgggggaagccgccaacatctgggtcactggggctcaaccctggccatgtgcatgagaacatacctgggagcctacaaaaaaaataccaatgcccgggccccacccggggctggttaaatcatgtttcctggaagtgacgtgccagcatcagtggctctaaagctccctggactgttctaaagtgcagtgaaggtgggcagccacggatgtggtgaagcaggtaggatcctgtttggcagagcagcagagcgaaggcagtggagctaaggctctgggcatcagtaaggatagggcgggcatcaatgttttcaactgtgtcggtccccagagaaggaatcaagcccagggctctggccccgggggcccttctggctctcaggagcacttactaaactccctccctcacacacataacacggaggatggaaaggcccagcattttggcgtaaccacctccctccaaggcagactccttggaagctgattataagctacgttgccagagccaggaagccaacagatacggtgcatggggccactgggggtgcgagtccttcctgctggaagtggccagagccctgtgcttggtccctgctctggggaccaacacagtttaaaacactgatgcccatcttattcatgccaagagccttggctccactgccctcactctgttggtagggggtctaaggaaatccccttcagtggggcctgggccctccaagcaaatgctaccacatagcaggccttttaaaaactatttccggccaggtgcggtggctcacgcctggaatcctagcactttgggaagccgaggcgggtggatcacctgaggtcaggagttggagaccggcctggtcaacatggtgaaaccccatctctattaaaaatacaaaaatttgctgggggtggtggcgcatgcctgtaatcctagctactcgggaagctgaggcaggagaatcacttgaacctgggaggcagaggttgcggtgagctgagatcatgccattgcactccagactgggcgacaaaagcgaaactccgtctcaaaaaaaaaaaagtttcctacgtcagttgcttcttgcaggccttatgttacgagcaaaggcttcagcttgttgtggtgcagtagcgtgcatttagacacacgtgctacttctgagttgcggaagtgtggctggctttccctgatgtcatataggaggacgcggggttaggagcacagaactgacttagcagtgactgcctggcttacccctaggacacaacctgccagagagagcacctctggccctctacggggtggcctgtcctaacagggtgtgcacacaccggccgtctacaccatcatcgtctatacctgcaggaaccactaatggcatggtgtcccctcccgcctccagccctgccaggggctggcaagctgccccagcccctctgctggcagcatgtgccctactgcacctggagt

SEQ ID NO: 1241363 - DNA, 4001 bp, Homo sapiens
tcttgtttgaggccaaccagctaggaaagatgaaacaggaattctgatgctaaagctcattcctctaccaccatcatcatcatcctcaccgtggctggtgccaagtgctcctccttccctcaggggtcttcagtcaccagcccctctttgggtccacccactgaagtccaccaacctctggacaccttcacactttacatttgctgccttgaacctgttttccactttgtttcctgttagctgagtcttctcttctgacagtgtgcaccttacccagaagcgtgtggtatgacagtaataataaaagtgggcggagctgacattcagaggacattgcaaggctttcaaggtcggatttcacctgtgcaatcccataaccgccctactatgttgcccatttcacagaaaactcagaggcttagaaagagacaacataggctgggcgtggtggctcacgcctgtaatcccagcactttgggaggccgaggcaggcggatcacttgaggtcaggagttcgagaccagcctgaccaacatggtgaaaccccgtctctactaaaaatacaaaaattagccaggcatggcggtgggcgcctgtagtcccagttacttgggaggctgaggcaggggaatcgcttgaacccaggaggtcaaggttgcaatgagccaagattgcaccactgcactccagcctgggtgacaaagcaagactccatctcaaaaaaaaaaaaaaaaaaaagcgacttgcccagtaatagctctaaaatatggaagagctgggattggacttagactatctggttctggaactgggctggcaagtgaaaagcccacagtccacagcatcctcactgtccagccccacttccactgttgagctcaggaatttgtttccctgcctccttttggaagcgatcctgtgtgtgcaggtaggggcagagggagtaaagccaaacgtaactatagcatctcagatttgcagactctcaaaccagcctcacacctcagtgaggtgacaatggctaacattttcatctcagttttacagaagcccagccacagcaggtgacctgcgcaaagctacacagcctctggctccaaggcagggctctctcccctgcctgtgccctctcgccaccgcagcccctgttctccagctgggggaccacccagaggaccacctggaccctgctgcctccgttgggccatttgcttggcggagtagttggggggtggggggcctgcaacctaggaccccacctggcgctgccccagcccaccgagcagtgagccagctctcccctcatcggtggcagggggagctgtcgggatctcagggctgccctgaggggccgcgcagatctgggggatgtaaaggcccaaacggactcggaatggccggtgcggccgggctctgggaaatgaagggctcgcggtgtctcgcactttttgtgggggcgggagtaattaccaggtggccgcggagccagccgagggggcggctgctaacccgggcggcgaccgcaggcggagacgccccgcccgggacagggaccgggccgcgccggcgctcgcggacagacacccgcggtcccggccgctgccgcgtctcccgcccccgccacgccccggcggcctcgcttggggcgcgcccccgcctcgcacgcgcacgcgcctgcacccgcactggcccgcccggttcccccgcgctcgcggggccgctccgggggaggtgccgagacccggccttggcccgcgcgcggtttccggggtccggcgcgccggggacccacaggcgaggcgagagaaaggggttggctcgcggggacacctacctgcgcggcgcggggctgtggcgccggccaccattaccccgcgcccctcctcttgccagcgcgcacgcagatggcggggtggcctggggaggtcttcgggtcccttcctgggaacgcagggccaagttgtgctccgattccacgccccccccacccacgtcgggcacacgcagccctgagtgagggtccatgccctgcctttcacgctgaccacagcccctaggcttggcgcctgccgggaagggccgcaatggctcagggacccctgcccccactaccatcctgccctggggggacaggctctagaacactgcgtggggctcagagtgggcctagctgtaaaaggacaggggtccttctccagccacgcccactcccgggtgccctggctgtcagcagcctctcaccacaaccgcagggtgagaagcccagagaacagtccaggagtagcccttctgtcctttaccacgtccgtgtgcccagcacgggcaaatcagtagccacgcaataaatgaagtgcggtgttgcagctctgggcctctctgcacctgccctgacctcagcctgtccagcccagcctggggatctgcacttaggtttgcagcctcctgggtccctgcccggtgctcctcagagccggagcctgtctgccgcagggatggcttagaggacctcctactgaccttcttgataattcaaggaggccttaggcccctctgccccacatcctcacagataatagtaataatagtcccagcccgcatctattgagcacagctgtgtgctgggctctgttgttaagtacttaattacattaactcatttgatgttcagggctctatgatgtagacagtattgttattcccatcttatacataggggaatgaggcacagagagggcaaacaacttgcccaaggtcacacaggtggtacgtagaggcctcgggattcaaatccaggcagttgggtacagaagccctcctcctacccacatcctgtcccaagccacccttggctgtttccttctgctctttcacaattgcataccttggctcctgtggccctccccactctatagacctcctgtttcccacctcctgaactcctgcccccatcttaagaccccaagtcacttcccctagggagcattcttggttgccccaggtaatgtgtgctgaaccctgctgtgtgcccttagcccctttcccagcattgcactgccgctggggtcgctggcacacagctgtctctctacagggcccttgctctcagcccagttatcctgctcaaagcagggtgcccccattcctatttgtgaaatgaatgtctggaactgtcacggcaagagtctgcagaaggttgggcggttgtcaggacagatggttgcaggttagggatgaagggtgattggaactgcaggcaggggaggtagaaggagaaagagagcaaacatctcaccttctgctaacccctctaggtggctcagtgctccacacggtgtgacttagcctctaggtgaatctccagaaggatggacagtgggtaagaggacagaaggtgccctagcgggggaaggccggggagcaggaggaggcagagagaggcacagggagtgtggaggcgggaggatttgcttttctcactgggcactaccccagcaacatcccagcaggctaagaggctggataagcctcctctgctggtcttcattttgaaattcctccttagaaagtcctcacaagtggaattttctgggttgactatgccataaaaattcacatctgctttctaaaagttgccaaactgaatgtagttgtgaagagtttggcgttgaaagccagtgtcagcatttgaattccagttgtactacgcgctagtagggtgaccctggacaagtcttttaacctctctgtgcctgtttccatctgtgaaatggagacacatcttcaaatgagggctaagatgattacatgagttaaaccaagtaaagcccttagctcaaggcccagcacacatgagggttcaatagatgttagctgttattatcactgtcattggacattccaaatatcctcttatttgcagctcttatcatttattatttatttatttatttttgaaacagggtctcactttgtcgtcccccagagtacagtggagtacagtg

SEQ ID NO: 1241364 - DNA, 4001 bp, Homo sapiens
cccttcttttccacctctacctttccaatttaacagacagataccttcctctgggagaaagttcctgcttctgacctgtgagaactaactagttcagtcagttccaggccatcatgacatcatgagcccagagctgatctctagtggacttctctgtttttgtttctgttttttttcctgagacagggcctcactctgtcacctaggctggggtgcggtggcacaatcatagctcactgcagcctcgacttcccaggctcaggcgatcctgctacttcagcgtcccaagtagctgtgactacaggcacatgccaccatgcctggctaatttttgcaattttttgtagaaacaaggtttcaccatgttgctcaggctaatcttgaactcctgagctcaagcaatctgcctaccttagcctcccaaagcgctgggattataggtgtgagccactgtaccctggcagatttctatttcttgatacaaatggctggctggctcctggtaggttatagactccctccagcaacttgctaggctgaagagatggtgtgaggctggaggtacttctggggctggagggacatctcgaaagagggtttgctacttctgtctctcctgctctagaaaaggccagacagaaaacttagggaagaacagtgagagcagtgaacagtttgggctcaggtttgtcacagccagtgatgcttcagccttcctgctttcctgtcttcctcaccttcataccactgtgaattgaactaaggggattataacgagagggttcgcttgggttcattctccctgcttgtacgttaaaatcataggtggaaatagaagaatccctaaaagagaactcgaggtgtgtgggctgaagatctataacagcttgacccattaatcagaaataggtgcatgtaatgcccagaggcacgtgccttttgaaaacctttctctttcctgcttattttctttccacttggctaatttaaaccaacaaaaatcatcctcaatctaaataacagtttgcttgcatttgcatagtactttatatttttcaagttacttttgtatatcctgtcccctaaacatcataataatcctatgagctaagtggtattatccccaatttacagatgaggaaactaaaccgaaaaatgaagcgccctttccgagggcacagagccattaaatagcaaaaccaagtccagctagagctaaggtctcttgagtctgtccaattcttgtttgattcctggcctctactttctccactcatttattcaacaaatatttaatgagtgctttctgtgccctaggcactgaggacacagtggagagaaacacagacctggaaccagccctcatggagtaatatagtagaaagacagtaaactataaaaatcacacagcctcagtgtttaatcttaaaaaatatataccttctcttggtatgtcacatgcacctaaagacctagcttaacaaaacataccccattattccagacactccaaaacatggtcattcagcctctccttttatcccacctgagctacaccaacccaacacttttggtgcattacaaggagggacccctcacctgatgtccaaattggttgcaagggaagccaaggaccaccaggcgcctgggaaagcggcattgcagctcgttgagctgggtgaagtcccgggtggttgtgcctcagagcgaagccacattctcaatcagcacggccctgccccggaacgtattgaaatctaccttctccccatccaggctgatggcactgaggtcatagaaggacttggcaatgaaagccatggtgaagcgcagagtgagccccgcagagaggcctgagcccacttatgagcctattagaggggtggggaggaaggaggagccaggaaggaggacagaaaggatctaacaatggagctttgagcatccccaggatgacttagcaaaaacaggtccccacctgtaagtgctgtttgaacaaggaggttgctcctcctattaacagactgaacaaggccgcctccccgccccaccctgctgcaacctgggaagggccaatttgatatctatgagcagaggtaaataattcactgcttacaggaaaccagagccctaaaggtcgaatggagaggaaaaaaagggagggagggatgcaggattgactcctacttgccccatcaagttgttctcatttgacacagacgtttattgaatgcctgctgagtgtcaatctctgaattgtacagtgagagggcagggtctgcggagatctgaaagatgaagaagagaattgagcctcctatccatgggactcagatgacaactgaaatatacatattcctgttcacgttcttctctttgttgctttccaccaggacaaaatcaaagggacccttaggaggagagtgtgtcattttctaggggaaaaaagaagttttcagtgcctcagctcttgccaggctgaagagacaaagttgtgtttatcttgaaaagtctttcagtgcgtggtgccacttgtcctggagaacacaccagcctctgcccctgcactgtaccatctcctatattatatcccccacctccacctcatcccccagcccccaagtcatgaggctcagtcgttgctgggagaatggtgaagaggagtcacagaacaggtggataaacttagtggatgaactgcacctaccttcctctcagacagagatttggtccccaagacttttcagagcgggtttgtgctggtcaccttcccacagaaggaagtgtgtggaggaagttgaagctgctgtggttccagacgcaggcaggtcacccctgatgctttcaacaagaggcgtgcagtgcatcgcaggacatctgctaagggccatctcagaggcccacccctggaagccacagaaaccgaaaagacccaagcacccgccaactcaacaagttactcttttaaaaatgccttgatttcttcatcagtaaaactagcaatggggcttgacctagctttgggattttagagtgaaatttcaataacaaagcaaatgtttactagggtgttttcacaggggcacatccattgggaactgtctccttggaacaaagaataagcaagtccggggagcagctggtcttgagaatctgatttgttgagatgagatgaagtaattatcaccagggagcgccaagctgccttgcagcttttccatggctgttcaagtatacagggaccatgtgtctcagctggctgctccctaaaaacaagtttccattacctaagtggacagaaggagtgacaggaagtgtagagggaagtgtgtcccctgctgaagctgggtggagttcctagaagcaaccaataagaaagagtccccaccaagccactgagtcacaaggacttggcactgatagtgggcagaactgtaacttgccggatttatgtgcatacctagagcttccccctagtactctctgggcctccagagacacctcttattctctgctcttttgcaagccttcttcaagaaggccatgggagttcccaagatgaggagtgtgggggttccctcttccttaggtacatgccatcccttttctcctggtgtgaccttggacccttcagactcccagggttctcacctttcctaatggaatatacttggtgaggctctcctaaaatatctctgtctccaaatttacctcaaactggcctcgctttccaaaagcttacaactttaagcatacactaagcagcgtatgattcttatggctttctgtgggacagtgcttgctctggacacagcactggcttaggcagaaagcctgggttggtggttcttaattctgactgcaaatgagaattgtttgtaggaatttttctagagatgccaaagctttgccctccagtgattccaattcagtggtttacaaccacaattctgccactgttacttcggacccttaggcaaatctttaagctctttttattg

SEQ ID NO: 1241365 - DNA, 4001 bp, Homo sapiens
ccagactgatggtggtgggtgggtggggcggggggtatgaaatacagaatgtggcccgtctacatcgccatcactttattgtactgtcacccttaatttaactataaatactacggtgggggctagtcgcgggcggcctcgggctgctgggctgtgcgcgccctgaccccagacgccgaccctcccggctctgtacactatttacagctcctcgttcctctttctcgaccccctcccgcaaggcagcgcgtgtgcaagaaagtagcatcgtctgtctgtgcaagtccttcgagttaggtaagtaatacgggcaagtgtcccgcggccgtcagctgtccgagtccaaatcgcttttaccttcctcttccctcttctccggtgacgccttcgacgacgacgtcttgttccacttctccgcgttctccgactcctctgatgaggaccgcttctgccgcctccatttggcgcggcggttcttaaaccagacctgttgcgcaacggaggacaaaacagttcagatcaaaggcgcgcttcccccagtcccggggcacccggggagcttggtgtggcggcgggacaccccgcgcaggccaacaaaaggaggggagccgctcgctcccgcttccgcgttttcattcaacttcctgggcctaaagcgccctccagcagcctgcgggccgccatcgggatgtttttaaagtgcggggagagccaagcagggctgggcaaacccgactggggccccacctcgcggggaaggaccgctaggcgcccacggcaggccccggcgcctacctccactttctcctcgcggaggtgcactttccgggccagctgctcgcgcgtgcccacgtccgggtacttggtctcctggaagaggttctcgagagcttcgagctgctcgtcagtgaagatggtgcggtgccgccgcttccgccgacagtgcagctggttgagaagctgcagctcggtgcgcgacagcgtgcccacgttcatgtagggcagcatctggtgcggtaccggggacaccagcaccgaaccggggccctcgtagcctgcgacagagtggggcgcacggtcagccgcccgccctcgccaccgcacgcatgcacgcccgccagcccccgaccctcttccacttagaagtcgtctgcaaggggatgctgagaattgggggtgcacgggaatcaggggtgcagggaaaaggaggaggcgtgttagagcatccatccgcacacccgccaaagccagtaagagaattcaaaacaaaacaaaacaaaacaaaacccagtttccccgggcaggcactgaattccagttttcgcgaactctggccaaaagtttgcagcaagaagtttgcaaactcctgcgcccgatcggcaaaagcggaggggggagttgcaagaggagcaaagtttgaggaaggtgaattaaccaaccggctccatgggctaaggaccgcagtgggcggcagaggccggagcgagcgcgaccctacctgggggcgtcgggacgcaggagcactgctgggcgcccagcggcggcacggccccgcagcaggccgggcccacgggcgccgcctgcacgtgcagctgcccgtagaagtagttgttgtagccgaggcgggagccgctgaccgcggccgggaggcccgcgccgccgggggccacggggcgcgggtagaaggcgccatagtccgaggaggcgccgccgctggcgccgtagagcgagtccccgtgcagggccgggaagacgacgggagccgccgcgctgtgcgccaccggcaacaccgagtccttgcagcgcggccgggcggctaggatgttgtcgatgctgaacatgctggcgggcatccccgagccccgcgtcgggaccggggggcggcgggaacgcgccgaggacagagccttaaagtgggggggtccactctcctccagccgccgaccaaaccgaaagagagcgccggcgagcgcgcagccctgcgcccctccccgccccctgcgtccgctctccctcctcccgccctcccctagccgcagcgttcgctgaactcaacccgcgggtaggacggagctcagaccagctgaacctcttgttggttttatactgagtcgacgtcatcctggatttagttcctggtaatatgcagatgacaaacagaaccagatttggccctttcttttcctttgggtgggggaagagggttggggggagggggagaggtgccaaggggagggggttacaaggcctgaaaagagattgtggattgcgaattaatgaaattaacctaatcttttccattcggcagccgggccgcgggccggccgagctgggcgggcggcctaattgccttggttaatctcattaattcctttgtgccgccgcagttaacaactccctccgcccgagctctccacccccacccttttttctcagattgggtcctattattgggtgcgatttcctctgcctgtagctcaaattcattgtggacgattttactttggggctacttttttccccctttcggaattggttttgttttagaaaatgtgaggggctgcatcccctctcaagcaggattgaaaattccaccactcctccgcgcccccacgtactcaccgcctgatttacctcttttttaaatcttgagtttctctcccgaatggaacttgttaacccccccaaaaaacttttggttttgtaaaatccaaattttgtaaaggcaaaaacgactaaaggaggggtgcatcgtgcttcttaaaaagatttttttttccagccactctgggtctgaaaactaccatggcagtccctaggtcctacacagcgaagaccaaattcagccgctctttaaaattcgccaccaagagttgcagtctgaagcggtgcttctagctgctcccagcgtgggtgtcggtagtttttgtgcttttaaaaaattagttttggaaatgtggtgccttctctcccaaactatttttttgattttcaatccagatggggtctttgggacttccctatcttcttccccaataattgggtcgcatttttccttacgacctgctggctgccggtaggcctgcccttccgcctggcaggcccagagtggattccctgggccgcagtggcctggacgatggccgggtctgatagcggcaggcggccgcgatgatttgcgggattctcggcatggcacggccagcctgcccgagccacgggaggcgcagccagcccaccactcacggcaagcaggcggccgagcgcccttcgagaaggtaggcgacggtacgcgcggaacaaaagcagtcccccagatcctgtggaccgggtgcaagctcccggcttgcaactcaggccactccaggggaaggggcagtacccgacccaggcgatacccccgagagccggagagggagatggggttgcgggagacctcgggtttcctgaaggaagtccgcctttaactcacacctatttttcgcgatttctctcaggctaattaaccaagggaccccgcaaagttgtctgaagtcgccgccgtaaggctaagtaagtgggctgcccactccccggctcaggggcaaaggggaaagcccacttgtcaatttctgttcgggtttcaaagagccattgcacggaggtttagtcctgtccgagggcactactgtggcggcgcgcagaagcggcccagtggagccaggcggcgacgtttctcctcctaggcctcccagcgtggacctctgtgtcctcacggccaccagcttgtggcctgagagttgctccttccagtgctgcgcaaactagaggtggttgtaaatggggattaggacatgacggagatgggtctcaatttggggaagtgaatagagttttcctttttttcttttttaacaataaaaacaaagagggagtgtgaccctccccttagagaggtcaggtctagggtaagaagtgaggcaccttccatctcccactgactaggatgaagtcttttttat

SEQ ID NO: 1241366 - DNA, 4001 bp, Homo sapiens
ttattttttgaaatagggtcttgctctggcaccaaggctggtttcaaactcctggtctcaggtgatccttccggccttggccttccaaagtgctgggattacaggggcacgtcaccacacctggccagggtaattattttcatcttccttaattaatgcaaggtgttaacattttgtgacaggtactttgtctttgacaaaacacaaaaatggcactgtgatttgagatgagtttgtaccctactgtagccaaagatatcataatgacaggtcctaaaccttaacatttatactgaatttctcctagaaagcataaagtttacaaggcaacacacaatactctgaatagagcatatttgttattgcaaaaccgtcgttttaattttcctttctgatatttgaaattgcaggcactctatggatagcccgaatgcaattctatattgaaaaaggaaaccacttatttaataactgctgaaagaagtccaaattgtatctatttgtcagaagtctatttcaaaccttccaaagcctattctaatttcttgcaagatcccacctttgccttttcataccaccttgtttgtattccttttatggcaaatattagaattattatttacaaacatgtcttatcttcaaaatatatccagaatccaactgcttctaactaatcattttcaccgctaccgctttggtccaaaccactgtcatcttttccttgcattacggtgatatccttctaactggttctgctgttttcactctggccctcccacttccacaccagactattcttaacagcagttagcatgatcccatagaaacttaggccatactgtgtcactcctctcctaaatccacctcacccagagtaaaggccaaagttctttttatttttttaagatagagtctcactctgttgcccaggctggagtgcagtggcacaatctcggctcactgcaacctccgcctctcgggttcaagcaattctcctgcctcagcctcccaagtagctgggattacaggtgcacgccatcacacctgactgattttttatatatttttggtaaagacagggtttcaccatgttggccatgctagtcttgaactcctgacctcaagtgatccgcccacctcggcctcccaaaagttctgggattacaggagtgagccactgtgcccggctccaaagttcttatcaatggcctacgaggccctacatgatgtgcttcctctgcgccccgcccgccccaccccccacccccaaactgcccagcttctactttttccttcactcactcttgatgttccctaaattcatcaagcattctcccgtgacagggcgttgcacttgctgttccccttgcatggaaaacaactcttccaggtatacatgtgcctcacttcccagctttctccaagtttctgctaaaatgtaatcttattaaacaagagaatttctcttaccatctcatataaaaatggcaagtcccttctctcttccccatctccactccctttacattgctttcgtttttccaacagcccttatcaccacaaagcatattattcactcatttattgtatgtctcctcccttcaataaaatgtaagttccaggaaggaagagatttatctgttcactgctgtaatcccagtacctagaacagtgcttggcacacagaaggcaatcaataaatatttactgaataaatgaacaaacttccactttattgagagaaagggtcttgctctgtggttcaggctggagtgcagtggcatgatcatagctcgtacgatcctttctgatatttgaaattgcaggcactctatggatagcgtcaatgcaattatgcagcctcaaagtcctgggctcaagcgatccttccgcctcagcctccacaagcaggtaccaccatgcttccgttttagaacataaactccttgaaggttcggcctgattcttgacactgttcacatgatcaactgtggtgactttcatttaatggaccttaacaaatatttctgaatgaagagcaagggaatctaagttactgagaatacttgagatgagtctacaaagaatgagggaaatcaacaatccaagcaactgcatacaaagtaccctggttctaaaacgaaaaggtggttgtggaaaggggaaccagatgtttctccatctaccaatattttgggctgtatttccaaggcattcatgaaagttgccgagacagtaaacatttcactccttaaactggtcgtcttaattcactgtgattaaacagctgtatgtttcaggactctgttcaggttcgtgccctactcatatcatttaatcttcccaacaaatccatgcacataagattttaatccgctcacactcggcaaaggaggcaacgtgggctcggggagggcagtggccgctcaaagtggctgggcggctaataggtgtcagtgccgggattctaacgaaggacatctggcttctgggccatagaacacccgcacccaggcctttcgaggttgacttaacttaacagccggctccgcctctgcaggagttacctcccaaaaggcagaaatacgattgcgcagactgccagaacagcccaagttcttcacccaggttccggcggggtcaggagcctttagcatttctcaaggaatgcagttttgcccacagatgcttcgaaaacccaagtttcctgatcgttgctatgacacacccaggattaagcgagcgtatgcgagaagcgctctgcaaaccgccaggcaaacggcaacgaagaagctgcctcagaaacaatacctgaatgaggcgggggccgaagaacttgctgacaatgggcaccggtcaatgctcgggtgcgggcggggatgctcgagaagggctccagtcctcccagcggagacggcggagccccaagtgtgcgtttccggggcgccgaggtctgaggggagccgggagagccaggccggccagaccggcccccagacccctcttaacacgggcgcggggcccctgcagcctgccgcccctctcggcccagccagctgcatggcgtcgcgtccccatccggaaggcctgacggcccgccggcgccccgagcccctagcccttctcgggggccgcccctcgcccgcagccaccccggctgccgctcacctgcgcgcccggcgtcctcttcttccttcctccggaggcgactggagccgaccggcggtgccgccccctccctccccgccttcttccgccccgccccctcggagccggaactgctccagcccccgcccttctgcccgccttccgcggccccagtgtggcgtcacttccgccagcgcccggcggcgcgccgggagtctgggtctcgtgaacgcgccaggagcgtccctacagccgggaacgcgcctcgcggatgacaacaaattcgtcgcgcggcggcagtggcggtggctgcctcagcccctgccgcctcctctcgcgctctcttgcactctctccgagccggttgggaccctcctcggaagtcccctggcctggggccaggaggacccctctgcgtcttgcctccgccaggcccagcgcgagcggtgcggcgccggcgatggggtctccctgagggactcccggcaccaaatagggatggaggggccgccccaggcttaggccccgccgcggcctggagccggagtcgctaccccgaggccggagccgtcgcaacccgcagccgcagtcagcccagctgccagcagtcactatgccttggccgttttcggagtccatcaagaagagggcctgccggtacctcctgcagaggtacctgggccactttctgcaggagaagctgagcctggagcagctcagcctggacctgtaccaaggcaccgggtccctcgcccaggtccccttggacaaatgggtaagagctgccggcggcgagccgggcggggctcgctcccctctttagggcgctttgaaccagtgccatccaagattgg

SEQ ID NO: 1241367 - DNA, 4001 bp, Homo sapiens
actttttccttcactcactcttgatgttccctaaattcatcaagcattctcccgtgacagggcgttgcacttgctgttccccttgcatggaaaacaactcttccaggtatacatgtgcctcacttcccagctttctccaagtttctgctaaaatgtaatcttattaaacaagagaatttctcttaccatctcatataaaaatggcaagtcccttctctcttccccatctccactccctttacattgctttcgtttttccaacagcccttatcaccacaaagcatattattcactcatttattgtatgtctcctcccttcaataaaatgtaagttccaggaaggaagagatttatctgttcactgctgtaatcccagtacctagaacagtgcttggcacacagaaggcaatcaataaatatttactgaataaatgaacaaacttccactttattgagagaaagggtcttgctctgtggttcaggctggagtgcagtggcatgatcatagctcgtacgatcctttctgatatttgaaattgcaggcactctatggatagcgtcaatgcaattatgcagcctcaaagtcctgggctcaagcgatccttccgcctcagcctccacaagcaggtaccaccatgcttccgttttagaacataaactccttgaaggttcggcctgattcttgacactgttcacatgatcaactgtggtgactttcatttaatggaccttaacaaatatttctgaatgaagagcaagggaatctaagttactgagaatacttgagatgagtctacaaagaatgagggaaatcaacaatccaagcaactgcatacaaagtaccctggttctaaaacgaaaaggtggttgtggaaaggggaaccagatgtttctccatctaccaatattttgggctgtatttccaaggcattcatgaaagttgccgagacagtaaacatttcactccttaaactggtcgtcttaattcactgtgattaaacagctgtatgtttcaggactctgttcaggttcgtgccctactcatatcatttaatcttcccaacaaatccatgcacataagattttaatccgctcacactcggcaaaggaggcaacgtgggctcggggagggcagtggccgctcaaagtggctgggcggctaataggtgtcagtgccgggattctaacgaaggacatctggcttctgggccatagaacacccgcacccaggcctttcgaggttgacttaacttaacagccggctccgcctctgcaggagttacctcccaaaaggcagaaatacgattgcgcagactgccagaacagcccaagttcttcacccaggttccggcggggtcaggagcctttagcatttctcaaggaatgcagttttgcccacagatgcttcgaaaacccaagtttcctgatcgttgctatgacacacccaggattaagcgagcgtatgcgagaagcgctctgcaaaccgccaggcaaacggcaacgaagaagctgcctcagaaacaatacctgaatgaggcgggggccgaagaacttgctgacaatgggcaccggtcaatgctcgggtgcgggcggggatgctcgagaagggctccagtcctcccagcggagacggcggagccccaagtgtgcgtttccggggcgccgaggtctgaggggagccgggagagccaggccggccagaccggcccccagacccctcttaacacgggcgcggggcccctgcagcctgccgcccctctcggcccagccagctgcatggcgtcgcgtccccatccggaaggcctgacggcccgccggcgccccgagcccctagcccttctcgggggccgcccctcgcccgcagccaccccggctgccgctcacctgcgcgcccggcgtcctcttcttccttcctccggaggcgactggagccgaccggcggtgccgccccctccctccccgccttcttccgccccgccccctcggagccggaactgctccagcccccgcccttctgcccgccttccgcggccccagtgtggcgtcacttccgccagcgcccggcggcgcgccgggagtctgggtctcgtgaacgcgccaggagcgtccctacagccgggaacgcgcctcgcggatgacaacaaattcgtcgcgcggcggcagtggcggtggctgcctcagcccctgccgcctcctctcgcgctctcttgcactctctccgagccggttgggaccctcctcggaagtcccctggcctggggccaggaggacccctctgcgtcttgcctccgccaggcccagcgcgagcggtgcggcgccggcgatggggtctccctgagggactcccggcaccaaatagggatggaggggccgccccaggcttaggccccgccgcggcctggagccggagtcgctaccccgaggccggagccgtcgcaacccgcagccgcagtcagcccagctgccagcagtcactatgccttggccgttttcggagtccatcaagaagagggcctgccggtacctcctgcagaggtacctgggccactttctgcaggagaagctgagcctggagcagctcagcctggacctgtaccaaggcaccgggtccctcgcccaggtccccttggacaaatgggtaagagctgccggcggcgagccgggcggggctcgctcccctctttagggcgctttgaaccagtgccatccaagattggtgacagtcagtccctccttgggaattgtttggacccgagtgtgacacggctcagagaaatgtgttagagtgttgtttaatctgtttctaacaagtttgctctcctaaatcacgtgttccggaaactttaacagatgtaatggaatctacactgtgggaataattgagtcagtgcttcgggggtctgtgaagcaggctcaataggtccgtgggaggaggtgaccagaactgtccctcgggatgtgaggggccgcagggttttgtggcaaacaaaccctgccttgtgggatgacattctggaaggattaaggatgaagaggacctttggatgtcagaatccctagttatttgttttgggttggctgcttgcgcaccatgtttgccttgtttgtcatcgtgcagcgtttgccatctggaagaaagttaggtgaaggcctcttgtgccggtttgcctgcttttgcttgattatatgtttacaagataggtttgtgtatccagcctgtgaatggtcgtctggccctagtagtgctgttgagttatgcctctttgctccacgtgacagatcgtaaaagcaggtgttgcaaaagcgctgaagttgcaattttcagacattttaaaacctgccttctacttgtcatctagaggctgtgaattcactcattgctatacaggtgcttcatctgaatttcgactcaccacatgcagtcgtacctgcatttgtgtgttcaatgcatagcattttacttaaagtatattcacttttgggtttgacaggaatagagtgacttctaccctttgcccaacccttacttccttagccacagaaaatcttaaattatggaaataccttattatgacccttaagcgaatttgtgctagagactataaatcagtatataattttatcagtatgtacctgacataaactagggagaggacacaagatagtggaaagagccctggtttgagagcagtaagacccagtcgctcaccaggaggtgagagtcctacccctggagagactctccagaccgccacaattagccgagtgataatggacttagcaattcacctgagttcagtaaacactaatggagcacacacttcatctctgtgtcgtccgtcttatggtattgtattcctgtaattcttccaaaagatagggattctgaaggatatttttgaattcaacaacccatgattctatacttttgatacagttatgaataggttatcttgaaaaaagagggttcaggatttattaatgccttttgtgggtggaag

SEQ ID NO: 1241368 - DNA, 4001 bp, Homo sapiens
aaataaataaataataaaataaaataaaaataaaaatcatgatattttatatacaacacctgtttgttttttttctttaaaaaaatctggagacagatttgggttcctaaatagcagcaattgatgggaacagactaatggcccccatcaaccagcgtatgcgctctcaggtctgccatggcccatatctggcccacttttctcatttttgttacctttgggcccttgggggcagctgggtgtgcgatctctactccaaggtttaaggggctcaaagttaatttctctggtacttcttcgggagccagcatttcaaagtggaacccaggaaagactcgccagtgattagcactcatgaatcttcccaccaaaacatgtgtatccctatggataggggagaacttgaaagaacttctcagatgccctgtttactacccctctgactatagacatttcaccaaagctccctctcccctctgccacccctagcatattaagctgctctctgaacttgctattgccatccctgtactaccaactcagtctgctagatggcaagggtgtaagtgggaacctaggcccttccaagatggttcccaagcccagcagtcccagcctgtcctgaaggtaccttttgtggagaaagtaaagatggtcctggcacagaaagcaggtgatgggcagaaagtgtctttcgaagaggaggaattgggtggccacaactggatcttccttatttggagatgcaactccctttccttacctagccaggctacagggactcctggtgccaagggacagggactgctggtgaccactagagtgtggcagacattaattagcttagaatccctgaagaaatgccttacctaatggctaaatgcctttggattacacctttggatctgtactacgagtgaccagaagcatggtaaatgctgctgccctccgtcacgacccacaagcaggaaacctgaaatctcttaggcaatttctgccttctcttaccagtgataactatgtaaaccatgccccgttcctttctgcacttgtagaactaaactttaagcccaagtatccatctcatcagcactcctagaagacctgtgtttccaattcaaatatgcattctgattactttagcagattttatttttaaaccatgtcttacacatgatttgagaaaaagactcctaaaatcccatttggaagagggaggactatacattattaacgtgacgcaaagtcccatctaacgtgccaccttccttagtgccacaaaagtggttctcaaacttcatggcacgttaagaaccatctagaccgcttataaaaacatgcagattctcgagcccgttccaccagagatgaacagagtggctctggagcaggccccgggaagaacatgtgaaagccgtgaagctccccaggtgattgtcatgactgcctctcctcgctcggggccttttttttttttttttgagccggagtcccgctctttcgcccaggctggagtgcagtggcgcgatctcggctcactgcaagctccgcctcctgggttcacgctattctcctgcctcagcctcccgagtagctgggactacaggcgcccgctaccacgcctggctaatttttttgtattttaatagagacagggtttcatcgtgttagccaggatggtctctatctcctgaccttgtgatccgcccgcctcggcctcccaaagtgctgggattacaggcgtgagccaccgcgcccggcccggggactcttaaaatacaaacattactggaaggtcacctcctgctagggccaagagaagagcatgaagggctgcgagaaattgggaggcttggggcgacgtttggaagccttagtggagggaggggtctgttatggggagcagggagggcggagcagaagtgaagcgcgaccggacagcgactccaccctgctacgcactccctaccaggaccgcctcctctggcccaaccctcccggaacttcgagccccagcgggcagcgcgcagcacgcaggcgcagagcgtgcccggcgcaaagcactgcatgccgggagtcgttgtcggcctgggcgggcggtgcagctcacttctgaccccgccccccagggtctccaggtgtctaaccagcttccctccacccgggtgcgcgtcacagaccttccccgcctgcatctggcacttcgcgcgaccccctcctccaggccgagaaacttcgcgcctgggacctgccgacgactaaggctcagtgagactcgacgaatcaggcccgtgtctttcgtccgggtaaagcgaggggctggactagaaagatccttccggtcgcctctggctcgcccagctctcccgccacgccccgtacctgggggctgctgggagttgcagttccctgagcccgacccctcctgcccagtcccccccgccccgggccggccggccctcccggtcccgacatgctctgcgcctcctgccgcctcctagcggcccgggccgcgaccacgctgcccgccccgccccgagcccggggccccgcgctccgctgcagtgaagggcgttgcatttcccggggtaccccgagctgccctcttgtgactccttggcggggcggctggtcagacaaagtgtgcctccgggccggagggcgacccagaggagggggaagatgccgccggccacgggcggaggcctggcagagtccgagctgcgtccccggaggggccgctgtggcccccaggctgctagggccgcaggccgggacgtggccgctgaggctgtggcgcgaagccccaaacggcctgcttggggctcacggcgcttcgaggcggtcggctggtgggccctgctggccttggtgacgctgctgtccttcgccacccgcttccaccgcttggacgagccgccgcacatctggtgagtgatgggagggactcggcgggcaccatggcaaccgcgacgggacgccgccctctgattggcccgagggtacggagggggcgggatctataggaggagggccacggtggaggggaacttgaggtatcgggtgggttggcctctggcgaggtgcattctctgggagggggatcgttttgctctggtggtggggcagtgggattcttagtatctgaggaagcagccctcatgtcttccaggttatgctacagtgcatcacctggcttgcaaattgtggcttttaaaggtgctttcaactttccaaagagaattgcaaatttttgggtacagaattttctaaggcctgagttcctatgtctgcaggattttcaggcatcaacagaggagaaaatacctaactgtgtacctttatcctatagggcaaggacagtttgggtgttcaggtatggtgaccaaaggattttatgaggcagaactcttcttgtgagaagagatttattttcttaaaggttttagcttgtactatccagatactgggtgtcagaaatggaattctttaagcaaaaagcaggcaagaaaacagactgtcagggttgctttatttagaaattaataaattagcttgttattgtgtcgtgactgctggcagaagatgagactcctgggttagagacaaaggactttattacaggaaataggatgcatgttagaagcagtttcccttgccatccaagtcccacagggtgacgctatgggtttaaatggatgactgcacaggcagtgggttgcatccaagtgaaggaacgacaagcttggaaaatctgctgttttatagaaggcagtacgcagacctcctctttgtcctggagggagacactgcctcttctctcaaagttgcttgctgcaaacacaaccatgagaaatggcccaggtgagatgcagtcagggccttgcattcttggtatacccagaatgatgtgtagaggcacgagcaatctgacagcctctctcactcctcgattctatggtcttggcttctagcagattttcacatgaatatacaactcc

SEQ ID NO: 1241369 - DNA, 4001 bp, Homo sapiens
ctgccacccctagcatattaagctgctctctgaacttgctattgccatccctgtactaccaactcagtctgctagatggcaagggtgtaagtgggaacctaggcccttccaagatggttcccaagcccagcagtcccagcctgtcctgaaggtaccttttgtggagaaagtaaagatggtcctggcacagaaagcaggtgatgggcagaaagtgtctttcgaagaggaggaattgggtggccacaactggatcttccttatttggagatgcaactccctttccttacctagccaggctacagggactcctggtgccaagggacagggactgctggtgaccactagagtgtggcagacattaattagcttagaatccctgaagaaatgccttacctaatggctaaatgcctttggattacacctttggatctgtactacgagtgaccagaagcatggtaaatgctgctgccctccgtcacgacccacaagcaggaaacctgaaatctcttaggcaatttctgccttctcttaccagtgataactatgtaaaccatgccccgttcctttctgcacttgtagaactaaactttaagcccaagtatccatctcatcagcactcctagaagacctgtgtttccaattcaaatatgcattctgattactttagcagattttatttttaaaccatgtcttacacatgatttgagaaaaagactcctaaaatcccatttggaagagggaggactatacattattaacgtgacgcaaagtcccatctaacgtgccaccttccttagtgccacaaaagtggttctcaaacttcatggcacgttaagaaccatctagaccgcttataaaaacatgcagattctcgagcccgttccaccagagatgaacagagtggctctggagcaggccccgggaagaacatgtgaaagccgtgaagctccccaggtgattgtcatgactgcctctcctcgctcggggccttttttttttttttttgagccggagtcccgctctttcgcccaggctggagtgcagtggcgcgatctcggctcactgcaagctccgcctcctgggttcacgctattctcctgcctcagcctcccgagtagctgggactacaggcgcccgctaccacgcctggctaatttttttgtattttaatagagacagggtttcatcgtgttagccaggatggtctctatctcctgaccttgtgatccgcccgcctcggcctcccaaagtgctgggattacaggcgtgagccaccgcgcccggcccggggactcttaaaatacaaacattactggaaggtcacctcctgctagggccaagagaagagcatgaagggctgcgagaaattgggaggcttggggcgacgtttggaagccttagtggagggaggggtctgttatggggagcagggagggcggagcagaagtgaagcgcgaccggacagcgactccaccctgctacgcactccctaccaggaccgcctcctctggcccaaccctcccggaacttcgagccccagcgggcagcgcgcagcacgcaggcgcagagcgtgcccggcgcaaagcactgcatgccgggagtcgttgtcggcctgggcgggcggtgcagctcacttctgaccccgccccccagggtctccaggtgtctaaccagcttccctccacccgggtgcgcgtcacagaccttccccgcctgcatctggcacttcgcgcgaccccctcctccaggccgagaaacttcgcgcctgggacctgccgacgactaaggctcagtgagactcgacgaatcaggcccgtgtctttcgtccgggtaaagcgaggggctggactagaaagatccttccggtcgcctctggctcgcccagctctcccgccacgccccgtacctgggggctgctgggagttgcagttccctgagcccgacccctcctgcccagtcccccccgccccgggccggccggccctcccggtcccgacatgctctgcgcctcctgccgcctcctagcggcccgggccgcgaccacgctgcccgccccgccccgagcccggggccccgcgctccgctgcagtgaagggcgttgcatttcccggggtaccccgagctgccctcttgtgactccttggcggggcggctggtcagacaaagtgtgcctccgggccggagggcgacccagaggagggggaagatgccgccggccacgggcggaggcctggcagagtccgagctgcgtccccggaggggccgctgtggcccccaggctgctagggccgcaggccgggacgtggccgctgaggctgtggcgcgaagccccaaacggcctgcttggggctcacggcgcttcgaggcggtcggctggtgggccctgctggccttggtgacgctgctgtccttcgccacccgcttccaccgcttggacgagccgccgcacatctggtgagtgatgggagggactcggcgggcaccatggcaaccgcgacgggacgccgccctctgattggcccgagggtacggagggggcgggatctataggaggagggccacggtggaggggaacttgaggtatcgggtgggttggcctctggcgaggtgcattctctgggagggggatcgttttgctctggtggtggggcagtgggattcttagtatctgaggaagcagccctcatgtcttccaggttatgctacagtgcatcacctggcttgcaaattgtggcttttaaaggtgctttcaactttccaaagagaattgcaaatttttgggtacagaattttctaaggcctgagttcctatgtctgcaggattttcaggcatcaacagaggagaaaatacctaactgtgtacctttatcctatagggcaaggacagtttgggtgttcaggtatggtgaccaaaggattttatgaggcagaactcttcttgtgagaagagatttattttcttaaaggttttagcttgtactatccagatactgggtgtcagaaatggaattctttaagcaaaaagcaggcaagaaaacagactgtcagggttgctttatttagaaattaataaattagcttgttattgtgtcgtgactgctggcagaagatgagactcctgggttagagacaaaggactttattacaggaaataggatgcatgttagaagcagtttcccttgccatccaagtcccacagggtgacgctatgggtttaaatggatgactgcacaggcagtgggttgcatccaagtgaaggaacgacaagcttggaaaatctgctgttttatagaaggcagtacgcagacctcctctttgtcctggagggagacactgcctcttctctcaaagttgcttgctgcaaacacaaccatgagaaatggcccaggtgagatgcagtcagggccttgcattcttggtatacccagaatgatgtgtagaggcacgagcaatctgacagcctctctcactcctcgattctatggtcttggcttctagcagattttcacatgaatatacaactcccctggctactcacatcttttcagtttgtcccttacagcatttaattaaggttgttgtcaatgggactctaagcagcagaataaggccagcttacagtatttacctcaaccatgccctccagggtcctggattcagccacttgtgaataagtcctgggggcaccgaggaatcttatttcagacatctgggctgcagtctaagaccagtctattaaccactgtgacctgtgcacaggggttcagattgatctctgatctttggtgtcattaccagtaattacaatagcccactacccttgtaaaaatttttttaagaaagtaattaccaggctgggcgcagtggctcacacctgtaatcccggcagtttgggaggccgaggcgggcagatcacctgaggtcaggagttcgagaccaacctggccaacatggtgaaactccgtctcaactgaaaatacaagacttagccgggcatgatg

SEQ ID NO: 1241370 - DNA, 4001 bp, Homo sapiens
gagctatatttctaacattatttcctgaatacttgaacaaaacactaccaaaaccaagtcctctgcagctaacattttccatgtagaaagcagttttttaaattcccgaaaataatgcacataagaaaaatggctagaccatctgatctaaaactctttgttttaaataattaattttgaaaattgtaaacaaaaagggacagcgattcggatatattccccctagcaaacaaagaaggcaaatcctagctgctgctgggaacaaaaccaaaacttggggctctgaaagcagcccgcgacgggtgcgaaatcacagggtgaaaaaaggacctagaaataaactgagctctgcacacgcctggctcttgcctcgggagcacgcacctcccagccccgctctcagcagctctcactatttaaagccggatctggtgtttaaatggagaggcggtgacgtaggcctgaaaagcaccttcccatcctggcagagtctatattagagagcggcaatggctctatataaacagggcagccaaagggaggaggaccacaaggctcagggactgaaaagcagggtaagcggccgcagccatgatggttagacccgagtcgccaacggtacggtgtcgggcggccgcgggctggtctgcggcatttgggaccgggcaaaaaacgtgttttattgtcatcataaaaataagagttgggtggactagtgatcacactgcgttggtgactgaaaaggttatttatgtgactgctttttgcaaacctacgtgatcgcaagtaacaaaaagggaccaacgggaagaagtaggtaaatttcaaggcgaaagcggggacacttggaccactgcaggctttttttgtttgttttggtgcttctgctaggcgaagatacgatgggggtcttccccttcgccattttacccattcggaaggaactgagataagtgcttttcaaccaaccttcgtcctttttttaaacataaaatggcctcagagaaggttcccaaagcacagccgccaaaaacaacctaagaaacccccaaagtaaccattaatcttccactgcattaaagtggatcacgatgggtctcgggggttcgcccgattccccacacacagtttttgttctgtagccactcggggagccctcgtcaagccagcgcggacgggcccctcggggggaagcggcggctcccctcccgccctccctcccggcggccgggttctggggccggggctgcgcgcccgaccgggcccaaccgcctccgcggcccggcccggcccgcggcggccccaggccccaccggcgcccccgccctccccgcgccgcgagccctcggcgcccccccgcgcccgccgcccggcgctccggcccgatccgcccgaggcgggaagcggcggcggcggcggccgcgcgggcggctgaagagtcgaggccgggagtcgccgccgtccccgcccccgcccggtccggccgttgctgcagcctgaacgaagcccccgccggccaccgaaccacgtccttaccacggtgtttgtatttgccgagttcgccatttccacacacaacacaaacaagagggggcaaccccaagaaaacaagataaaaacaaaaccaaaaaaaaaaaaactataacacccggagggtgacccaaatcaccgcaagattggggaaaaaattttaaacaaaatcaatcctgaaggagtaggggagagcggagagaggaggaggaggggggcactcctcccgcagctgaaaacctcgagaatcgccttaaaaaaaaaaaaaaagccacgacccttcaggggtccggggggcgttgcccgctccccaccccgcgccaaggagggaaaccaccaccggtcaccgctccctgcgccgccgctgccgccaccggctgcagctccagccgtccggtccgcccgcttctctcctttatatagcgagccaacaagctgcgcgagccaccaccgccgccgccgccgccgccgagagacagggtgaagggggagggaggggcggaaagggcgggggcagaggtgggcggggctgagcgcgagacaccgcgagagccgcgtgcgcaggcgcgccggggcggaggccgccggcgagccgcgttgtcacgcgccgtggcgggtactggactggcggagcccggggagtgaagtagtgaaatcggacctacgcctctccaacgctcgcgtgatcacgtggttggcacccaggcggaagtctgcggcagttctttgcggtgaagaacttgcaaagcgttgctggaaaagacgggagttctactgacactccagtccaaagctaggtgggaccgcctcctgtcgcacgtttccgcctggtcccgcgctttaggagctaggaaatgtgacagaggcggtgcctactgcctcgctaggaatggccgcggaggaggactggtcacgtggcgtggcttccggcctctggcgcgttcctattcgggaaggttttaaatgcggagtcatctcttgatttgtcagcgaggctttgactgtgagcttcgcggcgttcgcgcctcaccgcctcaccgagggtgggtctttcgcgcgcagaattgtgtaggattttccaaagggagtaaaagccgatcggggcctacttttaacattccacaattagtaacgtctgattcgtttgtttccacagtgggtacgctgcgaagactaggcttatgttacccagaggttagtcctctactaggccacgtactttaaataatttatcacgctagtggaaatgcggggtggaagaaaaccccaccagcctttggattgtaacagcacagtaactttccctggtttttaaaaatattgccaaaatactgcgactccatgtggccaacgtatagtgactgatcactttgaaatgcatgcccttgacccaccaactcgcatggcctctcgctataagagagcaagccggctgtgttccatgttcaattcaataagtgcaattcaataagcttttgacttgttctgcccaagcaaatcctgcctttatatcgaccttgcaagcagaacagagaatgctgtttggaaggcagaattcatagtacctagttttcttgtccctgggaattttgagggacttgaaatgtcgcgtggatgagtgagggagtttgtcttccagagacaaagcaaaacgaaacgtcaaagttctgtgctggtgaaaccagatttgaagaatatcaaaggcgtcttaccaaagaggaaaaaaaatgcatcttgccaagacttgaagaaagggattagagaaaccagaggccttgaatactcagaaaatgggagattgtgaatgggtgtagaggatatctatgaaccttgacatttcttttcacgccaagtccattcccctgttaacagttgcttcccagtttcctgcacagctgcatggtctgggacacttaaagaaaaaaatcacaggaaatcagtgttcttggtatattatataaagttatgattctatcaacatttgtaattcatttaatattcaggtgacagcccgaaaatttacactaaacaataccattcctgttaagttttactacatattgagaggacttcttgttacctccctattacatactcccaaacgctttgcacatggaatccctcaccttccacctagttttcccccctactattgatattcttgactaaaaggttgagtagtttcgccatcaattaaagttaaaaccactgcagacaggacagggaagaaaagctacgaggtttgctcttcacagaattaatctgtgaaataatggattgtagttactggattaaaatggcagaaaacctagtcttggcctccttaagaccatcagactccctggaggctctgagttggcttctctctttacacctagattgcaacaagacctaagcacttggttaatatttacccaggaacttagattgcttgtgtgtctggcatctagccatcatggattccattccaa

SEQ ID NO: 1241371 - DNA, 4001 bp, Homo sapiens
gctctgaaagcagcccgcgacgggtgcgaaatcacagggtgaaaaaaggacctagaaataaactgagctctgcacacgcctggctcttgcctcgggagcacgcacctcccagccccgctctcagcagctctcactatttaaagccggatctggtgtttaaatggagaggcggtgacgtaggcctgaaaagcaccttcccatcctggcagagtctatattagagagcggcaatggctctatataaacagggcagccaaagggaggaggaccacaaggctcagggactgaaaagcagggtaagcggccgcagccatgatggttagacccgagtcgccaacggtacggtgtcgggcggccgcgggctggtctgcggcatttgggaccgggcaaaaaacgtgttttattgtcatcataaaaataagagttgggtggactagtgatcacactgcgttggtgactgaaaaggttatttatgtgactgctttttgcaaacctacgtgatcgcaagtaacaaaaagggaccaacgggaagaagtaggtaaatttcaaggcgaaagcggggacacttggaccactgcaggctttttttgtttgttttggtgcttctgctaggcgaagatacgatgggggtcttccccttcgccattttacccattcggaaggaactgagataagtgcttttcaaccaaccttcgtcctttttttaaacataaaatggcctcagagaaggttcccaaagcacagccgccaaaaacaacctaagaaacccccaaagtaaccattaatcttccactgcattaaagtggatcacgatgggtctcgggggttcgcccgattccccacacacagtttttgttctgtagccactcggggagccctcgtcaagccagcgcggacgggcccctcggggggaagcggcggctcccctcccgccctccctcccggcggccgggttctggggccggggctgcgcgcccgaccgggcccaaccgcctccgcggcccggcccggcccgcggcggccccaggccccaccggcgcccccgccctccccgcgccgcgagccctcggcgcccccccgcgcccgccgcccggcgctccggcccgatccgcccgaggcgggaagcggcggcggcggcggccgcgcgggcggctgaagagtcgaggccgggagtcgccgccgtccccgcccccgcccggtccggccgttgctgcagcctgaacgaagcccccgccggccaccgaaccacgtccttaccacggtgtttgtatttgccgagttcgccatttccacacacaacacaaacaagagggggcaaccccaagaaaacaagataaaaacaaaaccaaaaaaaaaaaaactataacacccggagggtgacccaaatcaccgcaagattggggaaaaaattttaaacaaaatcaatcctgaaggagtaggggagagcggagagaggaggaggaggggggcactcctcccgcagctgaaaacctcgagaatcgccttaaaaaaaaaaaaaaagccacgacccttcaggggtccggggggcgttgcccgctccccaccccgcgccaaggagggaaaccaccaccggtcaccgctccctgcgccgccgctgccgccaccggctgcagctccagccgtccggtccgcccgcttctctcctttatatagcgagccaacaagctgcgcgagccaccaccgccgccgccgccgccgccgagagacagggtgaagggggagggaggggcggaaagggcgggggcagaggtgggcggggctgagcgcgagacaccgcgagagccgcgtgcgcaggcgcgccggggcggaggccgccggcgagccgcgttgtcacgcgccgtggcgggtactggactggcggagcccggggagtgaagtagtgaaatcggacctacgcctctccaacgctcgcgtgatcacgtggttggcacccaggcggaagtctgcggcagttctttgcggtgaagaacttgcaaagcgttgctggaaaagacgggagttctactgacactccagtccaaagctaggtgggaccgcctcctgtcgcacgtttccgcctggtcccgcgctttaggagctaggaaatgtgacagaggcggtgcctactgcctcgctaggaatggccgcggaggaggactggtcacgtggcgtggcttccggcctctggcgcgttcctattcgggaaggttttaaatgcggagtcatctcttgatttgtcagcgaggctttgactgtgagcttcgcggcgttcgcgcctcaccgcctcaccgagggtgggtctttcgcgcgcagaattgtgtaggattttccaaagggagtaaaagccgatcggggcctacttttaacattccacaattagtaacgtctgattcgtttgtttccacagtgggtacgctgcgaagactaggcttatgttacccagaggttagtcctctactaggccacgtactttaaataatttatcacgctagtggaaatgcggggtggaagaaaaccccaccagcctttggattgtaacagcacagtaactttccctggtttttaaaaatattgccaaaatactgcgactccatgtggccaacgtatagtgactgatcactttgaaatgcatgcccttgacccaccaactcgcatggcctctcgctataagagagcaagccggctgtgttccatgttcaattcaataagtgcaattcaataagcttttgacttgttctgcccaagcaaatcctgcctttatatcgaccttgcaagcagaacagagaatgctgtttggaaggcagaattcatagtacctagttttcttgtccctgggaattttgagggacttgaaatgtcgcgtggatgagtgagggagtttgtcttccagagacaaagcaaaacgaaacgtcaaagttctgtgctggtgaaaccagatttgaagaatatcaaaggcgtcttaccaaagaggaaaaaaaatgcatcttgccaagacttgaagaaagggattagagaaaccagaggccttgaatactcagaaaatgggagattgtgaatgggtgtagaggatatctatgaaccttgacatttcttttcacgccaagtccattcccctgttaacagttgcttcccagtttcctgcacagctgcatggtctgggacacttaaagaaaaaaatcacaggaaatcagtgttcttggtatattatataaagttatgattctatcaacatttgtaattcatttaatattcaggtgacagcccgaaaatttacactaaacaataccattcctgttaagttttactacatattgagaggacttcttgttacctccctattacatactcccaaacgctttgcacatggaatccctcaccttccacctagttttcccccctactattgatattcttgactaaaaggttgagtagtttcgccatcaattaaagttaaaaccactgcagacaggacagggaagaaaagctacgaggtttgctcttcacagaattaatctgtgaaataatggattgtagttactggattaaaatggcagaaaacctagtcttggcctccttaagaccatcagactccctggaggctctgagttggcttctctctttacacctagattgcaacaagacctaagcacttggttaatatttacccaggaacttagattgcttgtgtgtctggcatctagccatcatggattccattccaatatattggttttccagtccctcaatagctgttatatgccttcattgcaacatatgtgtgccatccagtttagtttcggaaagaaatattttctgttataccaaaattgtaggactgaatacttggaagctgcagccctttaattcacaaaacaaaatttgtgagagaaaacttctcccaagtaagattacatttagcatcatatttaaattgtttctatctgaactttttattcttggtctcctacagcttgaatgacgtttctaactttaacagctct

SEQ ID NO: 1241372 - DNA, 4001 bp, Homo sapiens
caagaggccaggatggaaaggagggaagggccggcattccagggggagtggaaccaactggaccaagaagagcaagagtggcaggagtgtgcctcacctgcagtagcatgatgtcgttggagaagttcttaggattataggctggatgggggatgggtcttttcacagggataaactgctgggtcggctcctgttctttgatattgtgggcccccaaggtgacatttatggagctgcacagagagcagagtgaggatgggggtggagtcacagggtatacagcccagagacagtgaagagcaggtgacagctggggcagggctgcagctgaggggaaattaaggggacagtcggtccccaggaattggaattctggtaattgcaccaggtttctcagggttcggttccccctagaaacacaggtggaattgcttcagtttgtattctatgccaaagtatgcccccagttctaaatatggcaggcttggtcactctgctgtttcttacttcagcagcacctctggaaccaaccttcccctctctccacaaacttaactgcccttttctcaccctctaaggagacctcctggcatgtgtgttcacaggagcccagggagctccttgggaagaaggcaggggtctctgtggagtgtttccaggagggtgtgggctgttttctgctcctcaccttccccaacagtgagcagctgtcagcacgaagtcgtctcgtatcaggaagccaccgcacctcttcagagacttctgatcccagatcataagataagccatgtaggggcgggagtggggcttggcctcatgtcccccgatgatctcccctgaaggaaaagtctgtctgcttgtgggcacccatggaatctgctgggtgggcacctgcttagtggctccagaactcctgggcatttgggagcctgggatagcctggagttgggagtggcctggaggaaggggcttcaatttcctgctctgaaaaagggaagaacagcagactttggtctgtaaatctttcttccatatgtagttgaaggcgagcatacctgtcttagggacagtgaaatcccagaggctcctgatcattcctctcctgactttgctttgtttcaggtgagtttccaagacccttatgagtcctgtggtgtctaggatagtgctgctttctaatggccagggtgtaagtggagggatctagatactgtcatatcctgtttcctagagcctgacatgtagtgggtgcccagtaaatgttcatggctgcatgatggactggctccagttagcctctggatgagggctggtagagcagtgctggtggaattctagaaagcagggaagctggggcctgccgtagtgcctcatccttggaaagaggggagccaccaaaggccagggaagaaaagcagagttggagaatgggactgagcaaacacattaacagtgttctgaggacagtgattgtaccaattctgctgtcagctgagctctgggtttctctcctaagtagacagtgagagaagcacctgtcttatcccagaaacagaagccaggcctactctagaataatttaatatttctcttttctagtttcccatcctctgccatttacttctaggaaagtcctactctccaggtgacaaaggtgggctctggggaagggatagtacccactggctcttcttgagaatggcctgctgctctgccattcctgctgatagcttatccagcatcacacttggggggtcttggtagaatgggagctggagttcagaacattcctggtagatagatggatcaggaatgtggagaaagggcaggagacctgtgggatggggttgggcccccgagggtggagacggtcactcacctgcatctgccctgggcagcaggaggaaggccagcagaagcaggattggttgcatcttctcaggaaggctgccctggttggagctgctgttgtttcctccttgctctcttttagctcttgggagaggaaagaggtggagcaggctcagtgacttcatgttcccctctggttttgtggtgtctcatcacagattttctgtaaatgctgcccacccccactgcctctgcctgatgacgtcctctgggtgcttgtgtgagaatcatgcagtgaccacatcatcacccacagctgatgactcagagtggaccacctattcagcccagagcaggaacccaagcctatgaagtgaattgtaggatgtggtatcagccagtagaggtactggagcaccagaaacctgagttcccagtgatagaaccgccaatgcctcatggccatgctgctaaatccatcaggatagtttctttagcaggtatgtgtttgagcccttctgttgtgctagaaccaagcatgttggagatgtgtctccttcacttagagagctgaccatctggttgaagagacggaaatgccaggagccagagtacagtttggggagggctatggtagcacaatacacaaggcagtaacaaagcatggccaccatctactagacccatctagcaacccatttattatcatagcttcctttctagagaatttctaacatcccttatttagttacaaatgtttagtgtgagagtccacctcttttctgaatgctttcaataaaagtcctgtacttgacattttattgggctagattaatgaattgctaggagtcaaatccactttgggtaggctggggtcagtctactcaagccactagaaccaagaatgagaaagggctggttctctaaaggacgtttgtggtgctaaattgctgataccatatgaagtgaggaagcatgccaggcagccaaagatcagtagttgtgttgtttagtattctgtctcctgtccagagagccacacttcttacatagcaggctcagcacataacaggctcacagtaaacatttgctaaacaaactacactaatgctatcattataatggatgtgaaagattgttgtttctgaacagcccgtgcccaattctgttaaaagacaactaagtctctctacatggttcgattcttgtgatttgtttccacctttatattttctgtgaggaaatttttctatgaggaatggtatatctcaaaatatagaattccagtgtaaacgtcttccttgtcaatagcaagccaactacatttatcaaacttctattttttgaacctagcttgccccatagtagacgttttaaaaataattttttctgattatagtcataatatatgtttgttaagaaaatttggaaagtaggaagggaaaatatcactttttaacctgtctcccacagactgactgttaccataagcagtgtgttttaaatacttgggatcacattgtacatacaatgcaatttattttatccttgattaaccctacaaattaagcattttccccatgctcgtagaaatcttagtcaatacaactatagtctttctttcctaggcattaaaaaatttaatatgcaagtaatttttaaataattttagcaaagcgaaaataataaacattacctaatttctcatcattcactgataaccatctttaatgtcttgaaatatgctctagcacattttttctcatgtaatatctgcattttttaaaattaaaaggggattatgctaaacataagtttatgacccatttaaaaaattgaggtaaaattcacataacatacaattaaccattttaaagtattcaattcagtgacatttagcacattcaaaatctgcaaccaccacctctggatatttcatataaacggaatcacacaatacatgacctgttgtggctggctacattcacttgtaataatgtttctgagattcatacaagctgtagcacatgccagtattcgttctttttaatggaaaaataatattcccattgtatgtttataccacaagttatttgttcatctgtcaatggacatttgggttgttttcatcttttggctattgtagctaa

SEQ ID NO: 1241373 - DNA, 4001 bp, Homo sapiens
tgggcccccaaggtgacatttatggagctgcacagagagcagagtgaggatgggggtggagtcacaggggatagagcccaggagcagtgaagagcagatgacagctgtggcagggtagggctgcagctgaggggaagttgaagggacaggagggctccagggctgagtgactgtgccctctacttcacaaagacatgaagagtagggcttctgggggctctctcttgccttcaggaaatatcatgaaattgctcgagtttgcattttgatccttaatgcatggattcaacctttactactgccttattgggccagtgtgtgaaaccatgccacttgctctgacctctgaccctctgaccctctgaccctgtcctatttctcagcctttcatcatcttagtcctattcccaggtggctgctccgatgagctttcatgggcttgtgttaccaggaactctggaagctcccctgggctgcagtccccaggagaaaacaagggtccctgtagggggaactcaggaggtgagctggtgctgctccttaccttccctggcagtgagcagctgtcagcacaaagtcctttctcactaggatgccgccacacctcttccgactcttctcttgcagaaactgaacaaaggccatgtaggggcgggagtggggcttggcctcatggcccccgatgatctcctctgaaaggaaagactggaagataaagtagctggggatggctgcagtcaggagagaaggcttaggacgacagtgattgagggtgaagtgttttgtgtgctgcagacagtgagggaggggtcctcctgagctctgcaggcagtactccttgcaggcagagcaagcttttctgaactttaagtctcagaaccttctctcagaaagaatggacagtgcttgacttctgcatcctactgcagaaacacacatggaggaagaaagatctattttcacagtggtagagccccagaggatcctggacaggacttcccaggctcctcctttttagtgagtctctctgattcctctgagcctctgctgtcctcctgattggtgccattttctaatgatctacccatgagcttctggagttggattttctaaaattctcatgtgccagggctgaacacattctaggttctcagtaagtgttgtttggtgcataaatgaatagcctccaattagcctttggctgaggtttagtgggggtagtgctggtgggattcaggacctcagggatgttagagggggttatcaccaggtcagtggagtagctgagggcctgcaaaggcagaaggaagtggagaaatcaactaaaaatgaatcgcaaagcccaggtggagccaaggtaatgggagagctatggacacagtcatcttgccatctctgagatcagttgcaccatgggcttccctcctggcaggggtgactgggtgggggcactgaataagtggttcttaagctgagtccagtaacaactcctatgactgcaacttggtgtctgagctcctctttcctgggttggagtgtagagtaataattacttatcttttttagcttcacattccctaccaaatgcctttctaagaacaatccacactccaggtcataaaggagaggtctagggagaggctaacacccattaaaccttttagggaacacccttcatttttcgatctttgctgagtgtctatctagcctcagatttataagtctgggtgtggaatgggaggtgggctcagattgaggaaaattcctgaccagtgctcatgggtacagggtatcttataagatgggttcaggcctctggaatagggatagtcacttacctgtcccagccccaggggtcagaagaaaggccaacaggaggaggaatggctgcattttctcaggaaggctgcccaggtcagagctgttggtgttgactccttccagaaacaaatgctggagggagatgaaggagggatgggtacagtaaactcagagacctcctagacttgtccccttctggttttgatgggtgtcattatagaaggtggtttattaaaattatctggtttggtttaagttgacatggcactgtcacatttacacccctgctgctgagtaacaaggtgaaagcaagaataaagaacaaggaggtggagctgttgaagctgtggctgcagctagcagaaaggctggtactgcagaagctcctcagtgactgagaaccaagaatgtctccttttctcagttcttggctctttttctactcagataaaatcatgaataattatttagcaagccagatccagggatatgagagacatggctcttgcccttgaagaattgatggttagcaagagtagactgaaaatctggggttagagcacaagatggtaagggccgtggtggggaaatctgcctgttggtgtgagacggaggctggacttgccttagcagtatgcagagttgcacacacccaacaaatactgcaaatggcaacccattcctatcttaccactatctcagattcatatttttgggatatttagaatcccctctttaaatataaatattctgtgacaaagataactttttttattccacagttctgcacaaaagttctggacttgatatttattgaaccaaaatgagtcatcattgggtccactgaagtgtagtggactgattgctttatgctttggttatttagccctccttaagctgaggtggggactgttccactccatctatggtgcttatgaatgaggaggggatttcccttgagaaatgctagttgttgttgccaggtgatggaaaaatggatgctgatcatcctgataataattgttcactaaggccgggcgcggtggctcatgcctgtaatcctagcactttgggaggccaagacgggtggatcacgaggtcaggagatcgagaccatcctggttaacatggtgaaaccccatctctactaaaaatacaaaaaattagccgggcgtggtggcgggctcctgtagttccagctacttgggaggcggaggcaggagaatggcgtcaacccaggtggagcttgcagtgagctgagatcgcgccactgcactccagcctgggtgacagagcgagactccatctcaaaaacaaacaaacaaacaaacaaaaaactgtccactaagtattctctcagtttccagagagccatgtctctgatgtcccttggctcacagtcataggctgtccataaacaaaaatgtgtatatatacatatgtttgtatatttatgtatatgaatatatataaatatatatgtatagttaagtaggaacatgtaaatgataaaattaaacttaccaaaaattctaccaccggagatcattattaatgcttaagcatgtttccttctactatttttctaggtatttataaggtgctattcctgctattactttaacagaactgggataggactttaggtgatagacttttttgtgatgaattttccaggtgttctttgagcttcttgtatttggatgtctaggtatctagcaaggacaggggagttttcttcaattatttcctcaaataaggttttcaagcttttagatttctcttcttcctcaggaacaccaattattcttaggtttgactgtttaacataatcccacatttcttggaggctttgttcattttttaaaaattattttttcttagtctttgtttgattgggttaatttgaaagcattgtctttgcgctctgaagttttttcttccgcttgttctagtctagtgttgaaactttccagtggattttgtatttctctaagcatggctttcatttccagaagttgtgattattttttctttatgatatctatttctctggggaatttttcacccatatcctatatttatgtatatatatattttttaatttttaaagttgttttttcacctttctctggtatctccttgagtagcttaatgatcttctggattgtttatctggc

SEQ ID NO: 1241374 - DNA, 4001 bp, Homo sapiens
cccggatgccatttgattttcttgggattctaatctgtggaaccaagaagtgaaagaaaacaaaaagatgaataaacagctggctgctccaaggacactaccttatgttcaaatttctgctgtccacaagctggaaaggaacctcaaggatgacttttacagagggcctataccacacatcctgggtcccaagctcttacacaagctttatggacaaacagatttacaagtgccaaaacatgtcacattctaagcacacatgtgtttccacttgctccaagctgtccaaaaggagcatcctaaaaagagaactttccaattcactgagtctaaacaagaggattctccaccaccaccaccattatgccaaagttaaaactgagctgcagcttcccagttatgagtgaactgggggaaaagggaaaaaaatcaaagtctactttttccccccaaataactcagctatcaaattccataatagtttttttgtgcttctttttttgtctaagatctgttggtagttttttttttttttatcattaactctagaatcatccttcaggaatgacaaatcattccacacttgaacaactggttttcacataacagcctaagaaaagagcacctggaggaaacagcgtgacaagaagactgacagtgaggtcagtggcaaaagagtaatgcaaaggtgtaatgtggctacaacgagaacgtgagctgtgggtgttttgccagaacatggagtgcgctgaaaggaatgacaccaacacaggggcagtaaagatgggcacagtttgacctcaggagacaaaaattttcccttgacattacttttcatgtttttgctctgcccctcctctctgcaaggtatcaaactccaaagggcaactgagcctcccaaagctgaacaggcattgaaggttattatgatttaacgcttcatgtttatagaacatttggtttactcgatcgttttatgagtaacatcaaagtaactactcatttgttttctaacatggtctagagggggacgcagctgaggaggcagaatgctgggacttaatttgcagctcggccggccgttgcttctgagaacttaaggaaaatgcttttttctgtgccaaacttttcccacctgcaaaactgagataacgattcctgccttggatgagacattaagaattaataacacaatcgacttgtcaacaaaagccactacttagttaagttcagtgttttaacaattctgtttatcgttgatctatgactgcaaataaaaagttttgcaggcaaatttcgcacttggaaatgaagaccaacccaaattccaaaaagctagctgttcgtccccccctagggtaagtgtccccttgcgttttttagggtgcctttctttacccttcttaaaggttacagggcgtgaacggcaatcaggctcgattctccaccctctgcactcagacgtgttaaaacgctgctacagggacccaagcatttaaatgttctgactcaggcgtcttttaaattcttagagctgtctttacacgctgcactgaacgttaaattgattttacaggttattttcacaagatatgacccttacagggcccgagatgaatcaaaatgcagaacgggctctccggcgcctacttcccttctgtctgggcggccaaggattcccaagagcgacgacggtctccggccactggccggaatgactctcccagagctcctcttccccgaagctccgcccgccgaccctctaaagcaaacctgcacaccctggggcagctgaagctctcaaggcggtgccgagaacctcggctggggcgggctggccagcagcgtctacaccccagaacccgcccgcgccggggctccggaacctctcgttcgggccgggcgcaggggctgggggaagcgaggcccggaaagaccaagctgaaaggcccgggaaggggaaggagccgaaagtgcactagaggccgcgacgaaggaggtggaggcggggccacactcgaggcgggaacggcaggccccgcccctcgacgggtgcgcgctgggttcccaacgccctgggttcgcatgctcgggtggtggaacccggactgggaaacaggatggtctcggaaaggcttttttgccccttctcattagtgcctccccagtgaagggcagatgctgagaaaatggtggtaattgctaacatttattgagggcctacgatgagtcaggcactacgccaagcattttgcttgccttgcctcgttttttttttgagacggagtctcgctctgtcgcccaggctggggtgcagtggcgcaatatcggctcgctgcaagctccgcctcccgggttcaagcaattctctgcctcagcctcacgagtagctgggattacaggtgcccgccaccacgcccggctaattgttgtatttttagtagagacggggtttcaccgtgttagccaggatgatctggatctcctgacctcgtgatccacccgcctcggcctcccaaagtgctgggattacaggcgtgagctaccgccctcggccaggcctcgtttagttcttaaagcgtcctgtgagaaagtcaccattatactcattttacagagggggagaactgaggcacaaagggttaagttcgaggtcgccatttggggggtctaaacctgtcccaatagctctcggaaggaaccttcccagacctgccacccaagccgcgtcctgcgagtctcctcactaaggcctggctctgaggcgctgccgcccagcccagcccagcccagcccagcccatgccgggcaccatacagtgcttcctcagggtcaccttcctctcgaattcccaccacagactccctattagcgcgcattcctcattcgcctgttttgtttgtttgtttgtttgttttcttgggggtacggagtttcgcacttgttgcccaggctggagcgcagtggcacgatctcggctcaccgcaacctccacctcccaggttcaagcgattctcctgccctagcctcctgagtagctgggattacccgcacgagccaccacgcctggctaatttttatatttttagtagagacagagtttcacaatattggccaggatggtctcgcactcctgacctcaagcaatctgcccggccaaatatctttcacctgtcttaatctttttttttttttttttccagacggagtcttgctctgttgccaggctggagtgcagtggcgcgatctctgcaaccttcacctcccgggttcaagcgattctcctgcctcagcctcctgagtagctgggactacaggcgggcgccaccacgcccaggtaattttttttgtatttttagtagagacggggtttcaccacgttggccaggatggtctcagtctcctgacctcgtgatccgcccgcctcggcctcccaaagtgctgggattacaggcatgagccaccgcgcccggcccacctgtcttaaccttaaacccaaccctcactcccacccacaccttcggtgaattatttcaaaaatataaatttaaaaaaataaagagctgggcatggtggctcacgcctgtaatcccagcactttgggaggctgaggcgggcggatcacgtgaagtcaggagtttgagaccaggctggccaacctggtgagacccccgtctctactaaaaatacaaaaaattagctccagaggctgaggcaggagaatcgcttgaacccaggaggcggaggttgcagtgacctgagatcgtgccactgcactccagcctgggcaacagagtgagactcggtctcgaaaaaaattaaaaataaataaaaattaaaaataaagaaaatgtttaggcggggtgcagtggctcatgcctgacccagcactttgggaggccgaggcaggaggatcacttgagcccaggagttcgagaccagcctgggccacatggcgagacgatccccatctctacaaaaaaaaaatacaaaaagaaaat

SEQ ID NO: 1241375 - DNA, 4001 bp, Homo sapiens
tattaatggagtttggaggctccttattatcgaaacttacacattacgtgaccagcattatgaggcagcaccccactcccaacaaatagccctctagaaccaaaagcagagtggcaggtccggggtccttttgtacatagacagcataaaaaattgactaagtcaatcctggcataactgcagaccaggccctggaatgagcaacccaccagcattatctgcatttctaggaacttgggctagaaggggaggaatggggttggaagggttaggccacatgcctctagttaaaacctgatgaacttcctagatccccagctggaaaacgtaggagttggactaaattcctctcctgcctctaatattttatgaatacagaactcaactcaaactgggtagtatctcagagattccaaatttagttccacttttctgtttgcttatcagtcgcttaccctcaccctctggtctgatacctttatcctgtacaagtggtcaaagtaggttgagtaacatgtgctaaaaggagtaatatcttgcattctcccttgttattaaaatagaggaaactgccttgaaagaaaagactaaaaagcaataagccttagtatcagtatcttctgaaagctttaaaaaaataatactctcatctctaccaacagatttggattctgaagttctgaggtggagtccaagagtgtgcagtcagcttctggggtggtgtttgttagatacagttttttgtttatttatttatgtttgagacagggcctcactctgtcacccaagctggagtgcggtggcacagtcatggctcactgcagccttgcctcccaggctcaagcaatcctcctgcctcagcgtccccagtagctgggaccacaggtgtgcaccaccatgcctggctaatgttttaaaacttttttttgtagagacagggtcttactatgttgtccaggctggtttcaaactcctggaatcaagtgatcttcctgccttggcctccagaaatgctgggactatgcctggaatagatatgggtaaagaaccttttacatcagactcttgtgtcctactcccagaatgctgattcagtagcctgcaagtgaggcctagaaatctgcattttcacaagctctcaggtttaatacacaatacatttaaagaaagcacagcccaaagggtgtcagtggggtgtatgaaggaagcctggttagtggggagagtgggattagggaacagctgcttaacctggcttgtttcaagtccccctttctccctttttgccctcaaaaagttcccctcattttttcccctctactttctaattttttaccatgcactcacacagctatacagctatctccagagattactctggaaactctgctataaagatgacctggtctaatgccttgatttgtttttttttttttgagacagggtctcactctcctggagtacagtggcgtgatcatgactcactgcagccttgacctcctgggctcaagcaatcctcccacatagctgggagcataggcacatagcacaccactctcggttaaatttttttttttttttttttttttgtagagatagagtctcactatgttgctcaggctggtcttgaactcctggactcaaacagtcctcccaccttggcctcccaaaatgctgggaatacaggcatgagccactgcaccaggcctaatgtcctgattttataaatcccaaaactggggcccagagagaagagaaatcattaagatcaccatactgcttggtatctaaagtagtactgacccttttgacacctaatccaaagttttttcagctacctcaggttgcccctcatcttccagctgacaccatccagcacctttcagatactggcaaaggagcagtgtttcaaaattactttccaaatggcctcctaaaaggcagtcctcagagagaagcaaggttctgcatcttaagccttccttggtttcttaggttccaaagctgtttctatcagtctccaagcaaccaactctttagaattccatgagtctactcagagaacttgtgggttcagtcgggggtatatcttcaaccatttattaaatttccttctttgtaaactgagctttgagaaattgcatcttatttattgattatttattgaatggtagtttcatggagtttttggtcttttttcttttttgagacagtctcactcagttgcctaggctggagtgcagtggtgcgatctcggctcactgcaacctgtgcctcccaggttcaagcaattctcctgtctcagcctcccattacaggccacaccaccatgccccactaattgtacttttagtagagatggggtttcaccatgttggacaggctgttctcaaactcctgacctcaagtgatgtgtccgccttggcctcccaaagtgctgggatttgcaactgtgagccaccacacctagcctcttggtcattctttgaaaaataaacctcagccaggcgcgatggctcacgcctgcaatttcagcgctttgggaggctgaggtggcggatcacctgaggtcaggagttagagaccagcctgaccaacatggtgaaaccccatctctactaaaaatagaaaatttaaaaagaaaatcacctgggcctggtggcgcatgcctgtaatcccagctactcgggaggctgaggcaggagaatcgcttggacccaggaagcagaggttgcagtgagccaagatcaggccattgcactccagcctgggcagcaagagtgaagtgcagtctcaaaagataaaaataaaaaaaccctctagatatatgcagctccatattctcccaccacaagggtttataaatcctgagaaagaggcaaagcagggaacacatgaccacatagttctggcaggcgtcagattaccaggctgataaaacagatggtaaagtagaagctgtccgtcgacttttccattcccctttcagctcctccactgctacttaatctcctttgcccacacagttcaatcccattttccctgatctctaaatcctggctagattattagccattaacactagcttttacaaggagactcttcaatcttgtatttctaatagtataatttcacacgtacagaaattctttaagtcatagaagtcttacagatacagaaattctgatcttcaagagtccctttgtgaaacaaactaatttatcctgacagcaggaaagatttctgggcctaaggctctgtctcgttgacccaggtcatgctattcaggtggtccatctcttggttccaagcaagactgctgctgctgaccaacctgaatatggactttagcacttgagctcaagctgcactcagatggttagacccccataaaaagcagagggtacgttttctgttatgaaaagtaaagactgagccaggcgctgtggctcacgcccataatcccagcactttgggaggcaagttgggcggatcacgaggtcaggagatttaaaccatcctgggtaacacggtgaaaccccatctctactaaaaatacaaaaaaattagccaggcgtggtggcaggcgcctgtagtcccagctacttggaggctgaggcaggagaatggcatgaacccgggaggcggagcttgcagtgagccgagattgggccactgcactccagcctgggcgacagagcaagactccatctcaaaaaaaaaaaaaaagaaaattaaatactaaaaaaattaaacattataaccctgctaaggcaggaggatcatttgagcccaggagtttgaggctgcagtgagctatgatggcactactgcaccccagcctcagtgacagagggagaccctgtttctaataaatcaaaaccctgttgaaggttcctcaaaaaattaaatatagaattactatgtgatccagcaattctacttctgggtacatatccaaaagaattgaaagcagggactttaacagatatttgtatacc

SEQ ID NO: 1241376 - DNA, 4001 bp, Homo sapiens
tttggccccagttaattgatttctcaaatgagatttaataacagtttctcaatgtctcctgaaaaagcagaagtgttatttatatgaggactgtggtctcattaaaggattgttcaaactcttcaattatactatgggataattaatgaaccacacaagactcaatagagctttttaaaaaaatgcagatgtcattaaacgcttaattcagaataattttagaatttaaaaaattcagaatttaacccttatgttattcatagttaagaaagactattataaactacctcaacctttttgaaacaaagcaagaagaaaggtaagtgtattggttaaagacaagtaaaaaaataatttttttctgtagataatatattcattagtttaatgtagttaattttaattaataatttaagaattaaaaaggtactttggagtcatgtattttctgtgactaaagtcagatacaataatgaataatactaaaaaagtgacctaatctaacatccataaatagtggagggaacttaagctagaattcaggtctcctgactttcaggtgaggagtcttttcttattctcctattctatagtcatctaggtaaaacaactgcattccaaggcacaacaaatccatactacagtattctccaactgtcactattcttatattataaatcctgcctgcttatcagtgaagaaaaaaaaaaagtcaatggcattaaaatgtaacacaaatctcggcttcgatactttatctaaaattactttctcaaagacatactttctaaaatgtttggaaaattaaacaaaattctcctctccccatccaactaatgctcaattctaaccacacttctgctttccctacagcttaagtaatttcactgggagtattttctctggaagttcttaagtgtacttgtgggcccctttttttcctccttaaacttctaatatctttcaggctgtaaattccttaagggcgcctagccccaaaaaagtgctgcatatttgttcaataaatgaatgcacataaaaacaatggataactatgacctttaatgtaggagctcaagccattttattattatctgacttgacagtcaagaaaattatcccaacttgccagaggtatccattactgtgataaataaacactataaaacgctttataaagtttctaaagactttataatcacttgaaataacgccgcgttggccgagagtagggtgaaagaaaatgtttcctcacactaagcaaatgccaccaaaggaaaagctttctttcctggagagaactgcaacagttagaaagcaaatatccacactctccactgctcccttctgggaactctctttgagggttcctgcagaaaacgaacgggcctctgaggaagctcgcccgaaggccgggccggggcccggctcctggctgaccactggcgcagcggacgccgcagggcgggtcccgggagcggcgagttggcgaggcgggctccgacttgctgaccttccccacacgcccggcaaccccggctcccgctggcgggcagagtccacgcctacctgttgtgcacaggtgaagccagactttcccgtagtccaggaggaagaacggaccacgctgtttatcagccgaccctgtgccccagtcagccccttctcggcggactccagcccttagggtcaagacacctagcccctcgaccggttctcccaccggcttctttcgcgatcacattgctgccgcgaccaccctcgggatccccgagcgctcaactcatacagcggccctggtgcgttctccttcccagccaacaggcagcccagacacagccccctcgcgcccggaggtgtccccgctccctggatccccgactgcctgcctttgggggtcctcctcagctgagcgtgcgtcccggtccagcaacgttaccggctgctctgctaaccctagcagagtctggaattgccggcggcggcgacagcgaggcattgaggtgggcggggcgcgcgtggggcgtggccggaaagctctcagcggcgagcaccgcgggagctagcgattgggagcgcgccctgcgccgggccgctggtccaaggccccgccagctggccgccgagccatcgagcgcccactctggcaggcgtgactgcttcaccgtcgaaagagcgatggagactgcggcccaagttaggattaggacagcggtttttcagtccggagattccggccacaactatttttgtctgtttttatcgtaagccagagtctttgggtgcagctctgggacacctaaagggcctggagaaattcaggcggggccagtgctgtgggggtagatgttagacgtggaagggaccctagagagccttgactgtgaggactgaggtaaagtgacttgctcaaggtcacatactaagtcaatggcagaactgagactaatagcctcttaccttgagtcatgtgcgttttcccactacactcagcgttttaaatgtcatttttcaagtttcattttgaatctatctccagcttacaaaaaggttgcaagtatagtacaaagaactttttttccctgaattgagatttaaattgctgacaccatgccacattgtccctaagcaccttctacataatcacaatataaccatcaaaatcaaaacatttacataactcggcgttttaccaattgtcccaataatattgtttatggtaaaagattccgttcagaatcaggcattgtatttacttatcatgtatctttcctactcttcaaactggaactctcagtcttgccttgcctttcatattcttgacgctgttaaagattcctggccagttatttttgtagaatggccttcattttgggtctgtctgatatttactcatgattacatttagctaggtatgacaggactctagaagtgttgctgctttcttctcatggcaccctatcaggtggcacgattttaacttctctcattacagatgtttactttaataaggtgatgtctgttaggcttgtccagtgtggttacttttttcccccctttgtaaattaataagtattttgtgagggagactctgaaactctcctttcaagatatttgtaaatatcttgtttctcatcaaatcttcagttaatgtatttatattaattagtatggatccagaggtttctattttgttaaatgacttataatccgtttctttctctcttttctctctctctttttttttttttttttcttgagacagggcctcctttgttgcccaggccggagtgcagtggctattcacaggtcgataatgcaatcatggtgcacactacagccttgaacttctgggctcatgtgatccttctgcctcagcctcccaggtaagtagctgagactgcaggcatgcacaccaccacaccagccaatattctgtctctatcattatttattttgatgctcaattatcccaagtttggtgggtaggggccccattcattctatcttctgtgatatgtgtgtgtgtgtgtgtgtgtgtgtgtgtgtgtgtgttcaatttttttttaagacaagaagacaaggtctcatattcattctagcttctgtgttgtgtgtgtgtgtgtgtgtgtgtaatttttttttttttgagacaagaagacaaggtctcactctgtcacccaggctggagtgcagtagtctgatcacagctcactgcaggctcaacctcctaggctcaggtgattctcccacctcagccactcaagtagcagggacaatgggtgtgccactgtgcctggctaattttgtttgtttgtttttgtttttgtagagacagggtttcaccattttgcccaggctggtctcgaactcctgggcccaagcgatccacccgcctcagcctcccaaagtgctgggattacaggtgtgacccactgtacccagccttaaattctctctctcttttttttttttttttttgagacggagtctcgctctgt

SEQ ID NO: 1241377 - DNA, 4001 bp, Homo sapiens
aaccaagctatgggttaaaattaatattcctactaattcccattcattcaacaaatatgtatttgtgtcatcgtaatcatcagtcctagagtttcttcacctaccaatttttatttcttggaaaagtgtaaacacaaaactcttcaggaatatttttaaagatacgtgttaaaattcactagagaaatttctacacaaactgaagtcagcaaatggttgaaaacagatgtcactacagtaacccaaaggaacatgatgaaggaatgtacttacgtttcaaaacaacgatccacgttgtcagacatcaaaagcagcatgcatagctgttcaagggctattagttgcatgtccctttcatctccctgtcccatctgtagccattccagcaatgtatctgggtccacatctgccatggttttttaaaagtctctttgcttaaatttgaaaagtaaagggagaaaagtcctttaaattccgggactgaacagcttgggcttaaatttttcttcctttacatctgctagaaccaaattttcatagtgtcctcctagcaattaaaaaagactcctaagtacgtttggacgtaagagtgcttaatgcagtttttcaactttccttatccgccaggtttaacgtacagatatcataccaaatgaaaaccagttttgcacaagagtatataagctgattaggttgctgcttaactagaaaccagagctgtctgtgtcaaagacagtcagtcaagcttcaggtcccactactgctatcactaaagtctatgccaaaaggcaaagaacacctaactaaaggttctgttttttccagcaaacttcatccccctccttctctacccaaaactgatcttcagataagggttagattcagtattttgaggaaactctaaacaccttgatccaatccccctccaaattgtttctccttcaaaattacctccaatttcacatattctgctgacttctcaatttacttctattttaaagatatccaaatacaaacgacaattatatacaagatttatctatgaataaagagttggttaggaattttggcagtcttggcaactattcttaaaagttaaaaaaataaaaaaattaaaaaaggaaaggctaaaagtaaatgcaatggaccagcaggttacggatccgaacgaatgtaggccaacctagggccctctttccccagcttcacaagatagggcagttggttaaaaaaacaaaaacaaaaccgagaagcaaccccaacaggtaagtcattacaaaagcgccccgtaagcgccctgactggaggacagctttgggtcccacgtaacgcagccgcaagtgtgggaagccggcggcggggcgcggtgggcacccaacggcggcgaccagcggggttgaccccacacccggggcccggccgagccgggcgctgagaggcgctggcccccgcgctgtggttccccagcaccaaaccccgctaagttaactacctgtgtctacgaggaagggaagttctggagaagcagcagcaagccttcgtgcccgagaggaggccgccgggccaggcagggcgccggctctcccgggagctgcgcccggaactcgaaggcctggcagcgaacccttctcaagggcaaaaggagccggcctgaggctctggcgcgggcaaccgggccccgccgccggcagggccccgggaggggaacaaaggggccagcggggaagtcggcagcagcctggccgacctcactcggcgccggggtctcgctttccgccactcgccgggcgtccgggatccgcgcccccacgcagggcccttccgacggtccgaggcgctcccgcctccccttcccgcaggctcttactcgggcttgtcgttccaaaccgctccgatccagctcccaacaggccgccggcagagccaggcccggccgcggccctagagttcccaagaagccgcaggccgcgcaggtcgaaccgggcaggcggcacaggaaaagccgcgcctcgtccctccccttcctccgcgaggacctggtgacagggaagcgagaggttctcgcgtgcggcagcagccagcggacgtccagtccccagcacgcggctcctcaggccctgcaactcagaggcccgcgcggtgctgcgggcgacggcggcggcggcgcggcggggaggcccagtccatcgcgaaccgggagggggaggggaggagggtcgagggagagccaggcggggaagctgccgagggcagccgagcccggcggaggcggagcaaatccactcccccggcggcgaccccgccggcggccacctggggcgctgcgggacggccgaccgccgcgcaggggcgccaaaccgggtacgccgcgtcgccgtccctgccccggagctctcgcccccgccgcctcgggctgtgtcgtacgtttctgccgcggcttttctatggtgcgccctggcccccttttcgcttccctgtcagtccgagcgcgctcatgcacgcacgtccagcttgcttggcgccgtggctaacactttgcgcgctcctgcggagggcgtcgcacggcacagcacagcaaagctgcggcccaacctgtccccgctgagccttccgcccaggccacccgcactcagccacgatcttccctcctcgcgcacggaagtgcgtcgcgtaaggaaggcgtctccccccgctcctgggaggccgaccgcctggcggttcaccccaaagaaaacccttcagagcaaccctgggaaagaggtgctgccgacgattatcaacgttgtacagatgagacactgaggctccaggaaagcgcaaatgcaggcccagcgccgtgcccggtcggcagcagcactgagagtgcacttttgactacgtttcttgtggcttgtggtcacaagtatgtctgtggttattcttttcaaactttatttcacacgcattcagaataaaggatgcatgcttataggacgtagttggagcccggagacgtcctactgtactctcactttcagcttttaaacaaaaagaaaaattaatacgacatgatagtgtttgagacatggtccctcaggcaaccagaggagctgctaggtatgagtaaagaacagaatttgggtccgctgcgtttcctgtaatcccagcactttatgattttactctcttgaggcccggagttcgagaccagcctgagcaacatagacctggtctctgcaaaaaaattaaaatttaaaaaataattacccagatgcggtgacgcacacctatggtcccagctactggagcggttgagatgggatgatccctcgagcccaagaaattgaggctgcagtgagctttgataatgccacctcactccagcctgggcgactaagcaaatttgtcatttccaaaatactggttcttttttttctttcttttttactacttctttagaaaaagaaccagtattttggaaatgacaaatttgtacttcagatagctatccgcgcatgtcccgttgtcgcaggtaatggtccgtttaggtatcctgttaacgaaacaagaggaaaaagaggattcaactattttgtcccaagtacaacacatgaggataattatttagatgtcatgagtgtgaattggagctgccaggaaacttcaagaaggaagtggcattccctctggaccttgaagaatgggtacaatgtagacactgaaaggaaagggaagaacataaagcctgatatgttcctagacataggaaaggtcacctgtgcccccagcaaagaaccaacagtaagcaacagagagagaaatttggagctaaagtggggaaggccttgaatgaggaatgcagaaattaggctgagctaagtagcaagttctggactacaacactggaaaaactagtcttaagaagactaattatggaaagtgtctagaacgactaaaaggatctatctagacgagactagctggaggttgtcgaaatgctgcaataatggaggaaagaaaag

SEQ ID NO: 1241378 - DNA, 4001 bp, Homo sapiens
agctcgcttcagcgagtgtggtccatgtccccacctcaaccaccgctgggctgtgcgaccactgggcaagtccctgcctgcctctgagtcttccttgattcgggctccaagcctcacctggacccttcccagggctgggcagccagtgagggccaaggaagccctcgagaaatccaactgcaaacacttaccgagcccctagtatgtggcatttaatctgcatggccacccaggggggtggttaaggttttattttatttattttatgtatcatattatatcatattatattatattatattatattatatcatatcatatcatatcatatcatatcatatcatatcatattatattatattatatttttgagacggagtcttgctctgttgcccaggctggggtgcagtggctcaatcttggctcactgcaacctctgcctcccagagtcaagtgcttctcctgcctcagcctcccgagtagctgggattacaggagctccccaacatgcccagttaatttttgtatttttgtagagatggagtttcgccatgttggccaggctggtctcgaactcctgacctcaagtgatctgcccaccttggcctcccaaagtgctgggattacaggcataagccaccatactcagcttcattttaaagatattgtgaggtgcagcagtgacctgcccaggtcacgaagctggggaagtgacagagccaggatcaaactccaactccaagtcagccttcttgcccttccccacaccacctgcccctgctggccgaaggctgggacacggccctggcccctggggcctctccaccccaggcctctcactgcccagatgctgaggcaggaatgccttggggctgcccgtcctgctccatttctgcattcagccaggcaacatttgcccacttgggtgtggtcaggccctggggcctcagactcccacaagaggaaaacaaatagcggtggcaccaccaggtgtgcacagaagcaggggctccaccctcagagggaagatggggggcccaggggcttcaacaaagagctgtcgctcagtcttgagagagcttctgcaggccagggcgccatccccaggagagggcacagcacccacagaggtggtggcggaagtggcaagggcatcaggatgggggtgagacgctcgtgggggacagtggccccaaccccctcaacaaacccgggccacacgttgaccacgcccacgccagggccccctgctttcactgccccggggacaacacaaaggagcactgaccgggacagatgcctctccaccttggtaccccgacaagggtgcagctgctcggggtgggacgctgaggggtcgactccaggggactggggcagaagagcccccaacctctgaggaaatgatgacatcatctgtccgtccgtccgtccttcctgcttcaggaggggaaactgaggccccgagaaggcccaagtcacaaaactaatgaatggcaaagccaagagtcgtcctgggatgcgcggtctccccgccccgtgccaaatgactccctgttggggcttagagttcccgagtccgccgcccactcttggccctcgcccccgcggggttccgatctctgctccaggactcggcctcccgcgccccgccccgcccggtggccgcgcgcccgctcacctggcacagcaggtccctcgcgtagccggcgcacgcggcccactcggcggcgtccacgcggctcgccagggcccagaagcggcgggtcagctcggcgtcgcgcccctcatcgcagcagccgaagtccgagtactgcgcgcagaggcgcagcggctgcgtcggccggaagggcggcctgaagtccaggcactgcggatgcgcggcggccccgagcacccaaagcgccagcagcgccccggccctggcccgggccatcgctacgccccgcgggggaagaggcggagggacggcagccccggtcccctcccggggcgctcgcggcggcagggaaggggcgggcgctccccttccctacacgcagggcctcgagtttggggacctccccttctaggaggtcacctctggtcggggacactcggcgggactgaaggaagagggacgcggcgcagaatgcggcacgacctcttttaaccgctttccaaattcgatgggagtggcccggtctgtttaaagccccggtgtgttttcccggttccgcctggggccctgcttcctccccacagggcgctctttagccagggaggcgcagggccagaggcctggactcctgggcttcggttccacctcccactgggctagggaaacggatgcccgcagcccgtccccgaaagctcccacgtaacattttaaaaatgggggtgcgagggaaagaacagggggtgttgccccaggactctcagggagaagtgaaacctggcgtaggggtggggagggaggacggagcagtctccgcagtccaccctttgcccttactgtgggcttcttcccagtctctgctcctggggcagcggattctcctgcagcccaggacccactggggctccccacttccactctcgcatagggagcactgatgaatctacctcctgggatgggcatccagccctttgttccgctgcccccgctggagattcagacccaaccccgccccacccccccacacacatacagacgcacacacgctgtcttacctaccccagaatctcatggcaccaaaaccacccacacagacaaacacacacacactgtctcacctaccctagaatctcacagcaccaaaaccacccaggcatttttctcaagtggacctcagcgtttgcttctccctggagtgtccttccccatcttctctgtccagtgagctcctactccatcttcatggccccaacgcacacatccgtcctctgcaggtctctttggactgtcctgggggatcatgtttctgtctttgggcccatgctcctggcagagctgggggtggatgagatgcggcagggctggagcactcagaggtctgtggctctggcctgaacaggtgcagtgtaagagtcagggtctccgcacagccaaacatctctgagtatttgaaacacggggaatttaacgcagggacttgaagccaaagaggctaagaagccatacagggctcagtgaagtaaccttgagatcagcaacagtaggaacagtccccaggtccttgatgcaggaagagcagatgttactggagccaaggagctatggtcaccttgtcaaagctggaccctcacaaggcctgtctggccacagctggagatagccactgtcagagattctgcacagacagaggaggagaaataccccggcttctccctgccacttcccctccaactcccacctgtggctttcattggctgaacctagcagagggctgctagggtgggaaatgcggcctgcaacggcttcctgcacagacagctgggaataggcagagccaggatggaatcggagggcacgatggcgcctacttcccagctgggactcagaactgggtgatagtcacacatcaacacagggctccagatgagtgtacagaggtggaagtgacacagagcctgggccacagccatgaggtttgggctcctacagccacagaaaatgtcaaacacagcccagccccagccagagtaacataaatcctcaccctaatacctatttacctcggtttctgttatctagtacatcctgattggctttccagaaaaacaacaaggcatgaaaaaaagataagaaaagtcacagtcaggagccgggcacagtggctcacgcctgtaatcccagaactttgggaggctgaggcgggcggatcacccgaggtcaggagttcgaaaccagcctggtcaacatggtgaaatctcgtctctactaaaaatacaaaaattagccaggcgtggtggcacgcgcctataatcccagctactgggaggctgaggcatgagaatcg

SEQ ID NO: 1241379 - DNA, 4001 bp, Homo sapiens
taaagggatacagtattttaagtatctaaatttaaaaaattatatactaagagaaggcatctatgaacacacaatttaacccaaatctttaacatccatgcacatcaatttttatttcaccaccaaacataataaactgagttcttcagaaaaaaaaaaaaaatcagtcaagagactaaataatccccctcagctttctatacaccactcttgacatacaagaatagaatgtaaccacaaaatctaaaccctgagccgtgacaccattagagtcacagacaatggcgttaaaagtaaagacaatggaagttaacaggtagaaaagttgacattctccaaactgcacaaggtgctctgcagtggaccgtaggaatgaactccaatactttctcagtctaaaataactcgatagttcagtaaatacacacgtgtggaagagtgcatagacttcatacaaattgagccacaaaacagaccagtaagacaagcttgaagtcttgccttcagatggaacccaatggtcttaactctggagaaactcataagcaaaggacagtttttctaccacgtagctgctttactgagaatattttatcaactcattatcttttacaaaggttaatttttataaaattgtctaaactttggcatcaagacgaaaaatgttttaacttactgccagtactaagaatgcagtgtcttgcacatatcttgcttaaatgaacagtaagactagaatactgtgtatgtttgactctagagtccagagtaaactcagtattctatttggggagaaaacacaggggtgagcaattgtgaagcaggaggcctccactagagtagagagcagatcagatgctcaagaaaaataactgatactaggtgccaatataacccaaggatgtactcttttgcccattgtaacaggaaaaaaacgcttttcaagctctggatccaatgttagtcttttcactttcaggagatagaaaagatgcatgaagacacagaaaagaaactaaaggaaacagctggaaggactagcaaaaaagagttttaagagttgtggaagtttaaacaagaattttaacaggtaacatctattttcaagtacacagtgtcatcaagactcctgcaatgggctaagtgcttcacaagcattatctcatttaacctttacaataactgctcagatggctgctattcttatcatcatttcaaaaggaggaaagaggctcagaggcattcagtaacttgctcaagctcacaagtgaagggctgggacccttaactcagaggtatctgcctctagatcctatgctcttaaccaccatatgctgcttcctcaaacaaaaggacaatcaaaatagaatcataaggagaaaagtttgctaataaatgagagagcttcttgacttttaatggccaaagttaatgaaggaaattaaggaatatctattctcagaaattttactttaatgattcagtaattatttgttttggaaaactctgaaggagtctggcctgaagcctgaaacagaatcattactctcttgacattcccttaaaaatctaaaaatcaaaatgcacgtgctattaaataagttcagcccctataactaggaacaacatgaaatgtcctgcgttaaatctacagtatcataaccatacccattttctattctgatttcttccaattcttcaggttttgagtttcctagaccttcttttaaaaagacaaatttgttttccaaactccgacattgggagctcatttaaaatgaaaaaaaaaattgcttgaagaaaatctccgtccctcaacctctcagttatctttcaaaaaactgtaaattagttagaaaaggtcatctattataaacagcatctaaaagtgctgagtaaccaccacttattaagtgtttaacttaatttttcagttatatcaagaacttctatactaagaaatatgaatccatccaatccaaggttgccaagttttcaaatgagaaaattttgaaagtaacagatgggctgaggaaaatctaagagcttatttagaattggggctgatgaacagtagctaatttattaattcgtttcaaaactgcttctgatattctgaacggatgaatggcaaaacaatgagttcgatactgtatataaaaaaagtggtacataatttaatgcattgtattaagtatgattcaatatataataaggatagaaaactggcactacacagaggtaatctgccttaggtttacaatatagcagctttatcatttcatcaaaagcactgtaatcacctccgcaaaataaactgcaattaattcctggtaactcttggaattaatctagacctgtttgctcactttttgaattttataagtgaccttctctgctgtatacaaactaagaatttaatattctattgaagaaggaccaggagaagggatctacaaaacagcaggaatataaacaagtttatcttctgctgatactgattagggaaattaatctctctgccagaagagtggaaggatttaacagcaaagccagtctactaaccaaaactcttactctaaatcttcaattccttaagtgatttccttaaaagttaaaatgccaaagtgggcaaaattgtgtgtgtgttgggggatgggggagtccgctcttaacaccactggtccaactcacaattcttaatctctaatgtaccccttagactcaaacttcaaggtgatttataaaacttgcattaagttctaaccgagtgattacttactttagatatatgttgacggttttcctttaatatacttcaatttcaggaaaatgagacagagttcgaaaatttttgcaacattttagtgccgcatttcattcactcatcatatacttttttcagtatcattaaaactgcctaaatttaaccagcccctacattttcattatttgaagaatgaatgaggcatatattcatttataatatctgcgttctcgtgacaggtgatatgaactcaagtatccaattctgaagttctctttaaaatgttgccatttccctaaattcccattactctgactctcagtctaggcaagtttttcaaggcgattaaaacgaaacaaaacctgcacgtgcaaactaaaaagttcgcatcttaaggccatcgcggcaaatccctaatgcacaaaggcaaagacacccgcgacggctggacaactacaggacaagatcgcatccgaccacgcgagtccctcagtcgggaactcaaggccccaagtccactggaaagccaggaccagcgtgcagggtccgccccagggccgagttttcaatggaactggagaggatgggggcgggaaggagcggaagctccgggtgcaaaccgcggctaccgagctgcagctcatttctcttcccggggttttcaggctgggtaaagtcccctccggatggggccacagagcaggctgggtttttgaggcgggtaggtgggcggcgcgaggcccccacggccggcggggagggcaagcagggctcagaccccggcccctgaaagcactttcgaggcgtctcccaccccccacgacaagatggcgacgtggacagcgggggagcccggccggcgaggttgggggaagagaggggaggggagcagcagcagaaacaaaaaggctgccccccccaatcccattaacgccgaggccggcccaggagcccagggcgggcaggcgggcggggtcgccgggggagaaggcggcgggccgagggaatgggcttactttttcttgtcgttcgcgccgccggcgccctccatggtgaatcggtccccgcgatgtcttcacggcgggcggcccccaggctcgctccggcctaagcgctggctccctccacacgcggagaagagaaggaaaggcaagtccagaggtgggggtgcgaggcgggaaacccctcgtgagactagagagaagcgggcggcaatcgccggggtccgggcccg

SEQ ID NO: 1241380 - DNA, 4001 bp, Homo sapiens
aaaactggcactacacagaggtaatctgccttaggtttacaatatagcagctttatcatttcatcaaaagcactgtaatcacctccgcaaaataaactgcaattaattcctggtaactcttggaattaatctagacctgtttgctcactttttgaattttataagtgaccttctctgctgtatacaaactaagaatttaatattctattgaagaaggaccaggagaagggatctacaaaacagcaggaatataaacaagtttatcttctgctgatactgattagggaaattaatctctctgccagaagagtggaaggatttaacagcaaagccagtctactaaccaaaactcttactctaaatcttcaattccttaagtgatttccttaaaagttaaaatgccaaagtgggcaaaattgtgtgtgtgttgggggatgggggagtccgctcttaacaccactggtccaactcacaattcttaatctctaatgtaccccttagactcaaacttcaaggtgatttataaaacttgcattaagttctaaccgagtgattacttactttagatatatgttgacggttttcctttaatatacttcaatttcaggaaaatgagacagagttcgaaaatttttgcaacattttagtgccgcatttcattcactcatcatatacttttttcagtatcattaaaactgcctaaatttaaccagcccctacattttcattatttgaagaatgaatgaggcatatattcatttataatatctgcgttctcgtgacaggtgatatgaactcaagtatccaattctgaagttctctttaaaatgttgccatttccctaaattcccattactctgactctcagtctaggcaagtttttcaaggcgattaaaacgaaacaaaacctgcacgtgcaaactaaaaagttcgcatcttaaggccatcgcggcaaatccctaatgcacaaaggcaaagacacccgcgacggctggacaactacaggacaagatcgcatccgaccacgcgagtccctcagtcgggaactcaaggccccaagtccactggaaagccaggaccagcgtgcagggtccgccccagggccgagttttcaatggaactggagaggatgggggcgggaaggagcggaagctccgggtgcaaaccgcggctaccgagctgcagctcatttctcttcccggggttttcaggctgggtaaagtcccctccggatggggccacagagcaggctgggtttttgaggcgggtaggtgggcggcgcgaggcccccacggccggcggggagggcaagcagggctcagaccccggcccctgaaagcactttcgaggcgtctcccaccccccacgacaagatggcgacgtggacagcgggggagcccggccggcgaggttgggggaagagaggggaggggagcagcagcagaaacaaaaaggctgccccccccaatcccattaacgccgaggccggcccaggagcccagggcgggcaggcgggcggggtcgccgggggagaaggcggcgggccgagggaatgggcttactttttcttgtcgttcgcgccgccggcgccctccatggtgaatcggtccccgcgatgtcttcacggcgggcggcccccaggctcgctccggcctaagcgctggctccctccacacgcggagaagagaaggaaaggcaagtccagaggtgggggtgcgaggcgggaaacccctcgtgagactagagagaagcgggcggcaatcgccggggtccgggcccggctccgagcctctcctcaggtggcttgtcagggcccagcccgacacactggccgaagcgacgaagagggtgatcctcctgtcccctcagacgaggcagcactgtgcactgaggagctgaggcagcgtcagggggcgggcaagggcggaggcgcgctcgggcgcgcggggaggggagagggggcgggagcgcgcccgctcgcctgcccaggccggcgcgcgctcccgcaagcccgcctcacctgaggtggaggcgggttcctcgagatccaatggcgagcgacgcaggcggcaagtccccaccccagcccacgccgctctcagccaatcaggaggcggtcagctgaggcacagctgggacgggctgcgacgctcacgtgctcgtctgtgtttagcggcggaggaaagagaaaggagatgggggtgcggctcagcccgagtctggggactctgcgccttctccgaaggaaggcggtgcccggctttgggaggcgctgctgagaagggatttcggttgcctggtcccaaacatgcatcatattttcctactcttggtgcagtaatgtaatgctcctgctctctttctcctcggcctcagtgctgggcacgattgccgcccaactctgctgggctctctgttcaaaaaagcagacttcgcctcgtggcagcaagcccttcctttggtctcgttgctcagatgtgttacaacggggtctttccttaccagattacctaaccatgggtcaatgtcacccaccgcactctttgccacggagcacaggggaactcaccttgtctactaagtttttctgtggcggagtttacttactgaataaatgcaattaaaaataaaaatgaactcctgttgctgtaaacttcaagggaaataaagttgcagggaaatcttaaaatctgaaactatgttaagcatttgcaaataggtataaatgactttaataagcatataaaccaatttcagggaaagagtagaaaaaatggcctttggcaactttgcaagctactaaacaaaacataatcacttttgtctttggaggcataaacttcaagcctgtcagtcttctaaaagaaaaatatgttttgagcccaacaaagtagcattgcacatatatctccacttggcgctaaattattttacttctcacctttgccttatgagtttcttgttaaaacctagctttgggttgtaaatataaatatctgtagtggctttcaattgtattagcatgtaaaaacaatggtctatatagaagcatcaaactctgacaagacaacaaccaatgtatacagcacctctttttaactggtcagtagacctacaaagatacgattaaacattgaccttagcggacagggtggttccagctactcagaggtgtgaggctggagaagcctgggtgttccagcctagggaacgtagcgagactccgtctctttagaaaatttttgatcttcacgctacttttgttttttcagatctacaacactaaatgatatgtattatgtcttgaaaagaaccatgggaaatgcctgaagagaagaaagaactaaaaataattactcataatttcttttttaattgtggaaagaatactgtaaattaaaaactttttagtttaacattctcaagatactgtgttaagaacactggctccagaatcaagcgtgagcttgtacacaggctttgaatcttactggcaagtcgtttaatctctccataactcagtttacttatttataaaatggatataaaagtgtctataccacagtattatggatggttaaatgagataataaatgtatacttagaacaatatctggtgcatagtaagcactcagtaaatgttagctcttagtattgttggtggcgttattattattatcattattattattctgaggcggagtctcgctctggcccacaggctggagcgcagtggcgcgatttcggctcactgcaactccgcctcccaggtacaagtgattctcctgcctcagcctcccaagtagctgggattacaggcacgcaccaccacactcggataatttttctatttttagtagagacgaggtttcaccatgttggccaggctgctctcgaactcctgacctcaggtggtccgctcgcctcgggttcccaaagtgctgggattacaggcatgagccacagtgcctggcctatcatcattattattgccctcaaat

SEQ ID NO: 1241381 - DNA, 4001 bp, Homo sapiens
ctgtttaaattctctacagaaggaacatcaaccaccaagtattcccgagagtggcactagcatgagggggaaaaaaaaggtcagaaaacctgcaacctggccatccttcttcaacttttccccctagccaatatgaaaatgttactaaacgcctatctagttgagaacacacctagaattgtgatataaataccgtggcaaacagtttcggatattaactcaaagaatttttggtgcgctgatatacatactgaccggaaggaacccattttcgaaaacctcaaagaaaagtgcccgtcaatcaatttcaactactattaacagttcttaaatactaatttctgacatttctccttgccaacatttttacttcatgatttcccatttttaccctaacctcatttctaacagttcagcacaatgataaactttagttttaagttcctgtaataatatacatgtttaagccttaagaaaggggtcgcgatgtttttgacccttattttacttcctatcaaatagattgccttacagatgaatttcttaccctgcagaatgggtttaaactgtgcttaacagctttagtttttgtgagattaacagattgtgaaaaataaacttagccaaatctcatgtgaggattaaaaaaagcgatgtcccagataagtcaatgtgacactaaagatctaaacaattttttttaacttttaagttttttatcaaatttcagcacccagcaaataataggcactgttaatatttgcttaatataacgtagctgtgaatttttgcccacatttaggcggacgggaaaattaacgccagaatatcccgaaagtcaaattttgtcatcttacacttaggaagttacgttaaaaaattctcaagtctcgtagtatttttcttaagcgcaatttgggaatttccagttacctcgtggtttccgtcatcaggttcttggcaaagattgcaatacagtagttttagaactatattaactaggtattccattaactaggtaaaaaccactcgactgacctcgtggtcaaattccttactagtgctgctactgacttaatatgaccctagcaaccaacacttttctgcctcagtttccgtctgagaaagagagttaatacctacctcaagcaaagttccactaacttatatatttcaagtgttttgtaacctgcagatgaaaagtcagctgtaaatattaatatagttatatcacaatatttccttttacaaatgtaagtgaaaataactacttcgagctccatcatttgctcatagagagaaataaaataaaaagttatcagtaaaatgctgaatcttttgttaaacctttctcgtaggccacgcggcacgatccaggatttaaaggctcgcgatacatctacttggtaaccttcccccttcccctcccccactttttacatgtaagaagaacggaggtaatagaaggcatcggcgctacgttaacttcgactatattaatgagcatcacgatcttcattttcatgatcccgtagtcctcgcggtcgtagaaaatgaaaggaaagcagccgttaacacaggaagagcgaaaaaaggacattttccctggcgatcgtggcctagaggacaccaggttaaacctatacagaggctgaggcctataaaactgcccccggcttcaacctaatcccccaaaacaagcagaataaatgagggcccggttagttagggggaaggattcccacatcttctctcccacaccccctctcgcttcccgaaaaacccagcgccttccctgcgtccgccctctccacttaccaagaaggggagggagaagagattcgattctgagtctcctactcccgggttctgcgtagagaagccgactgctgctggaggtcggcaacgcggccacaaccgctcagtcttcgtctcttcacaaaatggcccccgagtctcctctgccgccgaggcgaaggcctagtccccgccccattcctgagaatcttcctattggctgtgcgttttttcgctcccgctcctaattagacagttcaaccgctcctcacaatgatatccaatcacaattagcagtgggttagactaagcaggcgaatttccacatgcgtgagagaaactagtttataactggttagttttcctgtcatttattgcctggagaatgcttattggctattgcacgggacgaccctctgggtggaaactcgcctttgtatcgcgcaccgtctcacatccgggtatctgggaggcctgattggcggccgcggcgtcctatcgctgccccttagagtgcctagtagaagatccgcccagacctcggatttccggctgcgcgggggcggggaaagggttgaggggcgtagttaggtgacgggcgcaaaagacctgccccagccccgggcctagggaaaaaaaagcgcgaaatgaagcctccgttgtgcaatgtgaataaagaaaggacttttcttaaaatgaggagggagcagcagtgactaggccttgttaaagtgtgtagaaaactaaccagtcctgcagtttttccaaccccagaccctttctcagttccagattcgaatgtcagctacctcgtagacatctgcttcttggcctattaaacccttcttcagacaacacatgttccatcgaaaccaactgacttccttattcctctccaatataaaaaggaagtgcagaatcctggcctctggccccagggcatctaatatcttaagtgccagcaaaattggcccatccttccaaatctggtcccttaatttccctcctcttgaaatggcttgtctcctacctacccccgtcacctgccagtctctctggttacattataggaactgcgcacgcagtggggtagcatcagctctactaagccagcggtttcttttttcttttcttttttttttttttttttttttttttttgaggcagagtcactgtcgcccaggctggagtgcagtggcgcgatcttggctcactgcaacctccgcctcccgggttcaagcgattttcctgcctcagcctcctgagtagctggaactacaggtgcgcgccaccatgtccagctaatttttgtatttttagtacagatggggtttcgccatgttggccagactgttcaggtgatccgcccgcctctgcctcccaaagtgataagattataggcgtgagccaccacgccagaccactttaaactattttaaaaagcaaagacgaaaaatatgggagaaagtatacactaaagtgttagtagtggttctctcctggtgggaaaattacatgtgatttttttttttaactttttttttttcaaacggagtctcgctttgtcaccagcctggagtgtagtggcgccatcttggctcactgcaacctccgcctcctaggttcaagcgattctcctgcctcagcctcccgagtagctggaactacaggtgcgtgccaccacgcccagctaatttttgtatttttagtagagacggggtttcaccatgttggccaggatggtctccatctcttgacctcgtgatccgcccgcctcagccttcctaagtgctgggattacaggcgtgacccaccgcgcccagccttaaaatcttattgtacttttctatattttccaaatcatctactttgagcaagtaatcagagggagaatatcctacgagtgcttaaagcctcgactcaattgccacattgcaatttatttaaaattatctcgtagcactgtgggtagttttacactcctctcccttcctggatggtaagattttttgatggcagagtttaattcttactcttcaatatattttccttgtttactacctattaataaattaataaaatattaaccattaacttttatttatcaggggaaatttttatttttccaggacaagcagatagactgtcctttttttctctctctttcttttgagatgaggtcttgttctgttgcccaggctgta

SEQ ID NO: 1241382 - DNA, 4001 bp, Homo sapiens
ccctcagaaagttatgactaaccttcccaaaataaacattcacacttacacaataaactcaggggctttagttgctgccaagaagccaggttaaggcttactgcctcatatccttccaacttaacaaaggcaatagtgataatcacttaaagatgaacagtttgatgtgaatgaacgtaaagagttgatggaatactcaagaattcaagtgcgtctagaagggacaaagtatttgtgatattagttggaaagagtggaagggagggatgctcaactgggccaggagcctggcttaactgagccactggattacatgaccaatacccacagtacactggaaactaaaggctaagtaggctgctactagtgcgccaaaatcatctgcttcattcagttgtcctgtgtcctggggccagttttgtgtgattacaaacctgcttatgtccatatttttcagtgtctatataataatgtaattaaacctcatgttaaacctatgaaaaatcactgcattaaaaattgtttcttcaggaatactgatttttaaaaaattgctcctatgaaaactaagtcaaatgttttggagagacataacgcaaggaagagtatgcattttaaaaattgttgagttgggagtgagcaagacaactgtaaaagattgagcggtgggacttaatctcaaaagtactctgcactcagaagtgtctaaattcatacttcactttaaataaagcaaaacgggaaaccaaagatgatgaaagtgcctgagtggctctcagactgcacactagaattacctgggaagcttaaaaaccaggccaccctccttcccattcaggttcaatagtctgtactggggtccaggcatccaaagtttttaaaagttctcagggtacagccaggtttgagactccctgtgtagttaatactggaaagagaattgggaactctgaacagcagtcttagacacaaaaacagtctcaccactacatcaaaagattggtgaaatggatatacttttaattataatgtttaagatatgtatgcattatctttaaaattcccaatctggctttttcaattactaccaactaaccgaatcatgtaatataaaagggcttcaagtgtatgatgggaaggaggttcacatgacaaaaaaaaaaaaaatctcctgataggggcccacattaccaaacaggtctcagcttgagtcttctttcagtttaggagtctcagaataggacgcaacactaggaaccccagaggactcaggttctcagtttcctggttggttctcttagtatggctgggtacgggagtcagaggggcagtttcttctaaacctttcattcccaaaggccactgatccccagaagcaaggccaggttctgcacgtgtgttgaggtcgccaggaggtagccgtgggggttgggggtttgtgtggcgggggggcctgggaaggaaatgtttctcctatcctccatttcacaggcagtccagaaggctccgaactgggtcagggaacaaaaagttattgcacttgggacgataagccccatgaggcaggcgaatctcaatcctactctcgccaagggcgccccaacccaaccttcttgccctcccctacacagacactcaccctcccctagttacaacaggggagggaaccgaaaagtccagaggagaaaaaagagagaaccgggccacttcgaacctagaattatccccccaccagcgcggggatggggctccagaggtgggagaccgtacacgagctgggaggggaagtccaaggggctggggatcactcaccgcagtccagcccgggcggcggctcccagcctcgcaccatgggccggggggaagtgggggagagggcagggggcctccgagtgggagtggggttgctgcccggtgcggccgctccgagcccaccccagcgatggccgaaaccgggactgccccccccaccgtccccgggagcgcgccggtctacccagccctgctcgagcaagttggaggcggggcggatgggtggggtgggcgtccagaggcggtgccaaggtggcccgagtcctgattggtaggcgcaggcgggcgggcacgggcgaagcgcactgggctggccattggctgcgtgggtctcggctgaagtcaggtattggctgcgtgggcctcagctggggtcatctattggatgcgtggggcagggaagatgtcccctggggccaagctgcagtgcatggtacctccccctaccgtcgacctatcggcgccggacctttggaatacaccggaccaggatccttccgaaattccccaaggagggatactgcactttgctgaactgtctggaccgccaacaactcccaatttgtttccttctgaaggaagccctccaggaagaccttttcagtgccccctccggagccatacaaacgagctgcgcctttcccagccgagagcccaaccgccaccagcagcgtcagctgtaacaaagcgcctaaagcaactgggaacttgttctcgagagggatcagatgtcttgccacccggaaagacgaggaccttaggagcctgcgggcgacttaggccgttccccgggtcaaactggcaccagacagatgttcccaaagacgaagtgctggagcagtcacctcattgggacctaccagaccctcaggctcccctccctgccctagaaaagaggacgcggagctctccatagtatttgtttttcgctagctagaaagggatgaagactgaggtgggagaatgacttgatttcaagagttcgaggccagtctgggcaacatagcgagaccttgtctcaaaaaaattttttttaacttacaaaaagaaagggatgccaataaaatggacttcaacaaagcagtatcccacacagtatgaagttatgggccaaaatttgtattttaggattccccatcttctgtgagacagagtaacaaatgtaagaagacaggcttgctcaattctgtttggcaacataatttcacaaagcctctgactctgacgtctctggaaagatcctttgaagacaaaacaggatagggcacacagtcctctatgtctcttgcctgagtcgctatattccttaaaagataaatgggctgggcgcagtggctcataaacctaatcccaacgctttgggaggccaaagagggaggactgcttgaggctaggatccaagaccagcaagggcaacatagcgagtccctgtctctacagaaaaatttaaaaattagctggacttggtggcatgcacttgtaactactcaggaggctgaggcagggggatcatttgagcccaggagttgtaggctgtagtgagctatgattgcaccactgcactgcagcctaggcaacagagtgacaccctgcctctaaaaatttaataataataataataataataataataataataataaaagataaatgaccctagtccttgccttttcctgcacataagatgatgtctaatggggttagggatgttgcctctgtaatctataaccaaatgttctcttacacccaaacttttatgtgattctgctttaatgtaacttatgagcaaatttgaggtaacttctgagcacatactgaacccccactacctgtatgtaagctgtaaattaaaataccgtcagagcagtctgaacctttctatttaaaaaaatttatttttatttttattttattttttgagactgggtctcactctgttgtccaggctggaatgtagtggtgccatcttggctcatggcagccttgacctcccaggctgaagcaatcctcctgcctcagcctcccgagtagctgagactacaggcatgcgctgccatgactaatttttgtatttttttgtagagatgggtttttgccatcttggccaggctggcctcaaactcctgggctcaagctatccacctacctctgcctccaaagtgctgagattacaggcatgagccaccacg

SEQ ID NO: 1241383 - DNA, 4001 bp, Homo sapiens
ctcatgcctgtaataccagcactttgggaggccaaggtgggtggatcagcaggtcaagagatcaagaccatcctggccaacatggtgaaaccccatctctactaaaaatacaaaaattagctgggcgtggtggtgcacatctgtagtcccagctactcgggaggctgaagcaggagaatcgcttgaacctgggaggcagaggttgcagtgagccaagattgcaccactgcactccagcatggcgacagcgagactccatctaagaaaaaaaaaacaaaactaaaccaaaggctatgcatgagacaaagtgaacagtttattactgtgattataataaaatgttgaatttatatagggtaaaatcttgatagaatgcttgaattatataggtattatgggaaatacaatgttatggttaattgaagaataatacaaaattttgttttaacttttgctcgctgggtttttttccccccccaaaaattatactttttttcctcttgataattaggaaacacagataaattatttttagatgattcaagatgccactatccttcaagttgattattgtaaaatacgtgttttcaatgtaaaataacacagttatggagtttgggatatagccatggtaacgacagaacataccctggtgttttaagattagggaaagtcggataacatcaaaacaattctaagaaaaaattttaagtatttttcaggctctattaattaagaagtacttcagtgcttttttttcttttttttttccaacactacaaaggctaaagatgttattatcaaatgtattactacatcattggcacagtttctattggtatctacttgctttttaatacggaagatgtttatgatttacactcctcctactttagaaattctctccattcacttcttttgtgcccctccagatataatctgaacttccaggaatagatcattcttggtgttacaaatgttggcttcccccctccctggaattctattagaatgtttctgtcactttagaagctttcttattctggtgtaacatgccaagaaacccaggtataaaatagtgattgttgaatcttactttgacacgtgtgcccgtccttataaatctagaccctgtacattacatgcatacaactatccctatggatctactagtaaataatctcacagactccacctgaggcttctggaaaaaaaaacaattaccttaaattttattaagagctcttcgtaacctactgagcaagatcagtgaatcctaaaaagattcagtccccggttcccaaagcgcttccccgccccgtgtttctgaacagctggagaggacaaacctccgctaagaagcggaggccgccagtgctcatcacacgcaggaattaggatatctggcttgagaacacctatgctgtaccacattcttctctccccctaccccgcctgaaataaaacatagtgaagcgtaaatcttgagtcccttggtaccttctcagaaacggcggcgaggaggcttcagaggggcttcctgggcggggatccagacggtcgcgcgggtattcagcactctgggcgggacagtccctgtcccgaagggagggcccaggaggggtggagccgtccccgcccgaacacgggggcatccgcgctccccgtagggtaccccgcgtgctggctccgaagcggtggccgtcggggtggcgctcttcctccgctctttggggtcccggcgcccctcagggcagggcgggagaccgctgaggaggcaccctcaagttcacctcaggctcatgacaccagccccgccgcggttccccctgaccggctttccgctggccctggcggctgcggaacggtcaactagaccccactagctgaagccggcatcacctgggaagcagccatgccgcccggaggccacacccgggggaggagcctgcggacgcccagtcgggtggagcacgccaggtgagcacgcctgcgcagtcgggccgtaaacaagcccaccccttccctttggcccgccctcgcagggctggcccgcgggtgggaggggcgagaaggaagaggcagggggtgggggaagagggagcaccaggaacagcgcctgcgcggtgggcgtgatccgggcacttagggcaggatgaacgctgctttccaagatggcgacggagggaggagggaaggagatgaacgagattaagacccaattcaccacccgggaaggtctgtacaagctgctgccgcactcggagtacagccggcccaaccgggtgcccttcaactcgcagggatccaaccctgtccgcgtctccttcgtaaacctcaacgaccagtctggcaacggcgaccgcctctgcttcaatgtgggccgggagctgtacttctatatctacaagggggtccgcaaggtaccgacccgggcgtcaccggagccagccagcggcgtaggcagaggccgggagcagggcggtgacagtggggccagggtgaccgagaggggtggccgtcgctcttacttttgagtgggccggtaactccactggggtactcctgaggagaggggattcaggagtaaggagggtggtggcggtggcgtttcgaaggggtgggggcagtggaaagggaccgtggggcgcgggggttctggctgggaggctcccgggggagccggctgcgtcccctccagcctggtccatcaggctctgacatggccagggagcgggcctgcgagtccccggaagaggtgaggtggccgtcttgtctgcttcgattgcctcgcctccctggagggttggaagtctcgccctgggttagagaacagggacgcaagacggcttaacaagatctctgtaaggcggaaccggggccgggaagcggagcattgagactaggtcagaaagaacctgctcggcacgcagggctactccacctgctgccgcactgacacttcctaggagcctctcctggtgttaacatttctatttccaaaaacatccgcgggaggacggctgtcactgtctccgccgtggggaccttctgaaagattgttaaggagagtcatcttgtcccttgtagtatgcgaagggctgagtactacagttgaaatgatgtttccagtgaactaagctggttcagaggggttgtgtgagagtgcccagattaatcttgtccaacaagtcagactgtgtcccaaacagggagtgatatgctttaaaagctgctttaaagggaccatccttcttggcgggcgagttaccggtaattctgtgaaacatgtaagcatcctttaaaagtatctctttaaaagcagccatttattagagtttttctttcattggctatgtaactatgttttcactgagaattgcttatttttgagattgtagtctttgacttgatgtcatggaagagtgaggaaattaatgcatcccacagcacctccaaataggacaaggtgataaaagattaagtcgtaaatgcatgttagcatgaaaataaattgttcatattgaagagtgaacattcttcaggatttaatatagccagatccagtacaggattttcgcttgttacaagagctagggaaatgacagtggtatctaaatgtagcaaagttgtttctttgattcagggtgaatctttttttcttagtctttatgataataagtgtaccactgtatttagggtatgctgttggaagttattaagggtaaatcgcttgaccttttttttttcctcgtttggaattgcaaaagctcgaagtagtcttcagtctaggggctgaagttttactcctactcccaactttgtcactgacttgtttgggtgaccttggataagttatttaacttctatttgcacctctttaaaaagggaatgttacagtgcacgttgtaattaataatataataatcataatgaactttaaggccctgaaacactcagtagatgtaaaatatagttaaatactgactgtcaaataagaa

SEQ ID NO: 1241384 - DNA, 4001 bp, Homo sapiens
tagtagagcttaggttccccaggcttcagactagttgaacagatctagggactaaggatgtagtacagtcaccccaatcacctacagacagaaattcactctgcaattacataaaaacttacaaaaagagtaatgggatatccaataaactgagaatgtttcttcacaatctcctttattcttcgttcctccaagtactcagtttggtcttctttcaggtgtaggataacttttgttccacgacccataggttcacctgcaagagaagaaagaaaaattgacttaatacattcaatttagtgctcaacgccatgcctaacacccttataacgtgtctataaagcaaggtttgccgttactacagatgcaaaggccaccacagcagaaccttttgggcaaggtgcctcgcccaaaagaaccgcccaccaagtcatgccattacactaattaagtgctctagcttgttcctgatcgttgggcaaacacaaattctgtaagcttcaccgcatccccaggggtccaagggttgcagcaccccacccttccaccgctcacttaaccagtgaatgttcaggtgcctacctgtgtctgtcctcactgtgaatgatccccctgctgaggactcccaagcgtactgctcatcatcgttatgtttggtgatcacagttactttctcagcaaccaaataagcagaataaaaaccaacaccgaactggccaatcatagagatatctgcaccagcctgcaaagcttccatgaacgctttggtcccagacttggcgatagtaccaaggttattgatcaagtcagccttggtcattccaattccagtatccacaatagtgagagttcgatcttgtttgttcggtataaggttaatatgcagctctttcccagagtctaatttactgggatctgtcaagctttcataccggattttgtccaatgcctgttaacaaaaaatattaatttaagcatacagcacccccaagaagttcacactgaaaccaaaatccgattctgggttaataagtgacttacatctgatgaatttgaaatgagctctctcagaaagatctctttgttcgagtagaaagtattgatgatcaatgacatcaactgggcaatttctgcctgaaaggcgaacgtctcaacctcctcctcctccatcggttggtcttgggtctgggtttcctcaggcatctggaacgacaccgcgccggtttaaaaccttgcaggacgtctacagaggcaacacgaaattccatcgcgttctccaaatatttttaaagccgaattggagatttgcgaagtttaagtaaaccgaaaatagaagggcggctgacaaaggatgacctcatttcggagcgcggcaactaccacgagcgtgtgcgcgcttccgggaggccgccgcaggcccgggcccagtcccccgccgcggtccccaacgaacaccccgggtgccctcccgcgcgggctgcggctccgccacggcggcctcctccgcctgcgcccccagcggggccgggcgggggacccccgcggcggggccgctctgttcgcgtgcggcgccagctctggcgctgctgcagagcctcggggagcccgcggccgcccggcccattcctgaagcggggtgcggaaaccgcagcggtcccgaggcctccggaatagaaagcgcggccgcccgggagcgcggccctggctgcttcagggatctggtccggcccccacagcctccgccccgcgccagccgcccccagtcccggtccccagtccacctccacaggcccccacaaccacccgtcaccttggctaagtgaccgcacaggaccaacggcacagccacaccgggacgctgaagcaactgacgcgccacccccgcgcctgccttatatagcgacgggcccgcccagcgcgcggcgctttttccagaagcctcccgaaccttccggaagaaccctccccagccgccgccgcggccgcgcgcctacgcatgcgccgttgccgcggcaccccgcccccgcgccttcctgcgggcgcgcgcaggccctgctcgtggcccggcccgggcaaccttccctcaatcgccgccgcgcgcctctcgcacgcccccgcgccggcctcaatgcgcctgcgcggcccggaattctcgggaaggtccgggcgccttctggggccgcccgcgccctccgccctgcacccccacctgccgcgggcgggcggagggcacgcccgggcgtgggggcctttgaagtgaggtgtagttggtcacccgggctgagcggaacgcggggccggggtgggaggcgcgcctggagggagggtcgtgcgtggacggagagcggcccgggtctcacgcgcccgggagacttccggagccgtcgtcctgactggcgccgcgcccgctgccaaagaatccagccgcaagcggcgccgggatcgcggggctctgccctctgggggctgttagcctcaggctgctgcgcactggggaggctgtcccgcggcctgcgcgctcggggattctccagacccaccgctggctcgggagcgctccctacttttgggttccccgaaagccatgtgcttcatacttaagggtcccttagcttgggaatcggggacttggtgaacaaattcatgcttacccagctacacccggcatgattttgaaaagcccatcgttttgccgaccgatttgcggtctccaaattaagtatctaacactttggtgattaacttgccctaaaaggtttttttttttttttttttcttttttttttttttggacaggctctcgctttgtcgcccaggctggggtgccgcggcggaatctcggctcactgcagcctcgaccctcccgggctcaggtgatcctcccgcctcagctttcccagtagctgggacgagcgtgggcagaggaccacaggcgcggacaccacacctgtctagtttttgtatttatttgtagagtcggggtttcaccatgttgcccaggctggaaaagccagtttctacatgggaattttcggatattttggccaaggccagctgtgggaaccttggaggcattggggttccttcgacctggcttccctgcctagtccatgtcctcttcctctttgtctctggcgcctcccatgattgggccgcctcctgcctagactcatagccaggccctcggaataatctgaaagctccttgccgtgtaaagaaacgatggaactacctccgcttcctggtctttagggaaacgcaacttgctcaggagcaggggttttcagactgcggcctgggacccccttaagagcgtgtgaaatcaacataaagcgtcttgcctggcattacaaagcgggggaagtggaaggaaactagcagccacgtggcgcgggccccagcggtggtgaccgggtgtgtgcctggtcctgtggtagctgttgcgcagcctgggggcgcgcccccggcccaggctttcctacagctgcagcctggactggcggggaggaatccggaagcaggaagagcggtgagcgggtcgctgaaggggcgcaaggtcttccctggcgactgccgcctttgcctgtttccttcctgtcaccaccagccactgtccccgctctcctcacttgtaggaacttttcctaccgcagtttctgccattgcccagggggtttgagatatagaggagccatccagggccctaactctgacgttcttttttttcttttcttttttttttttttttagacaaagtctcactcttggtcccccaggctcgagggcaatggcacaatctctgctcactgcaacctgctcactgcaacctctacctcctgggttcaagcgattctcctgccttagcctcccgagtagctgggattacaggcacccaccactacgcccggctaatttttgtatttttagtagagacggggtttcaccatgttggccaggctggtctcgaacccgtgacctcaggtgatccgcccgcctcggcc

SEQ ID NO: 1241385 - DNA, 4001 bp, Homo sapiens
gcgactcggtcgcgattcgcctcatcttccgatttgtaccgctccgcctcctgcaccatccggtcaatgtcgtccttgctcagacgacctttgtcattggtgatggtgattttgttttccttaccggtgctcttgtcggcggcggtaacgttaaggatgccattggcgtcaatgtcgaaggtaacctcgatttgggggaccccgcgaggcgcagggggaatcccggtcaggtcgaacttgcccagcaggttattgtccttggtcatggcccgttcgccctcgtatacctgcaccagtacgctgctctggttgtccgagtaggtggtgaaggtctgcgtctgcttggtggggatcgtggtgttcctcttgatgagtggggtcatgacaccgccagctgtctcgatgcccagcgacaacggggtcacgtcgagtagcagcaggtcctgcacattctctgatttgtcgccgatgaggatggccgcctgcaccgcggcgccataggccaccgcctcgtcggggttgatgctcttgttcagctccttgccgttgaagaaatcctgcagcagcttctggatcttggggatacgagtggagccgcccaccagcacgatctcctggatctggcccttgtccagcttggcgtcgcgcagcgccttctccaccggctccagggtcccgcgaaagaggtcggcattgagctcctcgaagcgggcgcgcgtgatggacgtatagaagtccacgccctcgtagagcgagtcgatctcgatgctcgcctgcgtggacgagctcagggtgcgcttggcgcgctcgcaagcggtgcgcagccgcctcacggcgcgcttgttgggcccaatgtccttcttgtgcttgcgcttgaactcctccgccaggtggctcaccatgcggttgtcgaagtcctcaccgcccaggtgggtgtcgccggccgtggacttcacctcgaagatgccatcctcgatggtcaggatggacacgtcgaaagtgccaccgcccaggtcaaagatgagcacgttcttctcgccgcccgcgcagcccttcttgtccaggccgtaggcgatggccgccgccgtgggctcgttgatgatgcgcagcacattgagccccgtgatggtgcctgcgtccttggtggcctggcgctgcgagtcgttgaaataggccgggaccgttatgaccgcgctgtgcaccttgccccccaggtaggcttccgcgatctccttcatcttcgtgaggaccatggaggatatctcctctgggaagaaggtcttggtctcccccttgtactctacttgcactttgggcttgcctccctcgctcaccacccggaacggccagtgtttcatatccgactgcactgtggcatcctcgaatttccgtccaatcagcctcttggcgtcgaagatggtgttggtggggttcatggccacctggttcttggcggcgtcgccgatgaggcgctcggtgtccgtgaaggccacgtagctgggggtggtgcgattgccctggtcgttggcgatgatctccaccttgccatgttggaagaccccgacgcacgaataggtggtgcccaggtcgatgccgatagccgggccacgggcagacatcctgactgaaaggcgagcgacgttaggacgggaaaaccagggagatgaactccgcggagtcaactaacggccacctcgaaccaagcaccacgggcactaccagcaactcagctccccgcgcccagttcccggttcttatagccgcctctgggaactcccagacccaatccgctcccgggaccgccctcacaaactcttccagctccaccacaggcttgcctaggtcggagtgactggcccgtgacccaacagatttcaagttggacgaggggcgggactccggcccccgccaggagacagaggggcggccgttatgtaaatgaggttcctccctgactctcggccgccaggccgtggtgcctcgcgcgcctcctgctgctggctggcgttaggcgcgcgctcccagagccaggtgtacgcgctttttcgcggtctttgccctagccgacgtgcatcggattggcagggcacgcggccaatgagcagtgcggactgaggcgcggcacggggaggaggcgtggaaggggatcccggtgaggagagccactgggagagttcgctcaattcctgaggttttaaatgcagttcactgctagggtgccgactcactgagcacgcaggggcggaggaattcattctgagttggttgcaccgaagaaataaagctcgagcagcttgttttccccggcgccgtccaaggggagggaatagggaattggggtggctggggtggggggtgagggcggatcccttggacggggattaaagaaaagaaaaagtctgaaccggcggtcggcctcctgggattttatggtgggtgcttcactgcgtctcagtggttgtgagcgctcgattaaaactgcctggctggggccgggcgcagtggctaacgcctgtaatcccagcacttgggaggccgaggcggccggatcacgacgttaagacatcgagaccatcctggccaacatggtgaaagcccgtctctactaaagatacaaaaattagctgggcgtggtggcgcgtgcctgtagtctcagctactcgggaggctgaggcaggagaatcgcttgaacccgggaggtggaggttgcagtgagccgagatcacgccactacactccagcctgggcgactgagcgagactccgtctcaaaaaaaacaaaaaaaaaccccactgcctggcgggcggagagaacctgagcccagggcgaggccgaccgttttcccgcgccgcgtgagggcggctggcgggacggcagacaggggtgtggcggcgacttgtcctccgaggagcctgcatttaaacccttcctgcctcactcttcctttttcctgtttgtcctgccgctttaaactctggtttcgccttcctgttcattccattgcttattttaggtcgcaagtgctttatccactgctttgagtttttgactggaaaacccataatataatcagtcaaaacccacacgttgaaacaccataaagtcacccagtctcggtcaccctggcacacacggggttgtgatcgtgacctagtcatgtttctgactccgctcaatggaatggaatgattttctttggctgtgctgaggttaatattggaggcataaaccctccgagaaggtagatgaaaaggagcgcgattcacttcctcctgtttaacaggaatgtgaggacaggtctggaaaataccctggcaccaggtaataatctttagaagcaggctcccatataaatgggctcctggacgggtgtggaggctcatgcctgtagtttcagcactttgaaaggccgcggtaggtggatcacttgctgtcagaagttcgaggccagcctggccaacatggtgaaaccccgtctctactaaaaatacaaaaattagccgggcgtggtggcgcgcgcctgtagtcccagctactcgagaggcagaggttgcagtcagtcgagattgcgacactgcactccagcctgggcgacagaacgagactccgtctcaaaaaaataaaataaatggtctccaggaggaagcaaagacagcgatcactttacataatatgtgtggggaggctggggaagtccttccatcaagcttgaacaggtacctactacgtggcagtaaaaagccaaatgaaatggcctggtcttcagaggtggagagtctaataaacaggtaaacataatttgggagaagcgctgaaagcaaagcgccatgggaacacagaggggcacacccaggctgatggaaaagtgcgttgctgagagctacctggaagaggtggcatgcctaatccgggagctgaagttcgccagcaaagagtaggaaagccattctttacataggttgtgtatgggcgaagatgagagcaatgtttgctggactagg

SEQ ID NO: 1241386 - DNA, 4001 bp, Homo sapiens
aggagagagatgttggggctcagggcagctgaggatgacagggtcagcaaagggtgagtgcaggctcaaacagaggttagaggttggggcaggggtcagaagtcagggtcggagtcaggggccctgtgcccccattcaagcctgtgccatttgtgctggcggagttgggggaacccctggatgtccacccacggagacagaaaggtaaagggcaggggatacacacagaggagcacttgtcagcaggtagaagccaggattagatgctcatcgaatgacactgatggatctcaagaatatggttctcagtgtggaaaaaagcaatagaatgggatctacagcacaccatcctgcatgtcagttaaaatgcccgcaaacaaaacacaatacccattctgcaaaaatacatatgaaaaacagacacacattaaatatattagaaaggttgactttgagggaggggaatcgagggtgaaaaggaagaaaatgagaataaataaaaccagaaagagatctcccagaaactaatgaaaaaagtgagctgaagaattttgttaaaatcgatactctggatgtgagatcccataggacacggggccctattgacaaggtaaactcctaaaggagatgaattctgatggtgaatctgggggaagggagagctgaagagagtgggactcagtggtagatagaccctttccggctaggcaggaggaggcccgggcccagaggggagaggacctgtggaacacccagggctgggcatctggccagagtctgcctgccccgggccccctcccagatggaaagttagggtggacgcctgctgtgagaagacaggacagggcagcaaggctgcgggtgtcccccattttctctcccacgggtcccgggacaggacccccgcccttcccagccgcctcctcgcccccagcaccagcccctcccaggaacactcacccaggggcaaaactacggcagagccagaggccaccctgaccactttggccacactggtcactgctgatgaggtgagagcagaggcctccatgcctgctcgggttaattccgtggcctagagagtaagagatcctcaacttcagccagacctgccgaagggatggagctctgaggacgggatgggcacacaacctgacttgcttcccactgtcctgaaaaatgtgacgggctccagggggctagggaggctgctctgagcttgtggagcagcaggccttgaaaggatcctggggtgagggagggagggatgttggggagttggggctaccaaaggacctgtgttaggtcagggccctgagggactttatttccccaggggggctgctttctttctcctgaaagtcccagcgccaatgtcttagacacttccgggactcccttatctctccacggagcaattgaaaaagcaccaaaactaagaaatcagaaccaatcgcatttttaaggcatatacagcaggcgaggtgcctgctcttatgtaatctcctcactaacgtgaaaaagatgggaccctcctcctccgcatgttacagatgagggagcgcgatctggctcagtgatttgctccaggtcagaagctttccatagggaagcaacaccccgcccaggcatggacttgcaatggcttcgacttggttcctcctaacacttatctcttccccttgcccactttaccccaagccgccctcaaggcctgaggaaaacctgggcaaggacaaagctaattgtccttacattccagagtccagggacaggtggggctcgagtcccttcccatctgaggctccctgatgagaacaaaaacaccgggcagagagtggatgcttaaggcctcccctccgctccctgagcccacagcccacccaaggtccggggccacgggaagggtagctcctgcccaccctcccagtcttacccaaagaaggagagttcctgagaatgtgaagctgacctcaccgtcttaagcttggatgtgttcccaaagggtgtgatcccaggccttttaagcagctccaccccgactgaagcactgccccttgacacaggcaacaaatgagataggtttcattttccaggaaaccgaaactgcagacatctttctcccctcatgcgcagtccagaagaaaattcagttatttacagaaataggatttgcccatggcatcagtcattgtcagttaatataaaatgctttgtcatttaattcaaggatgggagtgtgctctacgcagaatgaagtcacaagaagtaagatcaaagttctataataaaatgataaatattactttctaatgaagaaggtgattttcagaataatagtagtccttgcgataggcagatgttccgtttttcaaaaaaagtctcaactgaaggcccactgtgctagatactgactaggcactgggacaggactgtaaacaaaacagaccaaaatatccatcctcacagagtttaccagcaatgggggcaaactaaacataataaataactaaatgtatagaatgttatttgatgaagcgctaaagcaaaaggaggtgaagcagtgacctaggcagaattatgggggggcagtcattccaggtggaggccacagcagtggcagagcccgtgtggcaggagcagcaagggggccagtgtggcctcagcaggtgggcaggggagagaggcaggaggtgaactcagagtttaacagggatccaggccctgtgaggccacaaaagcactgcaaggacttgatcttgtgtcctgaagccattgcaggggattatcatctatacctttttggggaaagggagatgaagctgagaaatgacacagtcaggctcaccctgcagctgctttgagaacaggcggaagagaaagcaccaggtcctggaatgtacatttaaatcttccacatgagtagtgtgcgagttgtaagattcaaaatggagtcacttgggtaaaacctcagcagacagagccagcaaggctttaatgggagggctctcacgcaagatgaggctctcccgtttgcctgctaacaggaactatcacaagaaatgtttccaaactgcagcttatcacatgggccacacaaggacagctagaagcacagggagagcgagccagttatgcaaaaacacttgcctggcacagtgtctcacaaacccaatccaaaactgcaggaacctgaccataactccaagattcccagtcctacctagcaactactgacacttggcggtcagaactcgccaggtcttgtaagatgctgccaccaccaataaactttttttcttcctttcctttcctttcctttcctttcccttgcccttgcccttgcccttgcccttccctgcccttctctgcccttccctgcccttccctgccctcccctcccctcccctccctttcctttcttttttttttttatggagttttgctcttgttgcccaggctggagggcaatggcgcaatctcggctcactgcaacctccacctcccggtggagtgattcaagtgattctcctgcctcagcctcccaagtagctgggattaaaggcaactgccaccatgcccggctaattttttgtatttttagtagagatggggtttcaccatgttggcccggctggtctcaaactcctgatgtcaggtgatcctcctgcctcagcctcccaaattgctgggattacaggtgtgagctttcggctgtgggatcacagccattaaactttctttcaaaacaacttgcataactttcataaaacaaattgcattgaactttccttcagaacaacttgcataacagcctctttctctaaaaatccccagctttttcctttgttctccaaaacaaaaaggccaccctggtccatatttatgttgtgggattgcaatcctacttcttttgtattattcccaagtaaaacgattttacttaaagatttgtctccctctctctctttttttttttttatgttgacacaagtgtgaca

SEQ ID NO: 1241387 - DNA, 4001 bp, Homo sapiens
tacctccaagttgcaaaacagggtgccagtgagggaccccagcatgaaggagctagcctccagtgcccccagcaagggtctgaggagagagatgttggggctcagggcagctgaggatgacagggtcagcaaagggtgagtgcaggctcaaacagaggttagaggttggggcaggggtcagaagtcagggtcggagtcaggggccctgtgcccccattcaagcctgtgccatttgtgctggcggagttgggggaacccctggatgtccacccacggagacagaaaggtaaagggcaggggatacacacagaggagcacttgtcagcaggtagaagccaggattagatgctcatcgaatgacactgatggatctcaagaatatggttctcagtgtggaaaaaagcaatagaatgggatctacagcacaccatcctgcatgtcagttaaaatgcccgcaaacaaaacacaatacccattctgcaaaaatacatatgaaaaacagacacacattaaatatattagaaaggttgactttgagggaggggaatcgagggtgaaaaggaagaaaatgagaataaataaaaccagaaagagatctcccagaaactaatgaaaaaagtgagctgaagaattttgttaaaatcgatactctggatgtgagatcccataggacacggggccctattgacaaggtaaactcctaaaggagatgaattctgatggtgaatctgggggaagggagagctgaagagagtgggactcagtggtagatagaccctttccggctaggcaggaggaggcccgggcccagaggggagaggacctgtggaacacccagggctgggcatctggccagagtctgcctgccccgggccccctcccagatggaaagttagggtggacgcctgctgtgagaagacaggacagggcagcaaggctgcgggtgtcccccattttctctcccacgggtcccgggacaggacccccgcccttcccagccgcctcctcgcccccagcaccagcccctcccaggaacactcacccaggggcaaaactacggcagagccagaggccaccctgaccactttggccacactggtcactgctgatgaggtgagagcagaggcctccatgcctgctcgggttaattccgtggcctagagagtaagagatcctcaacttcagccagacctgccgaagggatggagctctgaggacgggatgggcacacaacctgacttgcttcccactgtcctgaaaaatgtgacgggctccagggggctagggaggctgctctgagcttgtggagcagcaggccttgaaaggatcctggggtgagggagggagggatgttggggagttggggctaccaaaggacctgtgttaggtcagggccctgagggactttatttccccaggggggctgctttctttctcctgaaagtcccagcgccaatgtcttagacacttccgggactcccttatctctccacggagcaattgaaaaagcaccaaaactaagaaatcagaaccaatcgcatttttaaggcatatacagcaggcgaggtgcctgctcttatgtaatctcctcactaacgtgaaaaagatgggaccctcctcctccgcatgttacagatgagggagcgcgatctggctcagtgatttgctccaggtcagaagctttccatagggaagcaacaccccgcccaggcatggacttgcaatggcttcgacttggttcctcctaacacttatctcttccccttgcccactttaccccaagccgccctcaaggcctgaggaaaacctgggcaaggacaaagctaattgtccttacattccagagtccagggacaggtggggctcgagtcccttcccatctgaggctccctgatgagaacaaaaacaccgggcagagagtggatgcttaaggcctcccctccgctccctgagcccacagcccacccaaggtccggggccacgggaagggtagctcctgcccaccctcccagtcttacccaaagaaggagagttcctgagaatgtgaagctgacctcaccgtcttaagcttggatgtgttcccaaagggtgtgatcccaggccttttaagcagctccaccccgactgaagcactgccccttgacacaggcaacaaatgagataggtttcattttccaggaaaccgaaactgcagacatctttctcccctcatgcgcagtccagaagaaaattcagttatttacagaaataggatttgcccatggcatcagtcattgtcagttaatataaaatgctttgtcatttaattcaaggatgggagtgtgctctacgcagaatgaagtcacaagaagtaagatcaaagttctataataaaatgataaatattactttctaatgaagaaggtgattttcagaataatagtagtccttgcgataggcagatgttccgtttttcaaaaaaagtctcaactgaaggcccactgtgctagatactgactaggcactgggacaggactgtaaacaaaacagaccaaaatatccatcctcacagagtttaccagcaatgggggcaaactaaacataataaataactaaatgtatagaatgttatttgatgaagcgctaaagcaaaaggaggtgaagcagtgacctaggcagaattatgggggggcagtcattccaggtggaggccacagcagtggcagagcccgtgtggcaggagcagcaagggggccagtgtggcctcagcaggtgggcaggggagagaggcaggaggtgaactcagagtttaacagggatccaggccctgtgaggccacaaaagcactgcaaggacttgatcttgtgtcctgaagccattgcaggggattatcatctatacctttttggggaaagggagatgaagctgagaaatgacacagtcaggctcaccctgcagctgctttgagaacaggcggaagagaaagcaccaggtcctggaatgtacatttaaatcttccacatgagtagtgtgcgagttgtaagattcaaaatggagtcacttgggtaaaacctcagcagacagagccagcaaggctttaatgggagggctctcacgcaagatgaggctctcccgtttgcctgctaacaggaactatcacaagaaatgtttccaaactgcagcttatcacatgggccacacaaggacagctagaagcacagggagagcgagccagttatgcaaaaacacttgcctggcacagtgtctcacaaacccaatccaaaactgcaggaacctgaccataactccaagattcccagtcctacctagcaactactgacacttggcggtcagaactcgccaggtcttgtaagatgctgccaccaccaataaactttttttcttcctttcctttcctttcctttcctttcccttgcccttgcccttgcccttgcccttccctgcccttctctgcccttccctgcccttccctgccctcccctcccctcccctccctttcctttcttttttttttttatggagttttgctcttgttgcccaggctggagggcaatggcgcaatctcggctcactgcaacctccacctcccggtggagtgattcaagtgattctcctgcctcagcctcccaagtagctgggattaaaggcaactgccaccatgcccggctaattttttgtatttttagtagagatggggtttcaccatgttggcccggctggtctcaaactcctgatgtcaggtgatcctcctgcctcagcctcccaaattgctgggattacaggtgtgagctttcggctgtgggatcacagccattaaactttctttcaaaacaacttgcataactttcataaaacaaattgcattgaactttccttcagaacaacttgcataacagcctctttctctaaaaatccccagctttttcctttgttctccaaaacaaaaaggccaccctggtccatatttatgttgtgggattgcaatcctacttcttttgtat

SEQ ID NO: 1241388 - DNA, 4001 bp, Homo sapiens
tttggtcatacattagaaggaactgttcatccattcaagtttctcacgagattgccacaattcagtcatatcttcaggctccgcttgtaattttagttttcttgctatttccaaccacatctgcagttacctccttcactgaagtcttgaacctctcaaagtcatcaatgagaactggagtcaacttcttccgaactcttgttaattttgatattttgacatcttcccatgaatcacaaatgttcttaatgatatctaaaatagtgaaccctttccagaaggttttcaatatactttgcccagatccatcagaggaataactctctatggcagccatagccttacgaaatgtatcttaagtaataaaacttgaaatgcaaaattacttcttgatccatgggctgaagaatggatcttgtgttcacagacatgaaaacaacattcatctccttatacatctccattagagctctcgtgtgactatgcacattttcaatgagcaataatactttgagagaaatccttttttctgagcagtaggcctcaacagtgggcttaaaatattcagtaaaccatgctatgaacagttgtgctgtcatccaggctttgttgttctacttacagagcacaggcagattatatttagcgtaattcttaagagacctaagatttttataatagaatggtaaacaagcactggcttcaatccaaagtcactagctgcattagcctctaacaaaagagtgagcttggcctttgaggccagacattgacctctctagctatgaaagtccttgatggcgtcttcttccaatagaaggctgttttgtctacattgactacttgctgttcagtggccaccttcatcaacgatcttacctagatcttggggataacttgctgcagcttctccatcagcatttgctgcctcatcttacactttcatgttctggagacggcttctttccttaaacctcatgaaataatctcttctagcttcaaacttctatagcttcctcacctctctcagtcatcatagaatagaagagaatcagggccttgctttggattcggttttgggtttaggggatgctgtagccggttttattttctatccaaaccactaaaattttctccaaatcagcaataaactgtttcgctttcatatcattcatgtgttcattagagtaaaatgtttaatttccttcagtaacttttcctttgcattcacaaactggctaactttttggtgcaaactttcagcctagctttcagcctatcttgccttttgacatcccttcctcactaagcttaaccatttctagcttttgagttaaagtgagagatgtgcgactctttctttcacttgaacacttagaggcccattgtagggttattaattgacctaatttcaacactgttgtgtctcagggaatagagacccaaggaaagggagagagaaggaagaacggcctgtcagtggattagtctgaacacacacaacatttatcaattacgtttgtatcttatatgggcacagctcatggcgccccaaaacaattacaatacaaggaacactcatcacacgtcacccttgtagcagagcacatctccctatgatctaggtacgagcattgtacctaggatggacgcgttcgtcctcttaccttcgggaacgccctactctgtctacggagtaaagtacttaataaacttgcttttgctttgctatgcggactcaccctgaattctttcctgtgcaagatccaagaaccctctcttggggtctggatcgagacccctttccggtaacgaaactacactaagaatacaagaaaacttacgttactgtgcgggagctgacaaagtctctcgccggagggagcacacagaatttcaccttctccggccttttcccaagctggcaggagtaaagctgtaagaggaggtgccagcgccccaagccagctctcccgccggcactgctgcggtccgcgaggcagccaatcaggtagctgagtttgccataggggcgggacttcctccccagcgcgcacgagtacgtgcgtggaggtcccgccccggaactgcagttgctgctgcagctgaggtacagcggcggtttctgaggttcttcactcgcgactgacggagctgcggtggcgtctccacacggtgagtaccaaaacgagcggggttggagccgactctggagaggggctgaggccaggaacccgggttcctatcgcgggtcgctctgggccggtgggttcccgggtccagagagggcggccgccggcccaagccgtccaaccgagctgcgtgccacggtccccgcgccttgggctccttgtccggtcatcagagcctgacggccttggcttctcggcttctcggtttctcggtttcgtgcgcgcgttcgtgcctgagacaaagcgagagggccgcgcgggaccggcgtcacgaggagacagaggcccttctactctgcctggcgctctccgtgtcctcgcccggttcgcgtggcacccctcgccctctccttgttgaaccccgcgtgtttctttgtgtttttttttgtttgttttttgtttttttgccgtggcgcagcgggtccggcgggcactgtgtgcgaacgtgctctcctcgccgggcgccatgctcagcggttttttttgacgtgcgtcactttttcgtagtggcgtataaggattctgtgggacagatgtcctcgtttttcccattgtgcagactgggaaataagagactcagagattaatacgtccaccgcagagccacagctgacaagtggtggatctggatttgaaccaaagtttaccttggtctttttcacggaatctgttatctttcttggcctttctgaaaaggaaaaacctggatcgagttccacccaaacgagttgggcctaaatggccattaagccacttaaaatatgatgaagaaactggatgggttttaagacgcttggcaaaggaaaggatggtggagcaggcatttgctctctcaggcaaggcttgagaaggaagcaagcgcagtacgcttttaataaagctcacccctcctgcccccacaagaaaaacccctgagattcttactctgccttcagaacgacttaggtgtggcaggtttcatcctccgtgctttacataattttctttatttacataaaatgtacaacttagatattgttaggtaccctcccccctttttatagatgagagcactgaagttcagagaggagtgggtggcactatccaaggtcacacaggcagtaagtgttggatttggaattcaaaccaggtctagctcatatgtctttgttccatcacatgtgtaccctgtgttccaggcaaagctgtctgttctgtggtattctttgttcttctctaggtgggagcaactgtgtgatagccatctttgtatcctcagttctttgtagggcctagttgcttagaaaatatttgttacatcagaaccctctgcttctcagacaccaacctaatagaacatgtatctccttttcagcaaccatgaagttgaaggacacaaaatcaaggccaaagcagtcaagctgtggcaaatttcagacaaagggaatcaaagttgtgggaaaatggaaggaagtgaagattgacccaaatatgtttgcagatggacagatggatgacttggtgtgctttgaggaattgacagattaccagttggtctcccctgccaagaatccctccagtctcttctcaaaggaagcacccaagagaaaggcacaagctgtttcagaagaagaggaggaggaggagggaaagtctagctcaccaaagaaaaagatcaagttgaagaaaagtaaaaatgtagcaactgaaggaaccagtacccagaaagaatttgaagtgaaagatcctgagctggaggcccagggagatgacatggtttgtgatgatccggaggctggggagatgacatcagaaaacctggtccaaact

SEQ ID NO: 1241389 - DNA, 4001 bp, Homo sapiens
cgtaaggctgagaccaatcaaagccttctgcctaccgattatctgcgtggccaaccacctccctctgcccctccatgacagggcagtctaggagagagggagaactggaaacctccagctcagaacaccaaccagagctgcaagaagcaaaacagggagatgcatctgcatgtgacctttattcctcatgtttctctgacttgagtgggggttttggaggttcaccttggggtacattttctcttgcctcatcttctttagcctcgggttcagctgggagagaagaagaaggtgaattccccaagcaggcccccaacactgacccaacagaggccaggaggatgttggatgatgtggagagtccagctgcccctgtggaggagacagagaatgagcacaggggtcgggcagtggcccagaaatcccacccggatccctcctccaggtcctgaaaatcccagggctctgccatgggtagaagctgctagaggcaactaaaagacagctcaggggtgaattcacggaaactgagagacagagggagagtcatccacagacagaccctaagagctacagagcccctcactttacacaggaggccactgaggcccagagaggacaggggaccttgcccaggtcacccaggtgtcagaacccaggcattgctcttggcctaggttcctttcctcttctccctacccagcaccccatcacccctccactcctaccccaaacctcactcagaaggagccagaagaggggacagtgagggagagactgaagacccaggaagctgagggtcacggaacttcagggtgagaagagcttccctcgggctcagcctcagggctggatcttctcgcagctctggtggtcctgtctaggacacttacccacggactgcagagtagccaccaggctccccgcagaaacaccacccccgttggcaatggctgctgcggacatcatcttggctgctatggaggacgcggcgattcctgccccagtgaagcccatggcactgagcaccacgggcacagcccccactgccagggctgtggggagagagaagctgagtgcagaggtgggctcaggagaagggacccttccccccgccccccgcttaggaattccttgacagtttccggagactgtcagcttgagcaatacagagatggcaacttagtggtcttctggtgaagaaaaggtggagtgtggagccaggtgaagcaaagatgtcatagaaggaccagccatggccctggtttgtctctaacttgctgtgtgatgctgaggaagtcaatacccttcattggtctcaaatttgtgtgtgtgtgtgtgtgtgtgtgtgtgtgtccacgcataaatgtgaaataagccacgtggagtttagctgcaaatcctctttcaaacgatcttcctcctatgcttattcgacataaggactagaagagaagctgggtcaggaatgggagtgagcttttccctggagtattttgatgctgtggctcactcaggctactcgggcagcttcggaagtggagggtgagagccagcccagcgcctcatctctgcgttctcccagcagcccggggaccaggctaggtgagggcctggagacaggcgatccgggtaacttacctcctcccactgcagcagcagctgcccgttctagagagagagtgccaggggaaggcagagggagatgggaaaggggagaaagaggagagagaagggcagaaagggagggagggggagggaagcaaggagcggagggaggaagggaaggggagggaggaagggagggagagggagtcagtaggtcagctggttgatgaagtcagggaatgaagctattccctgtcccttcctgggctggggttggggaagcctgcccccagcccagcccgccagccccctggggaagcaagactcactcatcatggtgaggccgtccgggtcccaacttggcccaggaaatgacagcgttcttggggtgttacttccccctccatccagtagggacgcgcctactctgccctagagagacgcaggccccgccccccgccccaccccgctcgcccgggagccttcgcgactccccggctcgcctgtcccggcttgatggatctaccgaagagaaaagcgctggaaagaacctggaagccatagcaagtgagccccgcttccaaattgctgtagcaccgccccccactccaaccccgccaataacagaagagctgtttgctgcaaaaaccaaaaccaaaaacaacacaacaataacaaagaaacaaacaaaatgcaaggagaaaaatgatgtttaatttaataaacgatgtttaacttccagagagacactaatataaatacattctggcacgtttgctcccagcctatgtctcccctgaatatgtaaacaccccctccaccacttgccaatttcccttcacactctgccttgcaaattacttactttagttaatcaaccatttagatttccccaggctgcttaatatccttcatcaagatttttaaaaagtcaagtttattaaggtgtaggtgatttacacaaagtaaaattcacccttgtagtgtacacttctgtgagtctgggaggctttgacggctctgattcagaccgttttttttttacatgccccgccccctcctccatcaatcctctcatgcgcttttggagtcacccacgccctgctcctggcaaccatccccgcccatttgccttttccagaacttcaatatgatatttgtcattaaatattccatccccttgggttcaacgtatcagccctcccttttaagtgtttaaagtctaatttttgctctgataagttattttagcatgaagtgctaacattatggggcacaagtgttttctgtatattcctggaggtggaactgctgggtcagaaactgtgcattttttacagcacctgatacctgtgttgttatgttggcatccaaaactattgtcatcagtttacattttcccagcagtatgtgagagaatctattttttttctactcctcactaacaattagctttgtcgttaagaaacaataacacaaaaaccctttgttgatttaataggtgacttattttaatatacttttctcttcaccactagtgagactaaactatttttaagtgtattagcttcatgtactccttattttgtgagttatcttctcatattcttggatccttgttctactgaagtatttttttccttattggtatataggaattaatgatatattaattatcttcatccattctcatagatgttgcaaatttttatttacacttcattcctgcctttttggtgttttttttttaatagaaaagtgtttaatatttatgcaaacttaccaatattttactttattatttttgtctttagaaaaggccatttctactagctattcaatacactgtcacttgtattttctttagattcttctggggtttgctacttaagatttactttaatccgtctggaatttagattggtacatatagtgttttctgtatccatatatgtcttagccagttgttccactaccattattaaatcatcttacatttcaccttcgatttgatattccatctttatattcaaaactcattagctggtatatataccagtatatctgtttggatattttctgttctgttccaaaaagctatctcttctggcaacaatatcacactgtttcaatcttataaatttattatctgatttaaaatctgactgtgcatagcagtattgttaatccagggctacacattttttgtgaagattaaaaacactttgtaatgctctctactatcctgaaatgaaattcatagataacatcctctattatagttacacacaaggtattgcccaaacaaaagagaaatacaagaaaattacttgtaataaaatagtgtatatttcagtatgtacatgctcaagcactattacaccaaaaggtat

SEQ ID NO: 1241390 - DNA, 4001 bp, Homo sapiens
tctaaggcttcccagcacataaacaaaactttatttagtcagactcttgggtgctgaaatatttatacttttgcttactttgtttaaaaaaaacagcattaatataagcacttttagatctcatttaatgtggcttcctttgattctcacaataatggacagaaactgagactgctgtcattttacaaaggaggaaactgaggcctaggaaggtgatgaagtggctgacataaacctaggagcaaagccttctgatttcagatcctgggtttcctgggtgctttccactctaccctgctgaaacttgttttaagatgttctaaggactgactgccccactaaactgagaggggttacagaagagctcgtaaaaactcttatgcaatgtcgacacttcaaattgtagtgtcatttaggtttcagggatggtggaaacaatctttctgataataagcagcttattttcttctcaagtcagacaattccatcccttcaccatggttgcccttttccatttgtcacagcactgagtatctgaatacagcatcctacatatggcggttgtgctaaaacaaaaattcaatgatcttgtcgctaaatgctgttcacaggtgttttctctaataatttttaagtatttcaaggttttaaactttttgaagaccctgtatagatccatagggtagaaaaacttctttactgcctgatttttgtgtatgttaaatgtagtctatttattgcccatcttctcccactacaacataatcacatgagggcaggaactttgctttattcattgctgtatctccagcacctaggacactgcctgatacacagtaggggctcaataaatatttgttgaatgaatgaataactacattcacatccccaggtactaaaaaacattcacgtatcagcaggcctggtgaccttcaaaacacttagagatttcacagcagacactaaagacttgctctggggcccaatcttttagtaagtgcgatcctaaccagttttaaagataaaaaggcctgatgggggttacaaaggaggaaggtagacactgaacttgggtcttgaatctagctccattatttactaactataacgctgggtaaaccacagcctcataggcagcagtagctaacctcttctgacctcttccgtgataacatatgccaagcactgagttacacgcttcccatgtattgttgcatttccttttcactgtaacacctccattctaggcataaggaaaccaaggctcggaaaggttaaatcgttttttaggttttttttttttttttgaacccaggcaacagctctatgctccatctggcctcagtgcctgagcacctaatcactccctcacgttacaaatcggtcttggtttccttaactactgaggtaactgaggttaactcccacctccccacggggattaccgggaagaaaggccgtccctgcctgcctcccttccatgcataaaacagtgcggcttttgcaggaacttctgcgacgaggtgtcccaaaggaaaaactctaggatgggagcgagtgcgaccccggccggggctcccctatcaccctgtgatcgatctgttctggggaagttcgcactcggggctctagaaaacggagaaaggctcggaaatttcccacggtcctagacgccggcggggacagggtgttttctactttctgaggattttaaagaaagcaaaccccaggccagcagcggcggagcccacagtggcctgggggcggggcggtgaggctgcctccttctgggcctcacccggcgcggcgcgaggcctgccgccctgagtcgcctcagagaagtcggggccggcggggtcgctcctccccacccgccaaatcctggcccccaaggcccccgaattggtcctcacggaggtagccaagctgtagcgaagctcctcgtccaagtcgagcaaatcctccatctccgcggccgcctgacgtcacttcctggaaaccgactggcccagacgcgtccctgctaacagccccgcccctccaccccaatttttaaagggtacgcagcatggttcctggattctgtgtgccatcctccaaactaccgaatctttcttaaatctgccttgcttgacatctggaagcaacctccggttattaaaactcgccaacgctgctcctgcgagacggtaaaataatttggtcgttaggaactgtctgtatttgtagctctgtttaaatatatcaatatattaagtgcaaagcactactactgctatactgatgcctcccacttgtacagctctttgcaaggtacagaaggccgtcacagttattggcttaacgtgaggggcattaacaaccttgtgtgggaagcaagataagtggtattgtttccatttgacagatgagaaaacagggaatcaggtgtaataaatggtttaccatgaattatggaaactgcaatatacataatctctgccttcaagaagtttacagagaggctgaatcaacacatcaaatagctgagtagtaataactttcaaaagtacaaatattcaatatctcattaaatcccaataatcccgcaaagtgagtagcagtagtatctctaacacaacaataaagcacactgaggtacaaagaaggggcttgaggaaaatcacctaagtgccaagcagcagagccaaatgcccttctgacaccagacattactggagtatttatctccagcacatactactgggtgccagccattctcctaggctggcagagggagatgtaccacaaattcccagcctaatggggcatttaagttgcgtctttgttgactcttcatatgagatctccaagtcaatatcactggccaggtccctgacactggttggctgagatccataggagatgggctgatagccctgaaagcaaacaacattccagtattatgttgaggggaaggcctggatggacacaggttaaaagcaaggattcggaagtgggagtagcacccctgaaacctcattgcaagcatttcttaaatatccagtaaatcactcagttcagtcacacatgttactggataggactgtgtgttagcatgcctgtgacagcaagagcactggcctggatatcagaagagctgtgttctcatcttagctctcctgaaaactacctgtgtagtcagagcagagccctttccgctatcagtttcctcccttgtaattactttagagattatctctaagatcctttgttaacttgcttctcagtgagaatactttgttagattttaatctgaagaaacactcattgccaaaaatccaagacagatgaaatataggctccaatgaatcccttgttcccttcttcttcggcaccagatgaggaagaagggattaatctttggatttttccatttcttgtaagctcacagcatacgaccatcaccttatagtcagtttccagaccttcacccccacttcttccccaacttgctgaaaacagaaggcaaatggtcctcactctgggcagagaggtaccctgcagtagtagcttccagaacttgcttagcacctgaatcacgtgtgaggtttgtaaagaaacagagatgccagggcctcagctctggagactgatttggtagaggtggagtccaaaaaagtataactttaataattttccttcctatcttgcaactgtctgctcaaaggccttcccttatcaccctatttgaaactgcaacatcccccaacctaggcacaccccatcctccttccctgcttgattttctgccacaccacatttgtttgtttgcttgtctgtttgagacacggtcttgctctgtcgtccaggctggagtgcagtggtgcaatcttggccccctgtaaactctgcctccctggctcaagtgattatcctgcctcagcctcccaagtagatgcctgcgccaacatgccgggctaatttttccatttttttgtagagactgggtttcgccgtgt

SEQ ID NO: 1241391 - DNA, 4001 bp, Homo sapiens
gaagctatcctcaactatttcctgcacattcttccagacgctgtgcaagcttatattataagcatacttgagagtgcatgggaagacttatttacttattctgaaaggatttcatggcaaaaaaaaaaaaagaaagaaagaaagaaagatgaaaaacactgaaaagtagatgtcccacaggtctgcgactccattagtctggcaggcgacagtctccagcttgtgggaccattccccacacagacaagccctggcaaatggaattagctagcacatcacttcccaaagtgggttccctaataaatcacctgcacctgttgggtgcttaaatgaatttgggaaacaccagtttaacggtttactttctacagacttcttgcagactttaatgtacaatgacagtatgaatctccaaggggtaggagatacagcagtctttcccaagtttacctggcatcacttttttctgagaagcagctcatgggatgagcattgcacagaacacactttggggaaagccacctgagtggttctcgggttcacagactcccagcaaggggtctggaagacagctgagttaacctctggcacccgcctcccctaagaagctcccatgccatctgatttggcccaggacccagccagcttctgagaccactccaaagagtcatgacctgtagtgtccacactagatccaatctcagttagatctgaccccctccccaccactgaacttctccatctacccccaaagccaatgctaagacagaactagaaggaagaagtgaaatcacatgtctggaatccctaagaccctagtttttaatattttgcttcatcattcatatttcagcacttcctaatatttttcatatcatggcacaaatagagaactataatatttatgtggcacactgagtgaaagaatacagtacccatgatcatgatcaaagatatccagtccacagctccagccagccagctgcccccaaaagttaagggtttcactcctttagtatgcttataactaacccattcatggccagggcagtatcaattggtattgggatgcttcatgcctgtatcatgccattattccctaatattttacccagaaaaaacatgggccattatagggatgttttaaaagaaaaggagagaaccaacataaatacagacttttacatacattatatttcatttgatctgcacattagcctatggggcattatatcattttgcaggtgaaaaaaaaaaaaaccctgagttttgaaaacttgaattgactcaagatcatccaatgagagtcagagctaggactcaaatacagaccttgtctaactcccaaacctttacagcccctctgagatcaaaatgggaaagtaagctggaattgccctggtccctcacgcataccctggccagcacacacagggcaggcattcgggaggggcagcagactcactcatatctccagggggagatggccctgctgttgaggggtccatcttcactggccctacaggactctgggtggcggttgggcctagcaggctctaggggaggcacaggcacagtgctccacctcagcagctcctcagaggtgtcctgccctttgctggggcagcagctgggccagtggctgtaggtgtgggttcccatgaccattgccaagaatgcaaccacctgtaggaaaaggctaatgagagaactgtcctcacctaatctgggtcgctccctcatctgcaccctccccctgggatcccagtttctcactccacttggcccccagccccaaacctggcagcttggcctccctccaccctcagcagcatctctgctcctctccctctcagcacagccctcaggcagccctctgcactgacctggtacatgctgggcactgcacactcagtcacaagtggggcactgactgacaggcctcgtggaagcaggctgactggagcaggttaggagtcctgattttattttcagcaagcctgttttgtttattcaaatttatttccactgtctttttagggagtgacttgaggttaaaaaacaaaaccaaaaaaactctgaaagtatttccaaaggctgcttaaaatgcaatactcatggaagttgtgatgaccatcattatatgcctggtagctgattgggtaaactttgctctttgaatttttctggccatggggtcaaagcaataacagtctgctgttctgcattcttgtgaactggcattagcgggatttccctggttggtttggtagccaaaattaggaaatgtcttgtggcctcccttcaagaggcctcgtttccatgatccctgctccccccatccagggtctggtttcaccattcccctcttcccaggtgtccctctgatcatccaccttcgtgattatttcctttcccttagacatcctttgactcccatcccctttgttctctgacctcttccacattttcaatgaccccaaaattctatgacccccatcagctatgacttctcccccattgtccatgacccactccctaactcccccttgccctcgccagtcactgccccccaccggggatacaagcctaccctcacagggctgctggaagaccctgacttcctaagtttgttggctggatgggcaaggtctgatggaagaagctgtgggtgagtgtccccattgcacaaatgagaaggtgaagcaaggaagaggagggaaactgaaacagcctcacctaagacccaacaggaaggaggtctcagttccaggaaccaacctgctctcattcacagagccttggggaccaagcccatgacagggtcagctactgctttcaggccatgaagtgagcccactcagcctcagcaggtccagaaacatgggccactgttagccaggagggtgtatgtgtgccccagaaaggcttacagttgggcttgaccccaaagacacaggtcagccgggtccagcctgcttgggagacactgtgctgagagtgggccagtgtgtccttccccccaggtccttctcttcatgcttgcctattggcctgcctcatcccccatacgcacccaacatacccatacacagacattgcccctagaatgatgtggcttgatttgcatgtgctttcccttagaaaatactcctctagtaaccaaggactaggaaatcaacaaagggaaccaggaataacttaaactgcagtgagaggaatctttccaatgcgttagggcaaagcagccccaaaagagagaagtgatgaagtcaaagggcaatctggaaaattgggagaaactgctctgctctgatgagtcttggggcacctggaactgtgggatggagggcacttagaagaagcaggtggtggctgggaaagcaggggcactcaggaacagtgatgaggccagtatcatggccccactctcactgcctcaccctctgcccccagtactcgcagacgtcctctcccttccatatcctgctggcctcagctcctgtgcacttacatgtgccaggcatggtgctaagccctgggcatgcatcatctcattttatcccgacaatgaaaccatgacatggaaactattatccccatgttacagatgaggaaactgaggcccaaggaaatttagtaacttacccaagatcacaaagaaagaggctgagctggtttcccattccagctctgaccaattccacatgtaacctcctggcatggaagtgccacaccgtgcctacccctagttggctgtgaatggaaggggagccccacagtgaatgctttcctgctcacctgggcttgggttgggacaagtttcaactgcacctgctgagggccacagggtgtgtctgcccacttaggtatccagccctgctgttcggattcactgcactagctccctttcctagccttttgtctggcagacatggcctcaaggtggcttcccgtgctcctgggaaaacctcaatcccagaacaggatcttaggaggca

SEQ ID NO: 1241392 - DNA, 4001 bp, Homo sapiens
atattataagcatacttgagagtgcatgggaagacttatttacttattctgaaaggatttcatggcaaaaaaaaaaaaagaaagaaagaaagaaagatgaaaaacactgaaaagtagatgtcccacaggtctgcgactccattagtctggcaggcgacagtctccagcttgtgggaccattccccacacagacaagccctggcaaatggaattagctagcacatcacttcccaaagtgggttccctaataaatcacctgcacctgttgggtgcttaaatgaatttgggaaacaccagtttaacggtttactttctacagacttcttgcagactttaatgtacaatgacagtatgaatctccaaggggtaggagatacagcagtctttcccaagtttacctggcatcacttttttctgagaagcagctcatgggatgagcattgcacagaacacactttggggaaagccacctgagtggttctcgggttcacagactcccagcaaggggtctggaagacagctgagttaacctctggcacccgcctcccctaagaagctcccatgccatctgatttggcccaggacccagccagcttctgagaccactccaaagagtcatgacctgtagtgtccacactagatccaatctcagttagatctgaccccctccccaccactgaacttctccatctacccccaaagccaatgctaagacagaactagaaggaagaagtgaaatcacatgtctggaatccctaagaccctagtttttaatattttgcttcatcattcatatttcagcacttcctaatatttttcatatcatggcacaaatagagaactataatatttatgtggcacactgagtgaaagaatacagtacccatgatcatgatcaaagatatccagtccacagctccagccagccagctgcccccaaaagttaagggtttcactcctttagtatgcttataactaacccattcatggccagggcagtatcaattggtattgggatgcttcatgcctgtatcatgccattattccctaatattttacccagaaaaaacatgggccattatagggatgttttaaaagaaaaggagagaaccaacataaatacagacttttacatacattatatttcatttgatctgcacattagcctatggggcattatatcattttgcaggtgaaaaaaaaaaaaaccctgagttttgaaaacttgaattgactcaagatcatccaatgagagtcagagctaggactcaaatacagaccttgtctaactcccaaacctttacagcccctctgagatcaaaatgggaaagtaagctggaattgccctggtccctcacgcataccctggccagcacacacagggcaggcattcgggaggggcagcagactcactcatatctccagggggagatggccctgctgttgaggggtccatcttcactggccctacaggactctgggtggcggttgggcctagcaggctctaggggaggcacaggcacagtgctccacctcagcagctcctcagaggtgtcctgccctttgctggggcagcagctgggccagtggctgtaggtgtgggttcccatgaccattgccaagaatgcaaccacctgtaggaaaaggctaatgagagaactgtcctcacctaatctgggtcgctccctcatctgcaccctccccctgggatcccagtttctcactccacttggcccccagccccaaacctggcagcttggcctccctccaccctcagcagcatctctgctcctctccctctcagcacagccctcaggcagccctctgcactgacctggtacatgctgggcactgcacactcagtcacaagtggggcactgactgacaggcctcgtggaagcaggctgactggagcaggttaggagtcctgattttattttcagcaagcctgttttgtttattcaaatttatttccactgtctttttagggagtgacttgaggttaaaaaacaaaaccaaaaaaactctgaaagtatttccaaaggctgcttaaaatgcaatactcatggaagttgtgatgaccatcattatatgcctggtagctgattgggtaaactttgctctttgaatttttctggccatggggtcaaagcaataacagtctgctgttctgcattcttgtgaactggcattagcgggatttccctggttggtttggtagccaaaattaggaaatgtcttgtggcctcccttcaagaggcctcgtttccatgatccctgctccccccatccagggtctggtttcaccattcccctcttcccaggtgtccctctgatcatccaccttcgtgattatttcctttcccttagacatcctttgactcccatcccctttgttctctgacctcttccacattttcaatgaccccaaaattctatgacccccatcagctatgacttctcccccattgtccatgacccactccctaactcccccttgccctcgccagtcactgccccccaccggggatacaagcctaccctcacagggctgctggaagaccctgacttcctaagtttgttggctggatgggcaaggtctgatggaagaagctgtgggtgagtgtccccattgcacaaatgagaaggtgaagcaaggaagaggagggaaactgaaacagcctcacctaagacccaacaggaaggaggtctcagttccaggaaccaacctgctctcattcacagagccttggggaccaagcccatgacagggtcagctactgctttcaggccatgaagtgagcccactcagcctcagcaggtccagaaacatgggccactgttagccaggagggtgtatgtgtgccccagaaaggcttacagttgggcttgaccccaaagacacaggtcagccgggtccagcctgcttgggagacactgtgctgagagtgggccagtgtgtccttccccccaggtccttctcttcatgcttgcctattggcctgcctcatcccccatacgcacccaacatacccatacacagacattgcccctagaatgatgtggcttgatttgcatgtgctttcccttagaaaatactcctctagtaaccaaggactaggaaatcaacaaagggaaccaggaataacttaaactgcagtgagaggaatctttccaatgcgttagggcaaagcagccccaaaagagagaagtgatgaagtcaaagggcaatctggaaaattgggagaaactgctctgctctgatgagtcttggggcacctggaactgtgggatggagggcacttagaagaagcaggtggtggctgggaaagcaggggcactcaggaacagtgatgaggccagtatcatggccccactctcactgcctcaccctctgcccccagtactcgcagacgtcctctcccttccatatcctgctggcctcagctcctgtgcacttacatgtgccaggcatggtgctaagccctgggcatgcatcatctcattttatcccgacaatgaaaccatgacatggaaactattatccccatgttacagatgaggaaactgaggcccaaggaaatttagtaacttacccaagatcacaaagaaagaggctgagctggtttcccattccagctctgaccaattccacatgtaacctcctggcatggaagtgccacaccgtgcctacccctagttggctgtgaatggaaggggagccccacagtgaatgctttcctgctcacctgggcttgggttgggacaagtttcaactgcacctgctgagggccacagggtgtgtctgcccacttaggtatccagccctgctgttcggattcactgcactagctccctttcctagccttttgtctggcagacatggcctcaaggtggcttcccgtgctcctgggaaaacctcaatcccagaacaggatcttaggaggcagtgccgtttcagaagagctggatacctatgggtctcgctctcaccaatcaga

SEQ ID NO: 1241393 - DNA, 4001 bp, Homo sapiens
cctcccggccttcccgtccaccatcctgaaaacagaggtgggtgtgccttctccaatgtaatgtgtccactgggccatgaaccacacacctatcagacacctgctgtttgcaagatggaggtaggggaggggctggcagcagggagtcaggtctcattcctgactacagggaaatttgacctccaggcaccagcaaaaagccaggggcttgagcttacttcactgtccccgtccagagctgggccagctgcgtcctgccccacacccacaggcagcaccgcatcactttccagtcaccacccacccctcccgcagcctgcatgaaccgcataacttttccaacccaggaagtaactgcactttgatggaaggcgcagagtctatttcaggtaggagcttccacgtccccacatgtgcggtgtgtgtcattcgcttgacagccgtcagctcctccacaaagtgggcgctcacctgaaggttaactcaggagccctggctgtggaggctacagtcgcacctggccacttggtccgtccccactagcgacatcccctttgccgggctgcagggcccatgacagtccagggatgggagggcagggcctgggcagggcccactgcaccaacctggcttttagaacagaaaattgctgctgccctggtaggggtgggagcagtgtgaggtctcagaccccaggcctggaacccaatgctactatttgctgcactgggggctgagcaccgacaccccaaaagcccctggctgggtggcaccctcggggtctgaggcactgctctgggaccccaccttcccagtgcagggcggcagggagcaggtcccagcctgagctgctgtcccacccttcagagtgcagatgtggaaactgaggccggaagagggcgagtatcctgctccattccagtgccagacggaggggcagggctggcagtaagggaatttcctacgtccagcgccttctgggtgtgcctgacctctggcccggttcctgggttcctggttccctgcctgggcagggtctctgcctctctgcctcctggtgtgtccagctggagtgggcagtaatgctgtggtcacagctgagctgcgggagccctgggtggggagcttgagccccagaaggcccagacagacagaccaccccccacgcctgtgctccccagggggcattggggacggtcagggacacagctggtcaccccgccttcccctccttagtcatggtcactcctggggcgactccccagttagagggttgacgggtgggtctgggggcgtacagggattggatcctaccccacccaaaaggaacagagagctgtgatggaggctgattcccctaagcctgccagcggttgcggggtgggaagggctccctgtgcgcccacctgcgcgtgggcagctggaagccaagcagtcagggtggggccgcaggccggcgcgcacctcggggtgccacccgggcggcggacccgaagttgaagtttattttcccaactgtggctgattcatggtcaggatgtggcagccgcgaggcgcggaaatcccgcctgccctgggagtaggcccggccgaccctgggcccaccactctgcggccagtgcgcgctcgggcggtgcctcggcgcggaggaccatagtcccgagcggggcgcgcggagccgggggggccaggggcgccctggggtccccgcccgggaactgtaccctgcgccgccggaccgcccgccgccacctgggcacacacgccgcagcccggaacctcgctcctggacccaagcacgcccctgcctcctcccggactcagtttcccctgaagctccaagcggaccccgaggccaaggacttacccggtgaggcaacggccagagggcggtggtgcggccggcgctccgtccggggccgggtcaggggctgcgggcagccggcgcccactgccgcgctccgcaaggctcggacggtggctcctggcgggcgcggggcgggcggggcgggcgggaggaagaggaggtgccgccccgcccgtcagcggccacgtggggagcgagcgcgggccgggggcggggcctggggggggaggtgggtggctgggggtggccccgcccactgtggccggtccctgagggcgctttaaggggtctccccactcccgtgaataacctggccgccccctcgcggtccctgctggcctggctcctggtgggcggagatgggggtgggacgcgcagatcggggccgtctcccgcctcagcccccactgtccgccccgtccctgccctccaccgcctcccgtccacctacacccctatcctccggtgggactggcctcccaggcgccgctcacctctctctgccccggcccgggactcccgttccagccagccggatccggagtccccgcgttcggggatccctcagcagagatggctcttcccaggctttggggagagagagcctacccatcaaccaggccacccatgtggcctcctctccgcagccctgcctgacccccttccacccttgatggggtctcggcggtcttgggcagccgcacttcgccggttggtggagacagctgcatgagggccgcggaggtgtcgcaatggggtgggttttctctgccacccctctgctgtccggcctcatctgtctcctagattgaggggggcacccatccccccaccgccgacattgaccagcatggggcgtgcccatagtcggctctgaaagccagcctggttggatgagagccagaccccagctctggaagtcccttctgacgtctgaccctcagtcagagctgcaggaagcagcgcaccaggcctggggtttgggggccactggcagctagagggagggcagaggaaggcaggcctgggggagcccccgtgtgacatgtgacagagcagacacaacccctgccctgagaaccggcgccagcactccctgtgcggcctcaggctcggatatgactctgtggagcctcagtttccccatctgtaaaatagaataagtacccgtaagggctgtatgagggtcaagaacatgcggataaagtgtctccactcggagtcctgacatctctctccggagggcctgctgtgtgggccgtggcggccagggctcagggtgagggcgaggggagagaaaagggctcctgaatggcttcccagccccgatgcagcttctgctttgaggccagctgcgtgtcctttggctttggtgtgcctccgctccggtggggataagcgccgaattgcaggctgcgtctgtctgctccctgtgcggaccttgccctgcccagcagccccagccccggaagtttgctggctcagccccagtgcaggagcagctgcaggccacagccccgggtgtgcctgaggagccagccaaggcaggcgctcactggacaccctccaacctgggcggccgctgctcctagacaggcactctgcaattcttggaatgcacctggaaggccggcctccggccctccacaccgggctccagggccccttccagagcagaaggccttcctgccctccctcaagctgggctttgggtctcctggtgcactcctggacccgaacattggtgcctgccctggtaccaccccaccctggagggcacgggcggggctgactcatctgcgttgggagctgatgcctggcagcggtgctgggcagtgggtgtgtttgttgatccagtgaatggaggaatgtgaggaggttggtggggagtgagctttgacctgcagccccctcccctgtccacctgcctgggggaaagtcagagtcctgagccttactcagaggctggagtaggaggtcaggtgtgggcgaggggtccacctttcctgccctgatgggggagggaggcccagcgcccccagggccgctcctgcctggggctgtctcccttgcacccagtcgtgcttccgagctgcacacctggtccagagaggccagcacaggccggagcagg

SEQ ID NO: 1241394 - DNA, 4001 bp, Homo sapiens
aaacttgcaagttgaagaaagccccacagaaattcccatgatctgtttcctctaaggccaacctcgaaatcatcctggtctctcgtccctcagcagccaggccgcagtggcatctgcagcagcagcacttgccggctttctgaggggtggcacttattgatgtgccgggtcagccctggagagctaaaaaaagtggacgggcagtgcttgcacgagaaaatttgctgggcactcccgtcagatggcccgctagggcccgacgtttcgggaggagcccccgccagagcgggcaggagcagctcctcgcggacagcatgccacagccggtgcttctccctgatatctgctgtagggaagtgcgctccgcacaatgggcaagcgaaggcaagtggggcaccgcgttcggagccaaagcccggcgctagcgcacgggccgagcccgcctcgtgagtgctcaggtgcttgcgcagataggcttggcgacgaaactttttgtggcaatatgggcacacgaaaatctcggatcccctgccaccactggtactgcccggcacaggtacccggcgccccaacaccccctccgtgtaggggccctgaggcagcggtggctctggatgcgtcagcacctggaggccctgcctcggggcgctgtccgggtgctgatccgccccggagctgtccctggcctgcgggtgctgatccgcagtccgctctattcggctgttctcctttccctccgccagaaaagatgcaatggccccggagtcccgggaggacgaagacgacgaagaaggcggcttcccgtcggcggaggagactgtggcggcgtttgcagccgcaggacgcggcttatgccagcggcgatgggaggccaggttcgcaggacagctgaacaccttgtcgcactcagggcagcggtactctacgcgcacgatgcgggagcagcggtgctgggccagcgcgaaggggtctgcgtactgctccttgcacagctggcagatgaactcccccagtggcgtgcggctgccccccaagccccgggacggcgctccgggctcctcctccttgatcttcaggcccaggacaggggatgtggtcacctcatcggcaaagctcaacttcctcatggcctttggcttcttgattcccgcggccgcgggtccagacgcgcagtccgtgggtgccttgccgcggcgctcgccgccggccgcccgcttcagactctgaagggcggccgagaggggcgcagggtccggctgaagcgcgggctctgggaacggcgcccgaagcggcagcagaaactgctcccccggggtcggtgcggctgctggcgccacggagcaggagaaagcggccacggcggcggcgcccccggggaaagactcggcggagacgggcgagctgaggcagcgctccaggaacgcccgacgcagctctgcgcctgccggcttcgctggactggggctggggctggggctgggcccgggaccttccctgccacccgcccgccactccgcgccttcccgcccgcccgtccccgggctcaccccagccgcccgacatggcgaccccgactgttcccgggccgcctccgccgtcaacccctttcctggttcctctcgggtggggggtgtcgcccgctccgcgccgggcaaggaggcgctgggagcctcctccaagaagggcggcgccccctggggccccagcagagggaagacacgctccgcaaggcgaactcggtacaagccgcctgtccgtttagttcgcttcaccaggaatccccttggcatggtggagtcgagagcgctctgggacaagaggaaagggggcgccacggggactgagagccggccagcagatgaactagaagagcttcgccgcggctgtcatgccggggctatctttatagctgagacgcgggccggggtcccgccgggcctccccgggctggcccggccaatcaggagtgggagcgggcgccgggggcggggctttctcccgtgccgattcactggagtagacgaatctggcggcggcggcggcgcacgcccagccccgcctcacagcgccgcgaacctgcccctgtggccggctgggtccgcctccccctgcagcctcccgggcgaagacgccagaaggtaaggtccagagtgtgagggagctcgacactccccgccttggctgcctccgcggagcgtcccactggggagccgggcgaaaaggccacctcacgacgccctccgctcgggccgggacccggctgcccccaacgcgagggcgtctggctgaaaagctcccgctctgcgccggacggccgagcggaaggggcggtgggcagaaggtgcggcggagaccacggggtgggtgtccgggagggaaccggtgcacgtcctctgcgggtattgagctgatgagaagtgcgaccgagcggccggacagctgactgcaccgccctgtggctgctgtcggcggcgggagcacgtccgcccgccggtatcgatcgggcccgcgcgcggcggcgacactcgagagttcatctccgcagaagggctctcagcgcgggagagcgtgcctgcccgccgccagcctccgagtcgggacgcccgagcgcggctgggtcctgggcgtctgcgctcttaagtgcttctcgataggagcaggagtagggagaggaaaggaggatctcattttccactgtcctcgcataaagtggtttctctgttcacactttccacttgtactacccagagtatgacttaattcctaaccggcctgtttagcatggagtagattgagtgagaaatgccggcggaatcagcattacagctgcttccccgtacaccacaagtgatactttgcaaaaggtgtgctgtagagcaaactcaacagattttcatctggcaccctgcaatgctcccaccactattttgagaactagaagaggtttgaaagtgtttagtagtaattgaactaggcaacaattagaccatctatgacagatataaagtgccaagatccataatataggtaaataaagtgtgagaacaggaaggggaaagactatgtgcacaagtctccttactaaaccaaattggagaaaaagactgacagaggtgttttaaaagtacacgatagcataacagatgtagtcatcaataaaacacattgtctttcttcagtgaagtatttttacagggagaacattattttgagaaagatttggaagtaattatatattaatcattgactatgttataggcattctgcttaagtaatctctaatcttcatacacacgcacacaacatgtacacacacaaaccaaaaaggagatattatttctctcttttttcaatgtggtgattgagccatttagttagataatgggtaaaagccaagcagagctcagattcaaacttgttctggctaattccaaagcccagactctttccactacaccaatggcttcaaactatttttttccttaatcacatcccacaataataaatgtgttctatagtatatacacacatgtaactgaaacaaaagtctcacaaaataatactgtgggtcctaatctatttgtaaattatgaaatcatacattgaaatgtttgcagtgcattctcatatttttcattgtattgtattttgtttcttaaaaatagcagtcatagaaaatacattgatttcataatttacaaatggattaggacccacagtttgaaaaacactcattatattgtctcattaaatagcatgaaatgatacaaaattaaataaacctgatactgcataatcacaatatctgaaccactgtttaaaatatttgagtcctttagcagtgttggtaaacttagtttcccaaattggtcatttctgacatgtcagcttatatgtgacttctaactcaaattctcaattctcctttcctcctcatgatccatacatattgtgtggtgtggaaaatctgatgtaataattttaatactttaagataaccc

SEQ ID NO: 1241395 - DNA, 4001 bp, Homo sapiens
tgaccggcacctctgactccaacagttcatccaaagcctcaagggcctcacaggcctttgcctgacagacaaacaaggcacaaggttaccatgctcttcttcagtgggccaaactggacacttctgcactctccttccaacagagctcctgcccacctgtcctcacctcatctatggggatcagagtctgcatggccatgatcagcttgggcaccaacatccgagcgagaggctgagggacacatcacagagagcatgatgcagcccaatctcacaccccagcagctggcagcttcctcacagcctgaattgcgaggaggagcccaggcataacagccaggcccacctacagcatcccctctcaattgtcaggaagggccacaggcaggtaaagaatccaaagcagctttgtaacttttacgggtgaggacatgaaggcatgaggaaagggagtcaaagataacgagggcccacatctcaccacatcttcagtgctgaggtagggagccatggtggtcagagtgcgcagggagtagaagagcagcccaggagagcccacctcaccaagagtctcattcagaagccgaagaagctcccggtggtggggttggaaggcctcgggccgggaggtcaccaccacacttagcagcaaaagccccatctgtccaagaatagaggatgggagagcaagcttacaaggtctatccagcctctcaggccctccctcctgccaaccatgtgatggtacctctctctctgggctgtgggggctgtgggtactgtgctgaagcagctgcaaaagctgtggccaggcctccaagccttcctttcgaaaaatggtggctgagagctgggccaggctgaggctcacacagtgcctgcaaacaggagagatctcctccaatcacccttcaataccttcctctgcacacagtggccaggctcaatggggcagccaggacagaaactttcaggaggtgtgggcacagggtctttgccaagttgggacacatgagacagcagctcagagggagcccaacagcactgtgggcatgtaatctggtaagttcagtctaacttagcctgaatttcagtcttattcttctgacttgggtttggcagatcatcatcacccttcctcaagaactttagtcttcaaaacagccttaaaatcctcactccaccttgcgtctagaactgaagtccctgccccacaagtcccagcctggagccgaaaaggaaggcagaaacctagacaaagtcgtcaagatcccgagagaagtgggtaggtacttactctgtttctctctgcagggccgtcaggatcagggacttgaggctggaacacaggtggcaggtgtttggtacccagcctgcccaagaaaagtctccgcctggccccgccccaccccaggcccagcccacctctcccgttgctccgccgccagccgtcgccagcgggtgttcagtcgtctgcgggtcagcacggccgcaaactggcggatctaggacgaggaagcaagcacgtgggggtccgggcaggaaggtgctgagcggaccgcagtgggcgaatactggggcttgaccggtggcgtacagtgggaagctcggaggggagagtcaggggtctcacctgggggtcggccgccgaggctagcaggtcgcagagagccggcaaagcggcgggggcccgaagaacgatctggagctgttccgtggcctggggggaagctaggggtgagagttgggcctttcccgcaacctcccgctcgccctggcccggttacgcctgctccgtacccgacggatgcgctcggtgtccggtagcagcagctcccgtaggagctgctctagcccggctgactccatggcagcaactgagccgccgctactgggccgaaaaggggagggggagggacagcacgtggaggttctgacacccacttccggaggaaagggcgttgctgcacgccccgcgggttgccaaggtgattcaattcgcttcccacaaagaggtccggctcctccacttccgttaggctgagcaccggctgaatcgcggaaacccgactctggcaatgtaggttccccacgccgggagttcccaagctgggttggagaactcgagcttcgggcattcagtggccagctcggctttataaaggaccgtgcccttaacagcagggctcgagttcctatatccagaccaaaacctccaactgcatgagcctttttcttaataaattttattttggtaattgtaaaaagaaaaatcaggaccaaaactaaaggcaacttaaaaagttcaaatatataatccttatgtgatagagatttataatttccaggccctctctggggaaggaatgcccaaagggcaaaagggaaggcaacaatgccatcacacaattcagtcaatcagaagagaagctggtaggagagttcaacagggcatgaagaaagggagagaacagcaatagttctgccatacagaactcagtccatcttgaggttaacatagatataccggatgaactttagggaagaaaaaaaggagatggtgcccagcatgaggaagaagacataaccagtgagtaaggagtagccgaagaactctactgtctgtactgccccagacatgttggagcgccgggcataatagaaaactgagtagaggaagatgaagaggccggtggagccaacactcagcacagatcgccaccaccagcggtaatcctccccagacaactggaagtaggtgagtgcaatggagatgcaagcccccacactcagcaggatggcgaagacaaagaagaggatgccgtacaaagtgtactgctcccgaccccatactgtggcaaagatgtagtacagctccacagagatggcactgtgaagaaaagagatgatacacagcattaaagggctgtgcaccatcagcacagtggctgggctgaaatccagcccccaccctctcccatgttgctgggtcattgtgaaaagtgagttcactccactctctgccccagatctcctggcttcatggggattttttgcctatgattagccgctctcacttcaagaatatcttccctaatagattgagggcagggatcttgtccattttattccactttattctttgcctggcacaaagaggtattcaacaaagtaaatgggtcatcaaatgggctttaaaccccacatgatgtccataggcattaaagtcagaaaccaggaaggtgaagggggaaatgtctccggagagctttataagtgagacactctcatatcattcaagctcagtcctgcttggggataggaggaaccatttaatgatctctgaatggtaccactgaaccagggatcaacgggttgggttagggtactggatgagtagggacaggaaaaattgaggtcaggaacctgacagtaatagccatggaataaagggaggatacctgaaaggcaggaagcctccaacagtcatgtggatgacagtagacttgtaccagggctggggtggaatctcccgggcgatgttcttggtgcgacagggtgcatcaaaggggctggcgttgttcttcccaaagatgcctccaatgacagtgaggggaaagcccaccagcagccaaaccgtcagaagcagcaggatggttgtggctggcagagcctgtgtcgaaccattggcccaatgcactgagttcaccacactccacgtcaggaagaaaggcactgcagggatgggcccccggagggagggtcaacactaggagctacatctctaagggcacccacttacatccaggaccaaaaggggagggggctgaagcagcctgccactctaacggcagactcatgctcctggatgtccctgcagagtcgactgccttcacctccaccctttcaggtcccattattctttgttctgtgttttttttttttttttttttttttttttgagacagagtctcgctctgtcgcccaggctggagtgcagt

SEQ ID NO: 1241396 - DNA, 4001 bp, Homo sapiens
cgcggttgcgcaggctctcgctcagctcggccagggcctcggcgttgcgctgcttctccttcaactcgcgctcctggtctgtgctcgacaccgagccgggcctcttaccaccagcacccacgcccacctctgccaccgacgaagaggtcgaagacgacgcggaggacgacgtggccgatacacccggggtacccccgagacaagcggggcccccaggagcccctgggggagcaggcgtcgggggcccacggctgcccagggcgtggggagggggtggggggagtaccgcagcgctggccgggccgttaagcagcgtctgcggtagcaggttggggggcacggtgagctgggggcctccgccaccccccgggttgggcagccccgtaaccagcccaccgtgcgttccacgccgagacgccaccgacgccgccgctgaagaagaattggggctctgacggttcagctctgggggtccctcctctggtgttggtttggggaagccgtttgggccccccaggccgttgggcagtcgcgcggtgtggctgctgcttcccaggctcaccggcggtggcgggtactcgaagcggctgcgctgttccaccgcagcggcggcggcggcggcggcggcggcggcagcgcttaggccgtagcgctccaggccagacggggccgccagcaccgcaggcttgctggaaccatcaacgtggttgagctgttgttgctgctgctgctgctgctgctgctgctgctgttgctgctgctgctgctgctgttgctgttgctgttgcgcggcggcggcggcggccgccgctgctgccgccgccgccgccgcttccttagccgacagggccactgtcttgaccccgacgggcggcggcggcccgggggagcggccgtcctggaagcagccgtgcgcccgcttcagctggcgcgctgtctcgatcacgaattcgatgcgatcagcgccctcgtagttgacgcaaccgcggcatacgggttccgagaagtcccagatcatggcccagggcatgcggggcaggtcgcacaggtagcaagattgtctccgggacgaggacacctgcgccgccgacatgatgcctgccctggggaaggtaggcccccgcccgggctgtctccgcggcgccttctcctccgggaggactggccggctggggagggagtccgactgcgggggagggaggagggggggcgagaaagttctgccccaggggctggagggaacgcgagtctccaccgccggcgcagcgcctcgccgtgggggctccaccgcccgggcagcggacgggttcagccctctcttcgcccccacctcctactgcggttgactcgtcgcgaggggagctcaggcgccttcttcctggtgctgcagacttgggctggaagctcccggcccgaggggagggggcgagggtgcccggtggtggccgccgttgcctcttggccccctccccggagtggctggtgcgtggaagctcgaaaggggctgtctcttcctctccccggggacccccctacgagctgcgtcctctccccgacgggccccctggggcgagggccagagggttcagtgccacccggtgcccgggtccaatcttgctgaagccgctgcttccccggaggaccgggggagggggtggcagccgagaaaggaccttctcccctccgcagcgtcggccgttctgctggcggcgactgggtttgcaccccggagggagccgccgcggccactgcttccaggacgcacgagagcagaggagaggagtgcacgcacgcaggctcccgccgcccccaggcctggccggcgcccgggccgccgcggctggcggcgctcacgttggctgcagggcgctcgcgcggcgcctcggcccgggtcgcatcccttcccgctcgtgctcacgctcgcccggaatgtggggttgtgattgttactctacgttccggaggcgcgtctcggcgctcctgctccggctgcggctcgcgctgtccccggcttggccgcgcgggatgccgcccgggcggagcgctgacgtcaccgccatgctctgcaccagttcttccccctcccctttacacttcctctgtggagcccacttgttgctcaggcaaggcgcatgcgcggcaggacgcccagattcctcccagccggcccctcctccgcgcctccgccctcccctcccccctcgccgtgtgtgtacaacagctgaggcccggcgagctaatgctggaagtccagagctgggggtggaaattaaacagacgatgacctttcctttccctgccgggcattcccaagtaaaaacgcatttaagaaccactagcgtcgtttccgatccctgctccccaccccacccccaagcctcggcagtgaatttaaatgtcctgtttcaggatttttcgccgtgaatttcgtataaggtattaaccatttcatctgcggttgaaccttatcccccccggcatggatgttaaattcatcgccaccactgatgccgaagcacctgcaaaattagctgttttccaatcttccagaaattgtcttttctatttgtttttgtgccctgatctaggaacccgggcttcaacgatagagctaaatgaattcagagtgcgctacccttccccccagccgcactttaaaaattttggctgaacgtctgaagaagatacgagcaccccgaggcctttaaggaaaacaggcaactggctgcgcacagctgcagttcagggcagggagggggaggggccggagaggccaaacaggtgagtgttttttctagagtttgatttttaaaaggtggaggcagcatttaataatactgatacatttttgtaaagcacagccgcagttttcaaagttctttctcaggcgctgtgatctcactccatgttgccccagaaggcggaacaaggccgtgatttttttttttttttttttttaagacggagtcttgctctgtcgcccaggctggagtgcaaaatggcgcgatctcggctcactgcaacctctgcctcgcaggttcaagcgattcttccgcctcagcctcccaagtagctgtgattaccggcacccgccatcaggcccagctaattttttgtatttttgtagagacatggtttcaccatgttagccagctggtcttgaactcctgacctcaggtgatcctcccgcctcggccttccaaagtgctgggattacaagcatgaaccaccacgcccggccaaggccgtgatttcttctgccttacaagatcactgctcatcagtattgcttatggcacgatggatatgttggtcatagctctagttggggcatttctattgattattctaattattgggtttgcttttttttttttttttatttcatgaaaactgagataatcccagggaaggctggagaagggaaagcaatataatgggatttcggattctgaagtgtggcccaccagattgaaatttcctctccatcactaactggctctccacccttaagctagttacccacaaaatctctcttttccatggaaaagagaatggaatgatagctcccaggttgttagggttgtttgagatttcaacttcggttttttgtttttttgagataggatcttgttctgttgcccaggctggagtgcagtggcacactcgcggctggcagcagcctgacctcccaggctcaagtaatcctcccacctcagcctccctagtagctgggactacaggcatgtgccattacacctggccaatttttttgtatttttggaaagggatggggttttgccgtgttgcccaggctggtctcaaactcctgggcccaagtgatgcacccaccttggcctcccaaagtgttgggattacaggcatgagccacctcacccggcctcaatttgtttcttgtcataagaagagataacgcttacttagacttgccgtgggaccttagtaaactaggtggctttacttgcatcacccttaatatt

SEQ ID NO: 1241397 - DNA, 4001 bp, Homo sapiens
tgcacatctatccttcctccccagtctgctgagtctagcagtggttggacaaggggaaactcaccagagacgattcctggtggcagcaactgatacaccttgtagggctcagcaacatccatgcggcccctctcaggaacctccttaaattcagaactcttgttgagtgcacagcgcaggcgagtcttccagacagctggacctcctgtgtccccctccttatactttcccttaaatattgcccaggcctaggaaagaaagcaagggaagaagaggcagtgtgttacaggctccacctgcccctccaataggactggctttacaggcgtgcagctctgagctcagaagggattatgcagggtctgtgctctgcgttgccatcttgaaatccttggaaattttttttttttttttttgagacagagtctcactctgtcaccaggctggagtgcagtggtgcgatctcgactcactacaactccacctccctggttcaagcgattctcctgcctcagtctcccgagtagctgggactacaggcatgcaccgctaggcccagctaagttttgtatttttagtagagacagggtttcaccatgttggccaggctggtcttgatctcttgacctcgtgatccacccaccttggcctcccgaagtgctgggattacaggcgtgagccaccgtgcctggccaatatccctaaaatttttgaacaaggcctccacattttcattttgtactggactctgcaaatgatgcagctagttttcctctccaatctgtcccttatctgaaacccaggcagacgcaagtgctcgaggatgagtgtaccagtgtgtatacaccatcccacacacagaggaacagtggtttccaggccctttcaccttgaagaaggcagcatcctggtcctcccggaagtcctgcttgcctgcatgtttccagggaatccggaacatggtcttagctgtatcatcccagcacactccgggaaactgcccactctccacttgctccaccacccagttccggagttttcgggtgcagcgtgccctgcctgatgccatcctgggggataataggagcaggatgcatcagaactgacactttgggagggaacatctcctgagaccctggccattgagactagattctggcaacaggtcccagagatcccatccatcttcttttagctccaaacacatttcaacactctatgggacagaattgtttcctttctgccatcactagcagtgacaaacaacaacaacaacaacaaaaccccccaaaacattgtttttagcactctaagctgtgatacctggaaggaaaccttgggcactggtcttaattttaggacttttcagagatgtattgtttacaaaagaattcctttggtgatcgttcctggtgacaggccctgtctagattcccgagcatcagcagaggtaggttctgctgagatccatcaggctcttcacccaccgccccacagcctacacaacctagcctgacccccaccccctgccggccccaggagtaggtggggcaggaagtaggggtggggttggagctgcagcagaagtgggcagggccagatggcaaggaaacaaatggtccactgaggctggggccaggagccttcttccttgaacaatccagcagtaggtcctcctgacctttgcctacaagggtctggggagctggcccttgtcagtctcactctcaggctgaatctcccacttcctgacttaagagatcttctgtctatccctcagtctaacagagcgacccctaggaccccctgccctcaatctggctggactttctagccctagatcccaggctgactcccatccttggctgatcttacctgagttgctgtccaggctgtcgcagggctcagacgacctcagcttaactcctggctgggcggctgatctctccgcccctttctacagtccccaccctaagtttcagttctcctccagggagggccttttcccagaaatcacgtggtctgagttgcagggaactggcggccactagagggcagcagcatctgagcatctcactatcaggatgccactgtcgcagcaggggggccctgccctgctggctcagctccagcctggctcattcccctgcctccctcagatactcttgcttctatctgacctctgggtgacaccgtggcttccccagggaggccagtttcctggagtcaggcctgggacctctggactgctgtgtacacctgtgcatctgcattcccccacagtgcccacctgatacatattgggtgacttcaaataccagtcaaattctatgaaaggaaaaaaggaggcagggagggaggaagcccaggccaggctgctggatggggagggcctcccttgaccatccagggtgtcaactccttcctggtcctgagtccagggagggtcaggcactaggttgcagggggcccttttcagcaaagctctgttcaccccgctctttccctggtgcccctagatggtggcaccaggaagaaggaccaccaagaagcctgggtggtaagatgcctctttattggtgctggagctgttcctgagggagcaggccatgggaccctcatcgggacccttgccctcagctacttccgcctgcgggggatactctgtcccaagggtacctcttctgtcagcttctgcagaaggagagagaaggtaatgatattggaagcctggagctcagacacagtcagcaccaggtgacttctgtagggtgggttaagagatgaggctgggtggaggctatacctgtaacaagcgggcctggtaagcagggggatcctctccagccaaaggctgggggcgtacgtgcaggtagcgctcagtggccgtctccagctcttccacctcatacaaggtggctgggtccagcgagtgggcattgatgaggctcacaagatactctttgtagtgtgccctggggagaaaagggagcagaatatttgttgtgttggctaatattaactgagtgtgtctaacatagctggactctgagacacctggacgaacaagattaacaacccacctgtgcccacactgcctgctactatctacccatgcccttgcccagaaagcctcctccctcccacccactgcaagacctactgctcccaaggacccattttactgcctgggcatgccctcaccacttctacccactgcccaacaccatgcccatgtcctgctggcactcactggcacaggccggcatagccagctggagtttccttgccacaagcttcgtccctgagcccattgggaacctccttctgctctatcactcggcagccgcctaaaggtgagggaagaagggagcctctgttgggaggccaatgaccacaaagctccagaactgggatatccacaaggcagggaaggcagcctccaaggaagggaccgagcacagcaactcctgctttcccagtggtgctggtgggtactcagaggtgccgtcaacggcagaccatctgatacagaggcagggaccttgtccctacttttatccaagctggcttttggctcataaacacataccctcttgagatagtgttttttttttttttttttttttggttgttatttatctcttgactagttaacttattatcggaagatcttacctcttttttttatttttattttttaaatagagacagggtctcactatgttgtttgggctggtctcaaactcctgggctcaagtaatcctcttgccttagcctcccaaagtgctgggattatgggtgtgagccaccaccactcctggctattggctacctctggttttttttttttttttttttgagatggagtttcactcttgttgcccaggctggactggagtgcaatggcgcaatcttggctcactgcaatctccacctcccgggttcaagtgattctcctgcctcagccacccgagtaggtgggattacaggtgcctgcc

SEQ ID NO: 1241398 - DNA, 4001 bp, Homo sapiens
atatcctaaaaagattcagtcattaaattgtcacagaatcttaaaatgtctgtatgagtagggaggctatttttgaaataattcactatcagtgagggtttggtccaagttttctgggtaacgggctcttggttttatgactcatagcagatccacgagcatgagagtaaaatgtatctgtcctatcaaacaggaagtggcaaatgggttgcatagacaataaagataagtcaagtggcacattctggcagggtgaagtgaaaaagagaacatttcatttacttttctcatcctctaataactggtgtccaagctacccaatctgtgaccctgatccacaacacaataagaaccttctttaaaatgaagcttttatacatagctatccacatatgtacaagcagctcttaaggcaagagaagttaattccaaattttagagccatggaggctctacagattatacggagtttcaaccagtgattaaatctgaggtaacagcatctggaggctcagccttagcactgagtggagggaaaaattaagccaagagtaaaatcttcacattctgaaaataatagtggcaaaacataacactcctggactgcgggaaataaaattgagagggacatgattagaagtaaacttctagaattctactaattccaggttcttcaaattggtacaactggtgacaatcccagagtcaccagtcatcacatcaaagtttgatagagaaagatgacccacaggagcagccttgctgtgcttgaggattgttcaacacttgaaatgagcttcggatcagttcttggctgaagtccacctgggcccctttcacgaaggccaagctatcagagtcaaccaccactcttgccccaccctgttcaaataccctgaaaagacaggaggaaggcattaaggagtatcgcaaacacaaaaaagacaccccctgagcccagaggtgcacatcctctgttttctaaagtacagagggagcttccccattacctttaacaggtgctgattttctttgaggcaaaatgattcaatggaataaatactgggaaacgtgtagggacttaagcctggaatctagtccggcctgactttctaccgactacccaatggacctgggcagatcaattttgctcctataacttagttactttgattcagaacaacaaacctttactgcatcctcactgtgagacgggcggtgttaaccatcccaggtaaaccctttaaatttggaataaaagtgcaccttaaactggagacacttttgtccctcctgtacctcctttgggggcccaccccttcctccttgcctgtcgtcggggttgataactgtatccagtgaaaatttgtattggaatccggagcatccacctccctccacttgcagcctgaggaattctgacccttcggtgatttccaaaagcctctgaaatgcaggaagggggatcaagaatagcgggaaacgggagttaaagggctgagtgaagagcagttcccgctgctcccgccaatcgcctgggtaccgccgctccgcgtccggcctcctacctggacgcaactgtctgtgaggcggatctgcccttcgccggcctcggggctggaggacgacgcctcccgacgcgcctggggtcccagggaggccgtgaggagcctgcgcgcaagggaggagggtgagcccgggagcagaaggggcaccttgcaaccctcgacctggagcgcctcacgctaaacctggcgacccccacctggacggcctcccaccaaaccctcgcatcccccacaggccttagtttcccatttgtcctagaggcgcagaaccaaacaccctttccaggtgcctttctagtcttggtacctgcccctcggccagggagtgaccgctctctgcgtcgcggccgttagggacgacccccaggcggcagccatcttcctccacaagctccgcccctcgcgtctcccccgtttctcacccggggcctcgggaggcggagagaacgaacaggaggccgggacttcacggaggccccgcccccccaacatgcctattgggtagtgcgggaggagaaggtgtctgattggctaggaatgctccagacggcagcggcggggacgcacccaggaagccggagaggtgctctaaagggaaggaacggggcggggaggagtgaggcggggcggggcggaggtgggtccgggcgggtcaggcctctgaggggatggcatgggcggagactgcaggcttctgggcctgagagggctggagctggctttccggagccgggggcggggcgcgggcgggcctcagctgtggttactggtgacaggtcgcctgactgggctcctccccgggcccgccccgacaggtttgtcttgtgaccgcgggcggccgctgcttctttcccgagcttggaacttcgttatccgcgatgcgtttcctggcagctacattcctgctcctggcgctcagcaccgctgcccaggccgaaccggtgcagttcaaggactgcggtgagccccaggcccgcccaaggttcccgcgccctctgtggaaggccccgccggacccccgcgctgagacccctggggctgggctgggcggatccctcgggcggccaggctgagccttggaccctacctaactggaatgggctgggtcgggggagaaggcgccggcctccatgaaacccgaccgcgcacaactttgtttctttccttagaacgcgtgttttggggttcctgggaactccaggaggtgggccttttgctgaagtttcctaaagtttgtagggcggacaacagaagggctgtatccagctctggtggaggggtggagcacagaacttctttttatttatgctttgtatcttggaatcccgcctcccccttccaactccttttgcttttcttttaatttcgtttttgctgacaagtcaaaagtcaattcccctttttcatcatttattgttacaaataggacttcctttgggctttggaatcttgtgattcttaatcagtttttccttgtataaatctcattgtgtctctaatcacagcttgtgatacataactccctctcgccgctgtggttggaatctttgttggaaaatacaacaggtggtagaaattctgagtgccttcattgagtcgagtctatagaattgtcggaacagaaactcgagcaatgttgttcagaggtggagatagagagatagaactgtcaatgaaagaggcatgaaactgactttgtaagatctatgagtggaaaggaagcacggagatcgtataatcaatcattgaattccagggatgttgggtagcctacctaaagtcacgcagcagaatggggagccagagtaagtgtaaccgcccaaggggttcaccttgcgcattgcctagacagagcggatttatcaagatgggatttgcagtggcgaaaagagtaattcacgcagagccggctgtgggggaggccggagttttattgttactcagatcagtctccccgagcattcggggatcagagtttttaaggataatttggcgggtatgggcttggaaagtggggagtgctgattggtcaggttgaagataaaatcataggagagtcgaagtgagttcttcttgctgacctctgggtggtgtcatttgctgcatcggaatgcaggatctgcaaaatatctcaagcactgaccttaggttttacaatagtgatatcattaccaggagcaatttggggaggttcagactcttacagccagaggcggcgtggcccctaaactcgtagctaatttgttagtcctacaaaggcagaccggtccccaggcaagaaggggtttttcaggaaagggctattatccatttcgtttcagagtttaaactataaattcctctccaagactagttcagcctacacccaggaatgaacaaagacagtttagaggttagaaggaagatgggtaggtgagtcctgatctctttcac

SEQ ID NO: 1241399 - DNA, 4001 bp, Homo sapiens
aaaagactccttaagggggcagaaaaaaaggtagcaaaactggtctacagacacatcctcaagtgcagccagtctccccattccttcccacggcctttggagggtttcagcagtctggacaagttctggctctcactctctcactcactcactcacaatctcccacaccctgcatgcctatatggaccctcagtgtcgtcatctcaaaaatgggaagaatggctgggtgcagtggctcacacctgtaatcccagcactttgggaggccgaggcaggtggatcatgaggtcaggagctcaagaccggcctggccaagatggtgaaaccctgtctctactaaaaatacaaaaattagccaggcgcggtggcaggcgcctgttatcccagctacttgggaggctgaggcaggagaatagcttgaactcgggtggcagaagttgcagtgagccaagatcgtgccactgcactccagcctgggcaacacaatgaggctctgtctcaaaaaaaaaaaaaaaaaaaaaggaagaagaagaatggctgggcaccatggctcatgcctgtaatactggcactatgggaggctgaggcaggaggattgcttgaggtcagaagttcaagaccagcctgggacacacagtgagacccccccatctctacaaaataaaaaataaaaaaaattagccaggtgtggtggtgcatgcctgcgctcccaggtacccaggaggctgaggctggaggatcgattgagtccgggaggttgaggctacagtgagctatcatcacaccaccgcactccagcctgggtgacagagagagatcctgtcccaaaaataaaataaaagagagggagaaagaaaaagtaggaaggaaggagggagggagggagggagggagggagggagggaaggaaggaaggaaggaaggaaggaaggaaggaaggaaggaaggaaggaaggaaggaaggaaaaacggcaagatgggaagagctattcgggcctcctacagcttagtacatggaaggacccaggacccaagacctaagaccacctgccacataggactgctcctgcataccctaatacaagtctggctgtctttgtccccatgggaatgaacgtccgctgcattccagggggcaataagctggactgtagacccctcagtgactggaagacacagggtttgacagaccatggcttctctccatggccaacaccactcttccatctcattcctgttttataccccaatgcccacccacaggccacgaggacagagccagtctcaggctggccacccctgccggcggctggagagccccactgtgcctccgcttgtctcatggaaggggctcacctgaccgtttgaacctcagcggccctggcccgccactccgcaaagcgccagattcctcgcaccggcgggactcctctccgagctagcgcgcacctggaaagggggctgcaggcgaggtccgctcagggcgaggaagcccggccaccgtggagtgtcggccacctcactccgcacagaagtcaaacttgtcacccggctggtccgcggcagcccggctcgcggtcacgcgcgaggagtggaagccccgaagtccggcgcacctgggcaacgcccggtgtccgggagcttccggccggccccggcccctctctccatcggggggtcgctgcctgtgtgtgtcccggtcccgctccccgcacggctggagccggcgggctggggaggtgggaccgacagcgcgctccgcagcccggtgccgccgccactcacctctgcgagcctcgtgaggctcccaggccgtggtccgcggagccgcggcttcttcacggggagccctagcgccgcctccagcagcgccgccagcagcagcacgcagaggaggagcccggctcggtcgcggagcgcacgcatcgtctcggttccgaggctgctctgcctgcacctctgcacgcggccgcgaacccagtcgcgccccgcctcgcctcctccgggggcgggacccggcgatcctgaggggcgcgcggggcacggggccgcgcggggcgggggcgcgcagctcgcacagcctctctggccccggctcctcgcgtgggcgcccgcacagctctagggtccgcgcacctggacgtcccccaccctcctccgaggggcccctcggcgctccccgacccgtcttgaccctgtgggcggctctctttgatctggccgcctccccgccctcagtccccgccgctgtcgccgtcgcagcccccagcgaattcctgttcgcgggaagctgcggcccggcgcgctccggccctgcgctgcgactcctgcggggccctgagggtccgacgccacctctgccctccccgaccgcgctccaactgcgacctggaccggcggtgccgcgcgggcgagggaggcgcagcccgacgggagagtggcgcgagtcttcggatgccgggcagatgtttggttatgcctcgaggaaggtttgctggggaggaagcctagaagtaactcccccagggctcttcccagtctactgccggaggtggagaccagagcagaggcacaagccagcacctgccattctgcacccagtgtcctcggaatgttctcagagcacttttaaaaaccggagagtcggccggtggctcacgcctgtaatcccagcagtttgggaggccgaggcaggaagatcacttgaggtcaggagttgagaccagcctggccaacaaggtgaaaccccgtctctactaaaaatacaaaaattagccgggcgtggcagcgcgcacccgtagtcccagcgggtgggagccccgaggtccggcgcacctggcccacacacaggtgggagaatcgcttgcacctgggaggcagaggctgcagtgagccgagattgcactattgcactccaacctaggcgacagagtgcgaccctgtctcagaaaacaaaacaggagaaagttgagactcagatgtgaggataaagtcccagaaggacagccgggagtctggtcgtcgcctagttgtatcctgggtgaaacagtgaaactgcccacttcatccagtgggacccttggtgcagggatcctcacgtaggccacgagggtcaccaagatggcctgcctctgagcaaccgacacaaaaccttagcttgtggcaaagatcaggaactcttgagaggcagtgccaatctggatggggcagcttgggaatgtgaacgcagtgacaccaggtagggggaggggttgggacaggtcggtgaggagcagtcacaaggcactggggacatgcccacccaggggtcatagcagggcgcacaaaggatgactcaagtttcagggcagggttggtggatccccaggggtggtagagaggatgaagagcaagcccagctactggtgtaaactgctgggtctgggtcaagttagagtaagactgtggggggactgtgtgcttttctggaactactcctattcccaggggcacagctgcagggttttgaatggtgcatcacagggatgacaacctgggtctggattcggccatggggactggaatctttcaccatttaccaagtaggtgatattattggacaaattatttgacgtcttcgtgctcttgtcatctgtaaaagtgtgggggcccgggagcaggagaggttacccctctcacctgggcaccaagtgtgagaagtgtgagtaaatgagaagtaaatgtgaagtaaatgtgagtaaatgagaagtaaatgtgagtaaatgagaagccaggtttccatgttgagaatttgtattagaatgaactatatgaagttgccatgttttgttcaaaaggtcgaatattggcaatttcatatggtgcaacctaatagggtgcctggtacatggtaaacactcaaatgttagcctaaagaaaccctgtttatgagcacctgctagaccatattgcatttactagactaaaggcaaggccaccttgttctttttcaggaatttttt

SEQ ID NO: 1241400 - DNA, 4001 bp, Homo sapiens
aaggcatgaggcacacagaggtgctgccaggctcacctgcgcatgccagctcagaccagccacgggcccccaggagcaccaggggttacggaaacccaactgttcaattctccaagatgtgtggggcccccacagggacaaaaatgcaagtagagcccattttcaaaaatcagtctaacaagctgcatcacaaaaggtttccacctggagtttgcaaaaggctttcagagctagattctcttaggcttgcattgagaaaagggcttaactgcttctcagaggcaaagctacagttgtggagcaagggaaggcctacctgacccaagactcagtagttctgtaatttattaagaacgtgatctgttaaacaccggagactccgccaaggagcaccagcatggtgggagcaggggcacacagcccagatggcagaaggccactccacaccacgggcatttacccagcactttctacgcaccagccactccctagctgcgggaccccaagctaggtaccccgctcctctgccgatcggtccccgttctcagacaggtggcccagaatcaccaccctggccaatttgcagggctgctgcgaggctctaatgagacagcaaatcaccacatacatgccaagaattgctactcgcttcaactgggcttaacctcatgatatgcaatgacagcctcaagagccgagcacacgcggggcacatagtaggtggtccacaaacgtgggtgccctttcttcatgaaagggaaggggacgaaggaagaaaaacactccggtccaaaagtaccctcaagcccttaccccacagcgtggatgccccgatttcccaggtccctccgcaaccctcagtagaactcccaccgcgccctgggctgctgggggcctccccagccgggtcacagtgcacctgaacgccccggtccgtgccacctcgcccgcaccggccaccgcttccctggaacgcggccggcggccgccaccgccacctggctgctcggactcagtctccccgcgcgccgcttcttcccgtttggctccgatctcccaaaacaactaatgaggctgcaccgggctcgggccgggggtcaccgggctcgggccgggggtccccgggcgccggcgccgcgtccctccttacctgcacagctcggcgaaggcctggaaattcagcttcttgattttcttctcgctcagccagtagccaactctcttccctttcagaaaggtctgcatcttcctcctcgggcggggagcctgggtccggaggaaatcgcccacaggccgagtctggcggccggcgcgcgccgcgagcgagtgggcacctcctcccggcggcggggacgcggaacggggatcggagctggggcgcgcagtcctgccgcgcggagcggagcggggcggggcgcggcgggcggccgggaggagggagcggcgctcagcgcggaaggccactggctgggccaagctgccaccgcccacgcccccgccgcctgcgggctcgcccgcccgcccaccggctcgcgagcgccgcgccgcccggcctgccggctgaggctggggcacggctgagcctgagtctgagtcggagctggggccagggcccgcaggaggggaagccgggcctccgcagacaccgcccccgccctgcccgccctcccgccgcgcgggcccgagccacacgccctcaggcggcggcagaagcgcggcctccgagcccttcctccctcctcctcccgcccgggtcctcgccctctgatgttcccagccgggccgtaacccctgggcgcgcttggaccccggcggggcgcacgcggccactcggcccggccagagatcctcacccgccgccgccgccgccacttcctcctcggcctggtcctcgcgcgctgcccgccgagaagggcggcggcgagcgcccgcgcactcgccgcccctgcccgccgccgccccgcgctggcccggccgccccgcttgagcccgcggcggcgaggaagcggcggggcggccgccagggggcagcgccgcccgccgcctcttaaaggcgccgcgccggccctcgcggctacccggcgcctgtttgtgtccccgggtgtggggtgcggggcgcggggcttcctgggggcggccgtggcccggcggtcttacttcgggaagggagccgcggtgtgggcgtgtgttccgcctggcctttgggggcgaccgagccgctgagtttcggaaacgtctctgtacccccagcagggttcagcacccccaaggcaatccattgcaactgcgcccggaaggagaccttccaggaattcgccccttccctcgaggaagcggaccctggcccaggatggggccccccgggggggtgggtgaacacccaggggccctcctaggcgtaggacgtgaccaccagttctcactctaggtccccttcactgaggggggaaggggcggggactggaggcgacagcgacaacagcggccgtccccggagaccccttcctcaggggtgcgggtcagcgtcggcgccggggagtcactaaaccccgcctaccctgccctgccctatggggcagccagggagctttcctgcctcaatggtctctgggtttgggaaggagaaatggacttctctccccaggcccaggcaggaaaaatggattcccgtggagggaaggctcagaaaagtttgagaggagacactgaagctggccttggaaatcaaggagattttgatggagcagggaagggggatgagcttgaattgaggctgggagacaagaaaaagccaagttgccagcgggtgaccaagacttcccttgatcacacttgagtcaggctcctccgagacctctttctgaccaggccccgaccttgggctctgtccttggccttcttagtccagttttagccagaatcctgctgtcaagaatatctccacgcttggtatgtgatcaccctggccggcctacattaagaaactccgtctcaaaaaaaaaagaaagacaaggatctctctatgctgcccaggctggagtgcaatggtgcagtcatagctcactgcagcctcgaacacccctgctaaactgatcctcccacctcagcctcccgagcagctgggactacactgtgttgcccaggcaggtctcgaactcctggcctcaagctgtcctcccacctgggcctcccaaagtgctgggattgtagacctgagccaccccgcctggcttccctgccatctttaacgagaatctgattagtttttttctttaacaaggtagagaaaacggatggatggagagtggaaaagacgatgggtgggaaacaggactcctccagggggccagctagggacgggcactgcatgccttaggcaagggtactgcgagtttcataggccatgggagcctagaaggtaagtggtgacaggttccagggtcagctctgtggcttagaatgcctggctcctgggggggacatggaaagctggataaagggaagatcatagcaaggacccctagggccgaggcacaagatggataaaagaaggctaagggaggctgcgcatggtggctcatgcctgtaatcccagcactttgggaggccgaggtgggcacatcatgaggtcaggagattgagatcatcctggctaacacggtgaaaccctgtctctactaaaaatacaaaaaattagccgggcgtggtggcgggcgcctgtagtcccagctacttgggaggctaaggcaggagaatggcgtgaacctgggaggcagagctggcagtgagctgagatcgtgccactgcactctagcctgggcaacagagtgagactccgtctcaaaaaaaaaaaaaaaaaaagaaggcggctaagggagtaaaaacgaaggggatgggggcagcaactataaacttgatacttgaagtcagcagtagggattacaggcatcgactttaaatgtcctgctgttcttaggaactgaaagaccagttgaggctgg

SEQ ID NO: 1241401 - DNA, 4001 bp, Homo sapiens
caggtctgcatggtgctctcattcccgcactcacccagttccaggcccccagcacaatgaccaagcagggaaggacctctgggcaccagggcaaggccgtgctccaggcaatgaggtaaggcgcccgaggcctgggcctgcccacctaccactacccacctgccagcccactgggatgagtacctgtttcccagtgacactggacccctaccacccctcctcccagcacgcccaggccagggctcctgcctgactggccacctgccaggggagaccagacagccccgactcagcttctgcccctccagaataacaaaaccaaaaaaacccacaaacagggcagtgccacagaaggtcactgcaccaggatccactatctctgtctctgaacgatcttgggtcaccatcgggggcttctgccgacataagcgttaggcgttaggctctcccgggcctaggtcccacggcgcccgcccgtgccccccaggcatccaggaaactgcagggcaggcgcaggctggccacgggcccggggcggctcagtcagggcctgccctagaccagccccagcacgcgctgcgcacatgccaccgcggcctgcccgggaccggggcgcctcgcctcgcctccccacccagacagacacgcgcagggcgacgcaggcacacgccgcacaccgccgcgcacgcgggacgccgccgccccgcccccgccgcgaccccgctcccggtggccccggggccccggcgcgcccacgtggccaggcgcggaccaagtccccagagcacgcgccccctgccggccccgccccgcctgggcgcgcgcggctcgcacgcagacccggccgcaggtgttgggggtcgcgaagcgcgcggggccggggcgcggagagagagggaagggctggagcacgagggatggagcgcacgtaccggccaggcgaactggaaggggatgacgacgaggcccgggtcctggtcgccgccggcccgggcccgcgcccgcgctcggtcccccgcagcgcccgccggcggcaggtagaaggagttgccgcccagcacgggcgtggcgccgtggccgtagctgcagggccccgtgggcgtcaccttggcctggtactccttaaggcacacgcgcacgtacgtgtcgcactcgtcgtggccgcagccccccgcgcgcgttgtccggccgtcgccgtcacagcaggcgccgctcagcagctccccgttcacgttccgcagcgcgctcagctgcagctcgaaatagcccatgggccgcgccgcctaaaaataaggcagcgggagagcggagggaggcgcgggccggggtcggcgggccgggcgccaggggtgggggaacaggccccgccgccccgcccccacccagccgcgcccgcccggagccccagccgccgcgcgcagcctcgagggcttccgaaccacggcggccccaggcagtgcccgcccggcccctaggggcggcccggtgtgccccgtccgcgacccccgccgcccccgccgccccgctcacctgcacccagagcgccagcagcagcagcagccgccggggaaggcgcccccggccctgcgcccgcattgcccccgcgacccgcccgcccggccccgccgccgccgcccgcgcccggctcccagccgccgcgccggcctcccagcgcccgcccgccctccgagcgcccgcagaggcagcggcagcggcagaggcggcggcggcggcggcgcgggcggggtcgagcgcagcgccgcggcgcgcgggcctgggcggcgggcgtgcaggggcggcggcagctccggctcgctggcggccgcgctccggctgcccggcccggctcccacccggcggcgacggcggcggcggtgaaggcagcgggtcccggcctcggctctgcgcgcccgcgctcccggcaccgcagccaacaagttcggaacgagactgacagctcgctcgcccattcgtcacccgcgcacctgcatatgcatgagggggcggggccgcgccgcggggtggggccgggggggggtccgggggcgccccaggctttaaaggcggtggagggcgtcgcctgccagcgccccggcccggcgcgcgccccccagggcgcccgggcggcgggggcacggggcctcggggtcagcgcgggccgcgggggccccgctcacacctccgcgtgagtcggcgaggcgtgcgccggcgccgcaaagctgcctcccctcctccgcctgggctcctgccgggtgtcagaaaccgggggtggggcgccccgaggttgccgtgtggtcccctcccatcagtgcgccaccgccgcgctcctcgcagtcccagaggagatgccgcctcctactctgatcagggctcggcccccacgcggggtggcgcggccctggggccagagccgggcccagcccctactgcgcgccccccacctcctccgagaatctccccttctccgcgccgctcctaccgcctccacgccggctgcagggggcgctgcgcccctccgacgcccctgccttcccctctgcgaggcgcgctggtcaagcagccagtcaacaaatgctccagggtgcagactgctcagctcggcgctggcgtcgaggtagccaggccatgccctcaggaaatgctcaggccacattccccgtttcccgcctctcgccccccaaactcaggtctgggcttggggggcgagaggcgggaaatggggaacaaaagtcggcagtgcctgtccctgaaggctaccccgagagaggcctcccactgctgccctggtcaccaggcttccacaccccatcctctgcggtcacctccttgccctctccctgggtgacctcgcagctcctccacagggtcaaaaccaatggcaccttcctctcctccagtgagcacggtcctttccagagctaggggtcaccttggtggttaaagatccccatatggtccagaggggtcctcaacccatccccatgataactgagctgtcttctctccccctagctcctctcgcaaatttgccctgtgcccggagctgggtggctgtgcagccccccagcctggagcaagtcactgccaccatgctgctggggctgagggctgaaggaagagagctttggaggcacagggcctgtgaacaccccatgcgcagggtctgcctgctccatccctgtttagcagctcctccaggatccaggccgcaggctcagctgaaggtccctaaaggggtgggtgggagccccccatgcccacctcagctggctctgctcagagtgcccaccccaaacttggtggtgggtaggcttcgtggggattaagacacaagccaggatgaggcccgcacagagacccccaccaaacaagagaatccaagctgtgttcagagccttccagttgccgccttccggtgtgtgggcggtgattaccgcctacggggggaggggctccctgtggagatgccacctctcctgtgctttggcctgggggcaggtactcgggtactcgagagagggaagccccaggacagagaagccccctgcccggctccagaggcccagggctccatccccacctgcgcccactgccccactatggtgggggagggggtgctgggtgcctctgctgggcacttggccaagtggtgaacaagggagactccgcccctgcacaccctcaggagcccccagcccgggggtggacagaggacttagacaagtcatacagaagctggcatagggggccgccagagcgtggacgggcatgggtcagccagacctcacgatgtccatgagagcacccaggtcaggaaggtggccgcacctgcccttaggaaggagggggacataggaggcatcggagagggggtcccttccctgcaggaatttcagcagcccttgagccagaaatgccaggcagctggaccctggtttgagtttccagaaggcagcagtgggaaccctcgcccctcatacatatttcacaaaacacatttg

SEQ ID NO: 1241402 - DNA, 4001 bp, Homo sapiens
gaagggaacagaagagtctttgagaaatccatcctccctgctctaaacaaggcaaaaccttaaccacccagaggtgtgagaatagattttgcttctcttcctcgatcctcaggtttatacaaaatcagagccatgctcacacctgatacctggttaaactctcccctagaaacctgcaaaggaagataagctatccatccaagctgcagccagatttgctggaaaggtaaaagcaatgggaagtgttttttaaaaccctcagggaaggaaggttggggggaagggagatgatacgcgaatgcagtttctaccaagggcttaaaggacgtttgggtacaaatgtacccaaacatggttcaaagcttcccaattcctgatgctcctccaattaagaccctagggagagaccaccaagatttaagcctgggtacacacgcctaagcaggctgcaagccctttctgagatatagacctgagcacatttgccctgagcacacgtggtcgggccatagccccatgccctggattccaacagggagggcagcaccctgggcaagggccacgccatcttgcaactggagatgacccaagggggtcggctgatttctccttccaccagcctctccatccctgcaaaagagccaggacctccccatcttccccagcctcctcatcttccctgctcctcctactgacccaggcaaagcctggctctgccatcccagggtccagggatccaggtggaaggcccaatccacccctacactctcccaccccccactgcacccctacccctcgacaacctcctttgaagggaggagcagaggagagccttctaagctgggctgggcaagggagaggctggttacctacaggagcctgcttgcctccttatataacctggcgtgggagacaggagagcccaaaggggaccccggccacccctagatcccctcccagcccagagctccgaagcaatggccatgagagaagctgccttcattggatggaaatcccgagcccttctcaatactctcctccgggtccgggtcctccgggagtcgcgcttcctcactgccaggaggtccttgtcatccctccacaatctaaccccgaccccaaccccgcacctccctggcccttcaccctccacctccacccgcacagcccatctccgcgggcacttttctccccactcaccccgccttccccgccgcccgaggagagcacctccctgcaaacggacgggggaggagagcgcgggagggagaaggagggagcaccccggctgtccagggagcggacggagcctcccgtcccggggcgggaaccaaaaggaagcctcaggctgccgggcgcctcgcgggaggggcccggctgcagcgcccggcgcggggaaagctcgaggtccctgggctgcgggagcctccccgcggggctgggctggggctcctcgcgctccgcccgtgcgggggcggccgtcccaggtgcccgcgccgcgccctgccccgccccgcccgtcccggcgcccccagcgcgcgccctcgcacccaccgtgcagaaggtgcggggggaggcggcgcccccggggccggggcccggctgcaggcgccgtgcccgctccgcgccgctgccgcccggccgcggagctccgcccggtgcccaggcctgtcccggcccgggagccgccgcggcgccagccccgccgccgctgcagcgtccgccgccgccagcgccccccgtcgcggccgccgagcgtccctcccgcaggctgtggcgggcggcgggacgggttgcatcagccccggctatatagcggcccctgggcggcggggaggggtcgggaatgcggaaccggccgagctgccagctccagacgtcagagggggacggagaggaagggaaggaggggaccggggaggagggggtgtggagccggcgcttcacacccactgaccttaacctcccccgccgccttgggcgccctcctcccgcggccgctcgcgctcctctccccgcgggggcgtcccgggttccatgcagtcccccggctccgccaccccacggtgcaggagcgctcgagaaagcaggacgcggcgagcggttatgtaagcgcaccccccgcgcaccgccgcccggcttgtgcccgccaggcagcagcagccgcagccctaggagagagacgcgagaggccggagccgggggaaaagtcaaaagccccttcacgcacagcctgtgttaaccatgtacctcagtcccggcgcttcccccacaaactgagagcgacagggagaatttccgcacagtttcatccttggacacttcaggactgagcgggtgaggaggcgatctcgccagcctgctttatttttcggtggagaaggatgggctgagatgaaggcatttggggactcctacccctacccaccggcccccgccagcgcccttaggccccgagacggctggctgcaccagcctgacctctgctagggctgcagcctgagaccgcggcttgctctactgctggcgcagtttgacccttgggcttgtaccctgctccagcgggcttctcctttccactccggacacagcagtgagcagacccagccctcagcagaccccaagtggccttcttccccgttccagcttcaatagccaaccccactcccaccttccatccttctagagaggaaatggtgaaggggactccagagggaaggcgacatccatggtgccctccagtatacaaaggcagagacacagagccctcaggtagaacggggttccctagatggcatctcctacctccagagctcctgggtacccatcgagccccctaccttctgcctaagccagataggagtgacgatttttatactcagcgactttcggcctccttctgagagtgatgtcaggtcatcacccatagaagaaaggaagtgaaagaaaaagttcatgccttcttggagtgcagatgctcagagtgaaagaaacaacaagacttgagacagatgggtgccattgagcaaacccgaacatgcatgtctctctcatgtgagtgagtgcatgagactttattctccttatttccccagtgcagtgaaatctttctggataaaagaagtgggctaatggaaggagagacagaccaagtcccaatgacattgcctgaccattttcaccttcgccatcagcagtctccctcacagcattggtgtgggcaggtaagaagaaagcaaggccctgaaagaatatacattggaaaatgagcagtaatttgatactcttgtggaagagcatgactcttcgccccagaaaggccaatgacacctttactacagcgtaaagatcaaagccagggactgtgaaactgcctcatgatgtttctcccatgagacctgtgtctggatgtttatatggaacaaaacatggaacagaggcaatagtacttgatgtgtcttcagctggggctttggataaactaaactgatctatattcagggactaataattagggtgtgtggttagagcgcgtcctctctagggcctgttttggactgtggctgggccaccagcagtcctactgggcctttgcttcccccacaaattaaatatgttacaggggtggcaccaaggggtgacttgggaggcctttagtcccctctacctctctataatctccattagatcttctctgttatttgctattgatgcttttcagtttcatataggacgctataagaacacagcttcaaggcctcccttccgccacatactccctactaggcccctctacgtagtcactgcctctgggagtggctagagggagaagccataaactgggtcctttatgcagacattggatgctggatggagctgatttaccactggctcttagggacagacaagtgactcagcctaaggcagtttgaatttaagtttcctatcacaactagaaaagtcctgattaacacgcccagccctagtcaatgggctgattg

SEQ ID NO: 1241403 - DNA, 4001 bp, Homo sapiens
ccacgacaaacaaggcccagagagcctattcctgccagggattctgcaggttggaaaaaaatgcccacacatcctacaaacaggtagggagatgacaacaaacccagggagtcaggaggagcattccctggtagctgcaaaagttaggcagtggatgagtggggagacccttatccaaacccttcctagggggcattgtcaccactttgcaacacatctccttggaggtggctgcagccaacctaggagaaaagccagaggtctacacacccatgacttcctgcagcccacctaggagaaaagccagaggtctacacacccatgacttcctgcagcccttcaaatcacacagcacccagctcttcaggaagattctggagctgcctgcagctctgaaccaaagccaaagtagaagggaacagaagagtctttgagaaatccatcctccctgctctaaacaaggcaaaaccttaaccacccagaggtgtgagaatagattttgcttctcttcctcgatcctcaggtttatacaaaatcagagccatgctcacacctgatacctggttaaactctcccctagaaacctgcaaaggaagataagctatccatccaagctgcagccagatttgctggaaaggtaaaagcaatgggaagtgttttttaaaaccctcagggaaggaaggttggggggaagggagatgatacgcgaatgcagtttctaccaagggcttaaaggacgtttgggtacaaatgtacccaaacatggttcaaagcttcccaattcctgatgctcctccaattaagaccctagggagagaccaccaagatttaagcctgggtacacacgcctaagcaggctgcaagccctttctgagatatagacctgagcacatttgccctgagcacacgtggtcgggccatagccccatgccctggattccaacagggagggcagcaccctgggcaagggccacgccatcttgcaactggagatgacccaagggggtcggctgatttctccttccaccagcctctccatccctgcaaaagagccaggacctccccatcttccccagcctcctcatcttccctgctcctcctactgacccaggcaaagcctggctctgccatcccagggtccagggatccaggtggaaggcccaatccacccctacactctcccaccccccactgcacccctacccctcgacaacctcctttgaagggaggagcagaggagagccttctaagctgggctgggcaagggagaggctggttacctacaggagcctgcttgcctccttatataacctggcgtgggagacaggagagcccaaaggggaccccggccacccctagatcccctcccagcccagagctccgaagcaatggccatgagagaagctgccttcattggatggaaatcccgagcccttctcaatactctcctccgggtccgggtcctccgggagtcgcgcttcctcactgccaggaggtccttgtcatccctccacaatctaaccccgaccccaaccccgcacctccctggcccttcaccctccacctccacccgcacagcccatctccgcgggcacttttctccccactcaccccgccttccccgccgcccgaggagagcacctccctgcaaacggacgggggaggagagcgcgggagggagaaggagggagcaccccggctgtccagggagcggacggagcctcccgtcccggggcgggaaccaaaaggaagcctcaggctgccgggcgcctcgcgggaggggcccggctgcagcgcccggcgcggggaaagctcgaggtccctgggctgcgggagcctccccgcggggctgggctggggctcctcgcgctccgcccgtgcgggggcggccgtcccaggtgcccgcgccgcgccctgccccgccccgcccgtcccggcgcccccagcgcgcgccctcgcacccaccgtgcagaaggtgcggggggaggcggcgcccccggggccggggcccggctgcaggcgccgtgcccgctccgcgccgctgccgcccggccgcggagctccgcccggtgcccaggcctgtcccggcccgggagccgccgcggcgccagccccgccgccgctgcagcgtccgccgccgccagcgccccccgtcgcggccgccgagcgtccctcccgcaggctgtggcgggcggcgggacgggttgcatcagccccggctatatagcggcccctgggcggcggggaggggtcgggaatgcggaaccggccgagctgccagctccagacgtcagagggggacggagaggaagggaaggaggggaccggggaggagggggtgtggagccggcgcttcacacccactgaccttaacctcccccgccgccttgggcgccctcctcccgcggccgctcgcgctcctctccccgcgggggcgtcccgggttccatgcagtcccccggctccgccaccccacggtgcaggagcgctcgagaaagcaggacgcggcgagcggttatgtaagcgcaccccccgcgcaccgccgcccggcttgtgcccgccaggcagcagcagccgcagccctaggagagagacgcgagaggccggagccgggggaaaagtcaaaagccccttcacgcacagcctgtgttaaccatgtacctcagtcccggcgcttcccccacaaactgagagcgacagggagaatttccgcacagtttcatccttggacacttcaggactgagcgggtgaggaggcgatctcgccagcctgctttatttttcggtggagaaggatgggctgagatgaaggcatttggggactcctacccctacccaccggcccccgccagcgcccttaggccccgagacggctggctgcaccagcctgacctctgctagggctgcagcctgagaccgcggcttgctctactgctggcgcagtttgacccttgggcttgtaccctgctccagcgggcttctcctttccactccggacacagcagtgagcagacccagccctcagcagaccccaagtggccttcttccccgttccagcttcaatagccaaccccactcccaccttccatccttctagagaggaaatggtgaaggggactccagagggaaggcgacatccatggtgccctccagtatacaaaggcagagacacagagccctcaggtagaacggggttccctagatggcatctcctacctccagagctcctgggtacccatcgagccccctaccttctgcctaagccagataggagtgacgatttttatactcagcgactttcggcctccttctgagagtgatgtcaggtcatcacccatagaagaaaggaagtgaaagaaaaagttcatgccttcttggagtgcagatgctcagagtgaaagaaacaacaagacttgagacagatgggtgccattgagcaaacccgaacatgcatgtctctctcatgtgagtgagtgcatgagactttattctccttatttccccagtgcagtgaaatctttctggataaaagaagtgggctaatggaaggagagacagaccaagtcccaatgacattgcctgaccattttcaccttcgccatcagcagtctccctcacagcattggtgtgggcaggtaagaagaaagcaaggccctgaaagaatatacattggaaaatgagcagtaatttgatactcttgtggaagagcatgactcttcgccccagaaaggccaatgacacctttactacagcgtaaagatcaaagccagggactgtgaaactgcctcatgatgtttctcccatgagacctgtgtctggatgtttatatggaacaaaacatggaacagaggcaatagtacttgatgtgtcttcagctggggctttggataaactaaactgatctatattcagggactaataattagggtgtgtggttagagcgcgtcctctctagggcctgttttggactgtggctgggccaccagcagtcctactgggcc

SEQ ID NO: 1241404 - DNA, 4001 bp, Homo sapiens
ggtggcagcaccaaggaaccagtaacagccagaaggaacttacccacttcaaggaagacttaggaaagatgacaagaggtgaaatcatctcccacactggttgttccatacggaaacaatttagtaggaaaagaagaactacgcactaaaagcttcagaagaacccagagttttttcccttcagggcccaggaggtctgaaaggcagataaacatcctcagtgtctccatgagtaactagggggcataaataaggattaagttctatccattggcagaacaccaacattgggaaaaggggcttatgcctcaaaatataggcctggaatccaagaagactggcaatgcgggacactgaccaggaataagttggaagccagccaatgaaggaaagctgggtgaagcacacatccaagatggcgactgactagcaaggcatgaatcagacagacgaggttcagaaggtcaccgtggaccctaagctgttgttgatcctaagattatgatgcagctccctgaaagccaacttgaagaaaatggggaccagatggatccaagaggaaagaacttgaaaaaaaaaaaaaaaaaggtctgagagctgtactccctactcttcctcagtgacctgtgggcacacagttaggacactgcattgtacaagcagaagaaaagccacaaaacatgtcaagtctagaaaatagaccctcctgggagatactaacatgaagtgtcatttcagagaaaagaaaagctaaaggtaacttattaagctttttcctctggttttcctctctcattttttgtgtgtaaatctgtaaaatattaggttggtgcaaaagtaatcacggtttttgccattgagcataatggcaaaacccgcgattacttttgcaccaacctaaccccttacatttttttttttttttttttttttttttttgagacggagtttcactcttgttgcccaggctggagtgcggtggtgcaatctcagctcaccgcaacctccgcctcccgggttcaagtgattctcctgcctcagcttcttgagtagctgggattacaggcatgcgccaccatgcctggctaattttttagtagagacggggtttctccatgttggtcaggctggtctcgaactcccaacctcaggtgatccacccgcctcagcctcccaaagtgctgggattacgggcgtgagccaccgtgcccggtccttaaatctttttttaatggaagtgtctataaatgataacagtcttgttttatgggtcaaaggtacaagggccgttcttgctagaaagtgcccaacgatcagcattttcatccagaatggcaaaggtaaataaaaagaaacaggttaagagaaacttagcatctgcatcatgaactttctgtccatagaaacaaaggtttcaaggaggctataaaactcctgggcctctttgagaaggtaagctcccctccgggccagcagctggcttgggctgccacgaggaataggaatgggtgtgcacgtgggtgcggtctaaggttcaaggtttggtgctgggagaatgcggaggtgagagtgacaagccaaggagggagggagtttacaggggcaagccccatgagaaataaggggttggaagtcgacggcagggcatgggcaatggcgactgagactcaacaagagaagtgggggaccttgggagccagagcctgggaagattcccaggacagaaccggatgcggagggcaggagtccacagagaaggtcagaaaggtgccaggccaggggtcatggcgcatagtacctgctaccatgaatcttggagaatcaaccaccaagcctcttcttggagctaaggaatcacccaggatgacctctctcttggaatctgaatgacgtaggtcacgcggcttccaaaagtcgaggagatccagaaggcgagaagcaagatgatggggaaggccccaagactgagagtgaaggcgagcagcaaaaggccctcttcagatggctgtccccagctctgcaggccaagaggaagggggggttaagagtggcggttttggagccagatcacctgagtgtgaatcctagctctgtcccttcttactagctgtgtgcccttgggcaagttccctaacctctctgtgcctctctttcctcagctgtaaagaataacaatgttatttgccctgtatggctgtcaagaggattaaattagttaatacttggaaagtacctggaacagtgcctgcacatagtaagagtgaagtcagtgtggccaccagggccttccttcctggaggggcactagtgccagatgacccctcaaggtcccttctggactagtctctgtttcctgcagccatgaagaggattctccccagaggattctccgctctcccactttccagctctaaaccccaagggggcaggaccatcttgcatcctggcagttgactgcagaacagaaacaaagggtgccaggtcagggctgggtagaaggtgcagaaatggggcccagcacctgccctcggcctcggtttcctctaaggtctcctccaccctgcaggccagaacacagctgcacagacactggcaacaaggtgccatcaagaactaggtttccatttctgccccaaggcagacagccagcatctcctgtgccctctactccatccctgcactgcttcataagaagacaaggagcggtagctgggttcaagagaagccactgaacactggcagccgtgatccctgcacagccatcccagccatagaagaacctggaaccaacccccagggaactcctgctcttccctggagaccagagaaatgcttccaaggccttgcctataacatcgctttgtcctctgcctaatgtaggcgctcaataaatacatatgaagttatctctgccaggaatctttaacccaggcagcaagaggaagctgggagcgtacaaccattggacaagctttctattttcccttctacttcacgccagctctggtccttggtggctggcaggggttaacactaccacacctaatacagacacacacacaaggtgtgataatcgccctggtcttttttttaaaaaatgccactggccagctgaagctttgcaaatggagctctgcaactaaatcccgtgggctgcagcaagaaaacagactaaaaaacaacaacaactaagaatggtgggctctggccaggcctcccacagccagcaataagtaaagaaacacagtctgaaaattccaagactgggtcgctaaggcatttgtctctgctgagttccgagaggccaaaccacacacacacacaagaacgcatgtgcacacacatgcacacgcacacacacatacacaggcacatggagcttggcagcccctaagttccagagctggtaatacaagccacggaaccgactgccaagacaagcaacagaatgagccaggcccggtttcattggccaccatacgctgcatatggcccgggacgcagccaaaacagtgttctcaccctcctcaaaggcataggagaccctctgttttcaaacacacctccacagagccttaattaaaggaaaatggaaaaataatgtgcctgctgccctcccctgcctatataggtatgcacacacacatacccatatacactcactccatttttctcttcctcccatttcggtttcaaacataattcattcgcatggaaaaaaagcaaactgcatcctgcagcagaaaggcagaaaagaatgtagcttgccctcaaccctggctctgattgctcaagttgagctggagctgaatgaatacagagcaggccggcctagagtcggcgttggcccctttctttccagagtggagctggaaacagacactcgagagagacagcccattgcaacaccagtagccccacgacaaacaaggcccagagagcctattcctgccagggattctgcaggttggaaaaaaatgcccacacatcctacaaacagg

SEQ ID NO: 1241405 - DNA, 4001 bp, Homo sapiens
tggctctgattgctcaagttgagctggagctgaatgaatacagagcaggccggcctagagtcggcgttggcccctttctttccagagtggagctggaaacagacactcgagagagacagcccattgcaacaccagtagccccacgacaaacaaggcccagagagcctattcctgccagggattctgcaggttggaaaaaaatgcccacacatcctacaaacaggtagggagatgacaacaaacccagggagtcaggaggagcattccctggtagctgcaaaagttaggcagtggatgagtggggagacccttatccaaacccttcctagggggcattgtcaccactttgcaacacatctccttggaggtggctgcagccaacctaggagaaaagccagaggtctacacacccatgacttcctgcagcccacctaggagaaaagccagaggtctacacacccatgacttcctgcagcccttcaaatcacacagcacccagctcttcaggaagattctggagctgcctgcagctctgaaccaaagccaaagtagaagggaacagaagagtctttgagaaatccatcctccctgctctaaacaaggcaaaaccttaaccacccagaggtgtgagaatagattttgcttctcttcctcgatcctcaggtttatacaaaatcagagccatgctcacacctgatacctggttaaactctcccctagaaacctgcaaaggaagataagctatccatccaagctgcagccagatttgctggaaaggtaaaagcaatgggaagtgttttttaaaaccctcagggaaggaaggttggggggaagggagatgatacgcgaatgcagtttctaccaagggcttaaaggacgtttgggtacaaatgtacccaaacatggttcaaagcttcccaattcctgatgctcctccaattaagaccctagggagagaccaccaagatttaagcctgggtacacacgcctaagcaggctgcaagccctttctgagatatagacctgagcacatttgccctgagcacacgtggtcgggccatagccccatgccctggattccaacagggagggcagcaccctgggcaagggccacgccatcttgcaactggagatgacccaagggggtcggctgatttctccttccaccagcctctccatccctgcaaaagagccaggacctccccatcttccccagcctcctcatcttccctgctcctcctactgacccaggcaaagcctggctctgccatcccagggtccagggatccaggtggaaggcccaatccacccctacactctcccaccccccactgcacccctacccctcgacaacctcctttgaagggaggagcagaggagagccttctaagctgggctgggcaagggagaggctggttacctacaggagcctgcttgcctccttatataacctggcgtgggagacaggagagcccaaaggggaccccggccacccctagatcccctcccagcccagagctccgaagcaatggccatgagagaagctgccttcattggatggaaatcccgagcccttctcaatactctcctccgggtccgggtcctccgggagtcgcgcttcctcactgccaggaggtccttgtcatccctccacaatctaaccccgaccccaaccccgcacctccctggcccttcaccctccacctccacccgcacagcccatctccgcgggcacttttctccccactcaccccgccttccccgccgcccgaggagagcacctccctgcaaacggacgggggaggagagcgcgggagggagaaggagggagcaccccggctgtccagggagcggacggagcctcccgtcccggggcgggaaccaaaaggaagcctcaggctgccgggcgcctcgcgggaggggcccggctgcagcgcccggcgcggggaaagctcgaggtccctgggctgcgggagcctccccgcggggctgggctggggctcctcgcgctccgcccgtgcgggggcggccgtcccaggtgcccgcgccgcgccctgccccgccccgcccgtcccggcgcccccagcgcgcgccctcgcacccaccgtgcagaaggtgcggggggaggcggcgcccccggggccggggcccggctgcaggcgccgtgcccgctccgcgccgctgccgcccggccgcggagctccgcccggtgcccaggcctgtcccggcccgggagccgccgcggcgccagccccgccgccgctgcagcgtccgccgccgccagcgccccccgtcgcggccgccgagcgtccctcccgcaggctgtggcgggcggcgggacgggttgcatcagccccggctatatagcggcccctgggcggcggggaggggtcgggaatgcggaaccggccgagctgccagctccagacgtcagagggggacggagaggaagggaaggaggggaccggggaggagggggtgtggagccggcgcttcacacccactgaccttaacctcccccgccgccttgggcgccctcctcccgcggccgctcgcgctcctctccccgcgggggcgtcccgggttccatgcagtcccccggctccgccaccccacggtgcaggagcgctcgagaaagcaggacgcggcgagcggttatgtaagcgcaccccccgcgcaccgccgcccggcttgtgcccgccaggcagcagcagccgcagccctaggagagagacgcgagaggccggagccgggggaaaagtcaaaagccccttcacgcacagcctgtgttaaccatgtacctcagtcccggcgcttcccccacaaactgagagcgacagggagaatttccgcacagtttcatccttggacacttcaggactgagcgggtgaggaggcgatctcgccagcctgctttatttttcggtggagaaggatgggctgagatgaaggcatttggggactcctacccctacccaccggcccccgccagcgcccttaggccccgagacggctggctgcaccagcctgacctctgctagggctgcagcctgagaccgcggcttgctctactgctggcgcagtttgacccttgggcttgtaccctgctccagcgggcttctcctttccactccggacacagcagtgagcagacccagccctcagcagaccccaagtggccttcttccccgttccagcttcaatagccaaccccactcccaccttccatccttctagagaggaaatggtgaaggggactccagagggaaggcgacatccatggtgccctccagtatacaaaggcagagacacagagccctcaggtagaacggggttccctagatggcatctcctacctccagagctcctgggtacccatcgagccccctaccttctgcctaagccagataggagtgacgatttttatactcagcgactttcggcctccttctgagagtgatgtcaggtcatcacccatagaagaaaggaagtgaaagaaaaagttcatgccttcttggagtgcagatgctcagagtgaaagaaacaacaagacttgagacagatgggtgccattgagcaaacccgaacatgcatgtctctctcatgtgagtgagtgcatgagactttattctccttatttccccagtgcagtgaaatctttctggataaaagaagtgggctaatggaaggagagacagaccaagtcccaatgacattgcctgaccattttcaccttcgccatcagcagtctccctcacagcattggtgtgggcaggtaagaagaaagcaaggccctgaaagaatatacattggaaaatgagcagtaatttgatactcttgtggaagagcatgactcttcgccccagaaaggccaatgacacctttactacagcgtaaagatcaaagccagggactgtgaaactgcctcatgatgtttctcccatgagacctgtgtctggatgtttatatggaacaaaacatggaacagaggcaatagtact

SEQ ID NO: 1241406 - DNA, 4001 bp, Homo sapiens
taacccggtatgattagaggatacttctgagtttaactgattataaagttcaaatatacatatatttttaaattagagcaccagtagagggtcaccaccttgtattttgcccagtcaggacattaagcacccacatgtagacacacaattatcattatcacctatgttcataacagaacacattttcacatgggaaaagcagagagaacataatttcataacagaggtatgcaaattacctttataaaaagtttcctacattgtcctagcttttatcatttttgtggaggataagtgaaaatttcatcaaggctgtcactgggccaatattttagaaaccactgcattaaaattaagcccctgatctaaaggcttaggggaaaagcagctattccttacttaaaaaaaccccaacaactaagaacctaatacgttgtctttgaccttattcacaagaaattatggaagttttcttcatcagtgacatctgattcccttcattcattcattgattaaaacaaacaaacaggctcggtgaggtggctcacgcctgtaatcccagcactttgggaggtcgaggtgggcagatcatgaggtcaggagttccagaccagcctggccaaaatggtgaaaccccgtctctactaaaaatacaaaaattagcctgacgtggtggcgcgcgcctgtagtcccagctactggggaggctgaggcaggagaatcgcttgaacccaggaggcagaggttgcagtgagccgagatcgcgccactgcactccagcctgggctacagaaggagactccgtctcaaaacaaactgcggtctacatgtgaattaatttgaaaaattatgcatcttttgactattcttgaacaatcatttcccaaattattcacgaattcacaatctagactgcctggtctacagtgccttctctcctttcacattcaagcagactttttacttccttctccttatgctgctgagagaaaaagagaaacagcattgaataatattcctccagtttaatattttcgcttttaacaaatttcggacttagctttttaaacccactggcctctttaatgggcgcttattttttttgtaaccaattgtaatcacaatgttctaaattaatacatgaaaatgaatatttcaggtttttcaagaatgcagaaggtaaggaattggaaacttctgtatgggctttacatctagtagatgcttaataaatacacgtgaatatcaataatctaaagtttctcaaaatccaaggcctgaaaaccagtatgataaactgaactgaaataaacagcctatcacttactaagcaaaacccaggctccaagcgactgttgaatttctcctttcatttcctttagcgaacgatggctaaagttttaagattccatttttttgcagcggtcctgccctttgtgacgggcgctataaatctacgtttgaggttgaagcagtagacaaattatgcagcaacttgcttctgctttactgttttttctgcactatcacccgcgttttcaattccgaagtcaaccctcaagcaagtgttccctcgacattaaactaagggactgaagagacatttcggaccaaacaacaaagacctggcatttcgccgcagacagcgcgcctcccctagtagcccgttgcggacagaccaccccaaccccgcaggagtgcggagcccggcccgagggcgggcggggtcaaggggcgagcctgcgccgccaaccgaaggccgcctacaaagagccgagcccgaggccagccgtgtaggaaagtagtcgggactaccagaaacgcttcccgggatcttggcgaccactcacccatgggccgcctgaaggtttttttcgagaagcactagatcagcggatctggcagctgcaccgaacatccgggccacagcgagctcggcggctccgcctcccggtaacccgggcgacagctccgaagttcctccctcgcttccgggtttaggctccgagaccccgccccccggacgtggctggttagcgtcccgccctcctcccgcggagtcagtgggtgagggtcgggcttgaagccatagctgcgggaccgtactcgtctcccccgacgcagaccatggagagcgcgctggcggtgccccggctgcccccgcatgatccagggacgccggtgctgtcggtggtggacatgcacacgggcggcgagcccttgcgtatcgtgctggcggggtgtccggaggtgtctgggcccaccctgctggccaagcggcgctacatgcgccagcaccttgaccacgtgcggcgacggctcatgttcgagccccgagggcaccgggacatgtacggggcggtcctagtcccgagcgagctgccggacgcgcatctgggcgtcctgttcctgcacaacgagggctacagctccatgtgcggccacgcagtgctggcgctgggccgcttcgctttggacttcgggcttgtgccggcgccccctgcgggcacccgcgaggcccgcgtcaatatccactgcccctgcgggctggtgaccgccttcgtggcatgcgaggacggccgcagccacggaccggtgcgcttccacagcgtcccggccttcgtgctggccacaggtaatgggcgggacctttccagcccagggcagagctgcaaccgggacgcgactaactacattaacggtttttctgggctggaactctggcaactaacctactccgcgaaaccttgcaattaatagaaaggtaaatcactgccaacgtgtgtcagcagccttgcgtatttggtgcgtgtaatttcgattttccctgactcccatccgcctgtggttttgggagacccttgaggagcgaggaattgcgtgttaccctgactcagcgcctccctctgcactggtgaggcattcctagagatttcaccggtggataaagcaaggtacggtggggtcaaggaaagagcgaagaacagccaatgtaccagggttccaggctggctgagaatatgcttggtagacacagaatcacacttaataagttactaaacctggtctcctttcctcacctcccccacttctttgaagaattaaatgagaatgaatgaacaaagcagtttataaatcattaagatacgaatgttgcttttctttaagaacaggaacacacattgcctggtttcaaatcctgataaccccctaaagctgtgcaaccttaggcaaattacttaatctctctgtgcctgtgtttcttcttttccctcatagagtttttttgttaggattaaatgagagtatgcaagatactgtattcctggagatagattgcaaggtttatatgatcgctaaagttccctaggcctattgagccattaaaaggttttgctggattctctagtacagatccttgtacagcttatcatgtaaagcagggcatctctataaccataacccttacaggagggatgacctggcaagctggcatctggtttctcatcagactactacctcccaggagctgaattctatcagtaagaatgctttagtcattgtgactggaagtgagccaggagccagtttaccaggaatagagttatccttttcttaaaaatcttcaagccatgcaaatcatctgttagaaagttggaccttgattccccctgaagaactaggtttcagattagcctgattatgaatgataactgatagaacaggcacttttagagcaaccttaggcagctgaaatccacgagttaacgaagaatgcctctggagaaattgatgccattttcccagagaatggtgtcacttccagactgggaggccacttgagggagacagaatttatgtttacgattccatttttaaaacctcaacagtttaactagcgtggctaccagaattccccctaggcaactccagcagcagagtagaaacactctagacttctgtaggaaatggcagctggcagcaggaacacaaactacatc

SEQ ID NO: 1241407 - DNA, 4001 bp, Homo sapiens
agcagaggtgttggggacaggcaggtagagagggaggtgtgaggacaggcagacagggaaggggtgagggagaagcgagcaggagacagacaattgaggaaagcataatcatggtgggagagagcagaaattgggggctgggggtcacatcgatggggaatggtggcgggggaaagaaggatgggcgcaagggcgcaaatggcgggcgaaggcccaaggctggggaaggcgcacgcggacgagcagacagacactggtgggccgggccccgcacctccgtcggagtaggtctcagtgccgtagccgtcctggaaaccgtccttccagagcccggcgtagcgcaggccggacacgctttcccacacgccgctgcgccccttcagcccgcccagccactcgccgcggtacgtccagcggctcttgcgctccacgcccagcccttcgcgcttgccctgctgccagtggccctggtagctgtgtccgccgggccccgtgaagacgcccagtgactcgaagccgtgtgcccagcagccgctgtactcgccctgggcgccggggcccgtgcacacgccgtagccatgtgcccgccccgcctcccagccccccacgtagcagcccccgtcgtcaaagtcgaacttgcccccgggggacatgcatgtagttggcgcggcctcagccccccggcggctcagcgcatcctgggactggagagcctgctgggggccttggagccgggcgaggcctcggggcgggggcagttagaccggggccgggcgggggggccccagcgagggcaggcagggccggaccctcatcctgagtggctgcggagaaagagggaggggggcaagtggcgagagaggcccctcctctttgcccgccgctccctggcccggtggctctggggcatcagcgccgccccccaatccacccccctcctttggcagcatcttccagcagcccccaagctttgggggaatgggggcttcccccatttctgtctttgtggagcgggcccctcccaggacttggggccccaaccccaagcgggagtcccaattctccaacctagaaccccgaagtgtcgagtgtggatggcagtttgggggtcctgagagggggctgggcagaatcgtagggcacccgtttccctggctgctgtcaggacccctctgccccggttcttcggcgtctctggcaaagggatgggggtggggggtagaatatgtagcggggagatcggaccaaggtaggcagacggtttttcggggggtttttcggggggtttttcgggggatggggcccaggggaggctctgcaggggaaaggccagggtggggacgggcagacaggcagaagggagggggcaggctactcaccatgtgggctggggctcaggctgcctccccggcacagcatccatggcaggatacctccactcccacctcgcccggacaagccaagccccctccccttccggagagactgctccaacccagagaggaaaggtgggggagtccggagagtcccctctctccccagctggaggagcaggctgggtgggggggcgaggtagtggcaagggtgggggaagatgagaatagtgtaggggaaaaaatctgccttggatggagatagggaagaagagctgggagctggatgcaaagggggagggggctctcaagagggggtgtttttattatttttttcttcttatggttgggagaggaaaaataaatcaaaattccgattccatcccagcacaaatcaatgtttgctccatcccagcatcacgggggaggctgggccaggcagatttaaaggggcagggagaagagaagagagaagagggtgggtagagaaggatacggtgaagaagagacagcggcagtgttgcgggtggtggtggggtccccaagcagaaaaggatgggtgtccgctaacccttcggtgagggaggaggcaggcagagaggagaaggagatgcactgagacccccagggaggagagaaatcctggcatgcgggctgggagtggggcgaggcggaggggagggaagaggagcgagggggaggagactgagctgaagatggggaggcagggggaggccgaagccgggcgggggaggagagatgctggcgaggctgggagagggtgagaagaatacaaagaaagaggtgcaggggtgagcactaaggaggggggagatgcagcctgagagaggggaaggaggggagacccatactggggctcgggagggatggcaaggaggagaaaagcaggggaggagggaagaagggggaaagaaatagatatggagactgagagagcgaaataaggctcctgaagggagggagaaagctctgcagagggaagggcaggcgtgggtatagagatccaggcaggaagagcccagatagaggcaggagggccggaagtggtgtttgtggggccctagggagaaggatgaacctgtcagctgcttggactgaagccaaaaagctttggggcatggatgcgggtgtccactgagtccactatcctccggaagaaagcactggagggggaccaggaggctcacgctcttgcactttctgaagatgcctgaaatgggaccctgctaggaaccctggccccatcaatgcttctccaggcctccccatcctccatccccaccacccatttctctctgggttgtccctctgaaggagaagggggtgtattgcttctgaatggggaggagggcatcatgcttggtgatggcatgaagatcccagggctttagaatcttttcttttgcaaatctagaggcaaagacatatagacatgtttgagagggcccttattatggcaaggccccctctagcccaccacccctctgtcctgtctgtcctctcaccagagggccagcacatcctgaccttgctgtttacagacagaagtaggcacacactgtcttccctctccccttagtttacttagactctgcatctagttctatccctgcctctaagcctttttaggaaggaggacactgtgtccaattacacacaacagagtacatagtcaaatgcactaaattgcccctattttcatacacagcttggtccaccactcctcccccactgcattcccattttacagagaagagaactaaggcccagaggggaagtcattcaccagaggtgaatgacaacagaactggcagagctagcagtagaacactagacttcagaccatttgagccctgtaattcctgccaggattccatgaacttggggaccctcccttaggctcagggcctccattttgagtactctggtaaaataaagagcatgaggtttggaataaatagggatttctcttgcatcgtgtcttcccacaatttacatgaggttggagaaatgtaaaatttaagcctccaggaaagggaccacatcttctaagtgcttagcatagaacaggtcagctgtgggtccacttggggcatgactgttgatggagagtttattcatttattcattcactcatttctctattcatcaagtatctacatagtttactgtgtaccacccacatagccaggtgctagagacacagtggtgaacactgtgaggcctgccctcatggagtttactactgttgagaggtgacagagtgctggcagccctcgcagccctcgcagccctcgcttgctcttggcacctcctcaaccttggcgcccactctggccaggcttgaggagcccttcagcccgcagctgcactgtgggagccccttcctgggatggctgaggttggagccggctccctcagcttgccgggacgtgtggagggagaggcacgggcgggaactgggtgagtgtgggcttggcggccctgcactcagagcggccagctggccccgccggcgctgggcagtgaggggcttagcactcaggccagcagctgcagagggtgcgcctggtcccccaacagtttcggcttactggcgctgtgctg

SEQ ID NO: 1241408 - DNA, 4001 bp, Homo sapiens
taaagtttagtcaagggattctcatgttctttctctttataaagcagagcaatcgtaaccctgcagattttatgttttaaggccttctctgaaaagttctctcatagaccaaattgcgtgaagttgaaataacccaagaggatgagaaagctgaaagaagacttgtatacttaactaattccaataatccacacattttccccaaactgttttaagagtaatatccccttgtattataggtttagtataatcttaatacaagaaggtaatctataagaataaaaattgcctaccattatgaatttatataactaaaaaatatacaggtatttaaaagaatattaggccagaccctattcgctattttttccgacccaaatacaacactactgctttagacttttattgtttcaggcattggccaaaacgaagaaataaagtttaaaacctcaaattaaaaacaaataacaagtcagatatttggggaaaatactttgaaacacttaaatacagttagtctcaaaatcagaggaaatatttacaagcctagtcttaaaagagattctaatctaagaattagtataatctaatctaccatttagggaaagcattatttatttaattatttgatatttcagtgtacctctgtctttccctgtgcctccaactaggcaaggagcctcttaagaagaggggatgtgtattaattacttttttttaatcccaagaaaccacagagtatctgtggtataaggcacccaaataaatattgtttcaatgaatgaataaacaaggcactatggaactgcatagagtatttccattgctttgttccaagctctactgtactccatatacagaaatgtctttctcattattctccaagcaagagatgtcaaaataacagcctctgaaggaaaaacttaaaaagatattcaacatatcttacttatgaagtttaaaattatacaaaagaattaaaaacaagtagaaaacgcagatttcagtaagatgcaaagtttataaggtcttaaaatgtggaaatatataaccattcccatccaaaatatcttgtaggaaatgaatgtataaatggatggtattttaaagacacactaaggcaagaaaactttaacgccagtagcaaggtaggatggcatctttttgatttttttctagttgcattaaaagcacaatagttactgcttcacttctacgtttctcatgtttaagtcaaacgaaatatatagatgaatgtacagtgaaaaacatagcaagaagaaacttgaagcaccaatttgtccacagtaattggcttcccattttgcaagcactgaactctttcttaggttcaacctcaactactctccccggcacaaagcacctttccccgtgaccacgagggccaaaagcctttccagagatttaaatcttgttaagtagccactttcgcagccattcccaacttgagggaaacctttccactgagattaactcagaatttggtcagtccctgctgctcactttggggaaaaatgtgggagaaggaagaacaagaaagataaaagcaaaactcaactctatgttccagatgtacctacaccctatccaacccctttctttcctccagttctgggctctggacaggtgggagggggtgagtctgtctggtaggaaggggatgcaactaactttcccccaccatctcattgccaccccaccccaccccaaatccagcccaactggtaaatgaaaccaccaggtaaggctgcctgcatcctcctccccccttgggagagggatgggatggggaggatggggggcgcgtgtgggcgggatggaggtgggggtgttctgaactacaactctccttaccactggagcgcctgacgatgttctccaaaaatgtgttctgcggtgccaccagccctctcttgccccccggcatcctgggtctggagagcagcggccaggatccgcggcgggggagggggggatgcaggcaaagaaggtggaggaagaggaggaaaaggtggaagagaagattgagccgaaagaagagggggcgcggcggcggcgacggggtcccctgactgtgtctccagcccgacccggatgagcagctctggggaggaggaccaggcagttcatggtagtagcgctcccccggccgccgctgcccagactgtggcggtgccgcacacggggctcgggaactgcaggctccgcggggcacagtgcgcctgcgccgcccccgctgtcgctgtcccgccggtgctgatgctgaggctgctgctgaggctgctaccgcggcggccggcgcctgggcgcgggctctgcatctctccccctgctggggagcgcaagcgggaactcaagcccccaccctcccaatccccctcagctcagaccgagaccccttccccgcgccttcgtctcccggtctcctcgtccaccccctcgcgcagcgagctccgggctgaacagcgtagcccaacttctgggctgtgcgcctggtggttgctcctctccccggagatcgaggcaagcgatcgctgtccaatcgggccggtggaatgggagaagagggtgccagagagagcagtggccagtcggaggctcacatctcggcgtctcccgctcgggtcccgaatccgggctgctggcgcggacgcggctcccggggcggaggtgcgggcaggctccagctccagccccagccgaggctgagagcagggcagggactggctgggcggcgcgcggggacgcagagcagccacctgacgctgctaccgcccccctccgggctccggcgcctgaaaccttcctgaacactggcgctttccgcaccgcccttaccccaccccggagcgggagcgcgagccctgaagtccgagcgcacagccggcgcccggaatggcccctgcgacccgggccgggcttggcgtctgggggagcgtgcggccgcccaggggagtttcccccaggaccgctgagcgcaggaggcgatccgcgagcccgccaccgctgcaaagttgcgggaaaggttgcacttgatgtgaagagtaggggaagagggtgaataattcacacccgagagagggggagtgaggagggcagtgttagcgatggaaaaacggtaaaggctgtgggggcgaagatgcgccagggtggagcagggcacgaatcacctctaacaaaccccccaatttccaggcgttgagaacggacagcagcggcaccgttacaaacagtccaaaagcctgaatgtgtcacagagaaaggaaaatggcataaatgcgaaaggggtggagagagatggaaaggaaagaggagcccgcactgaggcaccttccttgatctaaggcagtggttctcaaagtggcctggacgggcagcatccgcatctgcaccacctaagaacttgtttataatgcaaattagtggattctaccccagagttagggaaccaggaactctgaggattgggttgactcatctgtttaaacaagccctccaggtaaatatgatacatgtaaggcttcctcttttctctgggggctgcacctgggcctgtcgagaaaggacgattgtgcaaacagggtcaaagagtgggggaccaaaagtgcactgccgcggcgtcagcggttggtggtagagcgaagtcttcagtgttgaaggcgaaaagatagttggatgggtgcgtccccttttgctggggtcagaatgtgctagaggagaggtaattgcgttagaaattatcaaggtcagattaccagaagcagggagaatccccaggcaggggtggaagtacacatctcagcacctgtccccttttggaaccccctagattactaatcactgacctcaagacaggatctctctctctctgtctgtctctgtctctctctctctccctccttgcctcccctcccctcccctcccctcccctcccctccctctctctctccccttctctctcccctttctctctcttccca

SEQ ID NO: 1241409 - DNA, 4001 bp, Homo sapiens
acaggcaccccaggctggagccctgaattctctgcaaaccccgttcaggcaaaactggtaccaatctgatggtgctactctgactcttcagccctttaggcaggttcccgggtgcttcagaaccatcttccctggactctgtaaccacactttgcctctctctactaggactgggaggatggctaagacatagaaatcaaacaaacaaggaatctctgcttctcccagccatgccccgagacaccagtgtgtatgtaaattctgttctcaagtccagagggagatgcttctaagaaaggctttcgaacctccctctgcgctcttctctttaactgttcacggacagctggactctagcacagtcactgcaatacaatgttttttacatgcatcagagtcagagaggggcttcagcagagaaagacaccctctcctgagtcctcagagcacggggaggcaagattgacatttactgaattccccctcaccatctcatatttcctctccattcatctttgttagatcattttgcagaagctgtaactggcctccttttacagatgagaagatcaaggctcagagagataaagaaacattcccaaggtcacgatatgaggattcaaacccaagtttgttgacacaaaggtccatgctctccatgccagaaccttgtgagctcatccagtcccgggacccatgaatctgaccctgaacctgtcccatgggttcgtttgggtaatgaaggtctaaatacgatattttccaagcctccaggccctcctcctttgcaaaatgaactgacctatggttgtgttctggggtctgcattggggaattagttcactgtccaaggcaaattcctgtggcaggaactgcacccttaggatgcaacatcattcggccaatcaacaaacatttattgagcatcacttgtgtacaagacaggttgcaggtccccattaaaagttatttggggccctgagtagtgatgaccttccccagaatggcaacagcaggatggttataaggggagggttggggatggggaggtgggggtagactctattagggcagggagcaggatcagtgtctagtgctcctggtctgccttgaagacttgcactagtcattggcccttgggatgatctctctgcttaatcactggatgccgccccctcctttcttttccccacctccaacctctggagctttctctcacctccactttcattctcctttctcagaatgtagacaaaagcaagttacccgcccccccccaaaaaaaaatccaccaaaattaggtaaataaatcccagtaccgtttcccaaaacgtgtctgaaatcaaacacaactcctcctcaactgcgtatttggagtggactgcatggagtggggatggagggagacctccctcccaagaaaacttagccctttgggctactgcaatccccctccatccccttcggttctaccctttggttatttacaagctggacttcacttacccaaggaaagaaagaagtctgtgtagagaaaaaacatccaagaaagatgccgctccaagcggttctgtctccctctgtgccgccgcaacttccatggctattgcttcaggcgggttaagtctggtggaaagagactgcctagcgttcctgcggcaggaaaacaaaacatcgtggcgcaaagtctccctgcactcgccggcccccagcaggagacccgggctggcggccactgcgtcctgggtgcactcggtggcaaagcgctgctaccgggcacgggtctctgcagctcaaaacctgcccggctggagcgcaccaatagttgccccaccactttaatgaatgccgtgtggcccggcatgggaaggctgggaaagcccgaaaaccccagtcatctctggcaacgaagtttccccgagttggctggctcccttaccccctccccacgctccagcccggggtagctgtgagaccggaggagacgatgcctgccgcgtggggagtctcagggtggctggcaatgaacagctcagccagagaagagtcgaacacggattccggggcgagtcaggagaatttcctgggacagcgaatggcagggagtgatgaagcagcttggggaatcctctttagtgccagttctgcaaacagaagagggaggagatgggctgattagaatctactttgaattcacaaatattagactaaattcattaatctgccttggattgtttccctttggtttcatccttcttccctgaagtccagaagaaatcccagtcttccatcttttccccacccccaagacacctccaagtcctcttcccaaaagaactgcagtcaggtttccatgtcattttgtgaaaataccccccgccacacacacaccctcctttaccacacacacatacacacagacacgcaagcatccccttcatatacccactcagtggtagtaaaattgatagcgttatacattaacgtgaacttaaacgtgccccaccaaaaattttcttccccctacccccacctcgtgaagtttccacattggtctcagcgtttaagcatgcctacatttgttttctagtcccaactgacatctgcaaaaacacacccttaaatatatgttgctctaatcctgggctctgcttttggcttggaagaactagagacacatcagaagtgaaaggacagagggtgtcatatgtcatacacctggaagcgtgaagctaggctgctccataatgaactctgtgtgtgtaagtcctgcagatttattttgatgactcaaacctctaattggggattaatgaggataatatactataaactccaaagaagttgtaattaaagtgtcaggctgatggacatgattcataaccaggaactgcatcctctttccctataagtttctctatttaaaatcttaacccttaggacaatatttttatgctcctataaagcattgtgccaaacatcttaccaaaaatgtacagagctatagtccttcttcttatagaacaagttttagagtttttctctctctgtattacttccaaaccataatcccaggtaattttttaaagagatggagctagaatatttttgcttttcccctccactatttactttgaaaattttcaaacacacagaaaagttacagttgtttggtaaaaaccagtgccacagtttgaatgtgtttctctaaaactcatgtaaaacttactctccaatgtaattgtcttaagaggtgaggcctttaggagatgattaggtcataaggactcccctcccacttatgaattggtgccttttaaaaaagggcttgcgggaatgagcttgtctcttattgcccttctgtcatgtgaggacacagcaaggagatgctatctcggaagcagagaacaagccttggttttggacttcccaacctccagaactatgagaagtaaatttccattatttataaactaaccagcaaaaacggactaagacaagcaggatccaatcaaagattgcatttgcttgttctgtttagtgtgttttattctagaaaagcgtcttcatatttttctaatgccattgattttttttttcacagaatccaagctcatttgctttctgatgtgtttaatggcctgacgtagctaaagataagttgagtcaaagggggaaaattatttcctggtcatagtagatcattaaaataagttaacattttctataaacttggcatctgtgccagtatccatagaatggaagacagttgtagctccactcactctcctccttagtctttgctttattcaaagaagttatctttgttttttatccaaaaggtcttgtttcaggaatggatgagtgttttcacacatatacaccaagttgacaggcacatatggtattttactgaatttaaaaataagaactcagcaaggtcacacaccataatgaatgagctctgattttcatgtcgttctaggaaggttttaatttga

SEQ ID NO: 1241410 - DNA, 4001 bp, Homo sapiens
tcctatacatcctccaggcctaagtccaagtgtcatgtcctcagggaagccttctctggtccttgtcaatctcttctatcagacactttcttaaacctctgatgctctccctggagcatacataaactttgaattatgcattcctccatggaattgatttaggtctgtctccctcactgtaaactccaagtcagagcttttatctttcctgttctgactgtatctccagagcttaggacagtgtttagcatgtaataggtatttaacaaatatgcttttcagggattctccccccaaaaaagcaaaggcacacctccatatttccagagatttcaagtagagacaaaatagaaggtttgggctgtatttaagatgtaacagcctcagtgttttaaaaaggcagtatctcttcactcactcttcaatagccagtcaattcctaagacatttactcaacaaataagatggtttcttctttccagtctggagaaaaagaagaaatgcgctcataaagaacattaaacacacacgcaccccaaataaacaaatttcaattccaatacacacagaggcgttgcctagcctgacacagtcgtcagatgagctacaagaaatgctaaagagcattcttgtcacaactggacacgcggttccaacttgttctgctctcatactgatcactcccttggagccttaacatctgtatgctaattacagacacggtggccgacgctaggcacacacaaatccgtcttaatccctcccttttgcgtggatgaaacctggtccaacattcgtaaaagcatgcaaaccacaccattgcttgggcgggcacacttcgtgcccctcccctatgccttgccagccccacccttctcacaaaccacccctcctcctgcttctactctgacctgagcctaactagctgctaggtttggtaataagattgaacgaagactcaggaggccctgtgggctccattattctgcatgccctgcgagaacggcccacccctagggacggctgctgcaactcgagccccacttgctgccaggaaacctttcccactgaggacacccgggcatgcggcgcagctccaggtccagggggaagcaccccacccatctgccagagagacaaagatcaccagaaacaaaggacacacacacacacacacacacacacacacactcgcacactcaaagtcaaaagcaaataccgacacttgcaatttcaaaccaaacagtcggcttggtctatctaaatagatctggagacaatctaggagggacaatgattatgtggtaatgacaggcactatctgggttcggaacccacgctgcctccgccctcctcccacccgcgctgcagttcccaggcgcatttcccagcctcaggacacacgctgccagaagcaagagtgcttccactcaaggaagcgcgcacacgccggagacagaggcagggcgagggcagccaaaagtaggaaacacccacctttaggatcccagttcacctgttttcttggcgtctcgattggaaatttcattgcttcgttgcccagaaggggaagaaatgaaaagaacccaaataataataaagtcctcaagctttacacgcctcggtttagcagtccaacaaaacaatttccgaggatgggggagccttggactggctcgtggaggaaccccagaaaaagacaggtgggaaaatattagcttgggggagaactggagagggcttgggtgtttgcaccggccagggggtggccggccgcggccccgtgggtaaaagaaaaagtaagatcggcgaggggtggatgaaaggatggagaggaaggcttggggagatggaagagccaagctgcttcccaaaagcggtgccggcaggttaggggctgcgcagcctgaaggctggggctacggagaagcccactgcagtgtcactccagcccccgaaggcgtgtgcgcacacactcccgcacacacacacccgcacacacactcccgggcgcgcgcttgggcgggcacgtcagcctcgctcggccgcgctgagcgcacacgccccaccccggccgcggctcctcgcccccggcgacgccccccacttcccgctccccgaaagccattggatgtaggggtggcgcggcgcccgggcagcgcgcggcgagggcgaccctccccgcggcgcgccccagacgccgcgccccggcaagagggagcagggcgagcagcggaccgaggctcccagctgggaaggcgcgctgagcccccggcacccggctcggggcagcgggaggcggtcgcggacttgcccgcggggcggcgggaggcggtgggcggtggcggggaagccgcggaggggcggggaacgagcggtgggcgcgccgctacttactggctcggccggccggcgggcgggcgtggaggcggcagcggcgcgcttgctggagttgcagccggagacacgcttggttgcctggaaggcgctgcaggaggcggaggaagggccgctgcggctccgccgcagacctcggcctccgggtcacctcttctcaccgctctcaccctgagctctccctccttctcttttctcacttcattttttttcctcccgcgtctggctctctcgcctgagtcccgaacccacgtccccgccgcactccaaggaggcccgtgccagccatgagccttttgttctgggaccgctccgcatctgctgcgctctccccgcccggggaagctcgctcccaaggcacagcttggtcccttccccagctacctgcagccggactggggccgctggtcgttggctggaaaggaggcttgagagaggcacgggggcccccggaggaaagcggagttgccaagacccggcagctcccggaagcggcggccccgggatcctgggaccagcagggcagatgcgaagggacccagacctgttcccggaaaggggctaaacctggagcattcgtctaacgccctctcactgcccctgcttgaagccccacaggggtttgtggtggggcctcagtcttcagaaaagccaggtggtgctgaggtgctcttgaacgggtcactccgagtatcaacatgaatgatgctgacaaattgcttcggatgcctcgcaacggagccttacacgtagtaggtgctcaagaaatacttgctaaatgaagacatgaattgcatgctgcagtgttggataggaagtagtttaaacccctactctggcttccagataaggttactaaaatttgttgttcattcaacatatatattgaaccccttccaagtgccatcactgtgctatgtgctggccatatggcagagaacaagacagagatcttgccttcatggggcttactatctagtgccataaggtcctgttagattgttgttgcctttacttacgcatagaaattgcccagctcattcctatgcctgccagctggggtcctaaaatcccacactagcagctgatctctaagttgcatgctactctacggcaccttgaggcttctggggagccctatgtcagcagcatctttctcaccatccatccgtcactatcacatcaaggtttctgagtccaagagcaagacctacagaggtccgctgtggtctgtgggaaaggtgagtgctttgtcactgggctgtcacaggcaccccaggctggagccctgaattctctgcaaaccccgttcaggcaaaactggtaccaatctgatggtgctactctgactcttcagccctttaggcaggttcccgggtgcttcagaaccatcttccctggactctgtaaccacactttgcctctctctactaggactgggaggatggctaagacatagaaatcaaacaaacaaggaatctctgcttctcccagccatgccccgagacaccagtgtgtatgtaaattctgttctcaagtccagagggagatgcttctaagaaaggctttcgaacctccctctgcgctcttctctttaactgttc

SEQ ID NO: 1241411 - DNA, 4001 bp, Homo sapiens
agcactttgggaggctgggagttcgagaccaacctggccaacatggtgaagccccagctctactaaaaatacaaaaattagccgggtatggtggcatgcacctgtagtcccagctactcgggaggctgaggcagaagaatcacttgaaccaggtaggtggaggttgcagtgagccgagatcgtgccattgcactccagcctgggtgacaagagataaattctgtctcaaaaaaaagaatacggcacatatttcattttcacctaaatgtgggtgatatggaggggtacatgtggaaatctgctttttcatggttgaacaagctcttaataagttgacattattcaggctttctcaagccccacagatattactgcaccatccattcattcgttcaatcaacaaacaactgagtttgcctggcactgcatttggcactggagctacataaattaataagacgcatcccgccttcagagttaatggaagaattaacaaagatcttacacgtgcatgaagctgtttttgttttgctttgttttggttgagacaggatcttgctctgtcactcaggctgaagtgcagtggcacaattatagctcactgtaacctcgaattcctggcttgagctatcctcccaccccagcctccccagtagctaggaccacagatatatgccaccatgcccaactaattttttaatattttgtagcgatggggtctcactacattgtccaggctggtctcaaactcctgtcctcaagcgacctgccagcatcgacctcctaaagtgctgggattacaagtatgagccactgcacccagccagtgaacctgtttttatcttcgccaaaccttctgtgtaaggtgatgattattatctgcccccattgatagatgaggaaactacgggccagagaggggacactgagcaacctatgacaagctaacaagcaggggcatccttgaatccatcttcagacacttaacccgagtgcctccattcctccatgtcacctgaaacaaatggcattccaagggttcagagtctcttggaaacctgaaatgcagctgcctcagtgccacggtcacacagcagcgtgactctgctactgacccaggcaaagtgcaactgtgactgcagactcccgggcaagagggaaaggacagcctcctctcacctcccccctccccgcagccgacctcccacccctactctaggtctggaatcattccggggccacctgcactgatggctcagagcttccaaagagtcccaggttacagctcagcctgcataggcataggcagacttcaggccgctggggagggagggtgttaggaagagggcaggaaagatgaggagcgcaggattccacctcgggtgctccacccacaccggcctccagttgtcccagcagctcttagagcagtatctgtgctgcctctggttccagatacccaaacaaccaaatcatgttttccctgtttccatgggacagccctaccttaaaggcaatcaagctgatcccagtaagaatggcagtaacactaagtctgtatgcactaagagagcaagccatggtcccaaaacgccacccgaggctctccctttgggtgaagcattgctccctgctgtcttcaaaatttcaggctgcacttccagatggaagagatcaagctatgatgaaatgactgagaccctatggagccatgagaagaggaaaacaaggcagactggggggaagagggagctagaactgcctgccacctcatctcacatctgtgctttcctgtccccttagtccagaaccccatcttctctcacctgaatcactgcgacagccttcagtcctgtcccccttaaatccatcctccatataccagccatgtacatggtgtgtcactctctcaggtgtcagtgtgatcacatggacccttgctaacaatgctctgaaggcgccaccaacattcagagtaaagtgcaggctccatgccttgctccctgactctcccttccaggacctggcgcctgcctatctcacaggcctcacccactgccacgcccccacaagcaacctttgccccagccaaacccagcagcacccagacccgctcacacctgtcccagagaaacaggtctcgcttcccagattcttctcacctcttgactctttttttggtcaattccttctcaaacatcaaaacccaccttacgtgtccccacctccaagctgactgctcatcccccaacattatattataagatgcccttcctttgtgtctcaatatgaagtttagcagagaacctacaactaggagacccctggttacagtttgtttcattcctgaatttgttcattcatccattctcccatttgctttgggccagcatttatggtatcaagttcacacacctgcccaacagaaactttgactgcagagttaatcctgcatatggaagcacccctggcactattgtggttttttcccataggcagaaatccagagtcaaggtgttaacattctcaaaaagcaaacagtccaaagagagttcttcatggtttgtacaagcgctagagtggacagacaagagacagggcagtattttacttcactgggctccaaacactcagttcgggcctttcttgttccttcatgaagagctacaagcctctcttttactcaggggtacaaaatacttgtgagattttaaaaattctattgaatggcatgagtcacacttggtgagtcccctctctggtggaagacaggcagaatttaccctgagtctgccttcctggggtccctctgactggggccaaactgcataaactgtgatttgaggacccaaaagactaaagggcttttctttcaccccacaagctggggagagaacaaggggttcacatgagacttaaaggagcagtgacttccttctcgggacttgtaagctcgacagtttcccctgatttttccccaaatctcttcttgtatttataaaccaaaggtatggcaaaaaaaaaaaaaaagtcagaagcctctccactagcagacaggccccagagaacaaggttatcagggttagaggaagcagggggaaggttggacttcaacagccacccagcttacccctaccataggtctgtcttccacgatggccccaccctccacaggaaacactgggcagggctcctaaaagacagtcccttctccaagcctccttcctcctccctggaaagggacagaagcagtagcactattgggaagatttaacataaaatgtacggcatgttgctcaatgccttgttcaaagcaagtcctcaatcaacgtgagctgtccacattattaggaggtgaagaaaactacgtgttctatgcaagcaaatgcaacaaagcgtgcagatgctgtgtttgacagaggtgtgggggacagaaagacatgaagagagagtgtcagtgccaccgaagaggagacgagaatgcaaagacaaggtgcccactggtgtggaaagggcattaggtgtctgcgagagggcagaaggaggtggagaggaaggcggaacagcaatgggggggcaacagatacaaagacactcagccatgaatcagcctggggcatttgggaaattacctcaggtctgcgtgtcaggactagagggtgtgaagatggctacaccaaaataaagctgcaaagacaagcagaggagagagtgtggctcttgttggtcttattaatgagcgtgggaagccatcaaggctaacacagggagaagagccagggggtcagacctgggtttagcaagctgactctggcagcagtgcgtaagagacatgcagcaagtgagagatcgtctgtggggggtgtgggtaggagtttactggaatgtattatgaggcctcaactcaggcagcagcagaggaggagtcagagacaaggcgtgttaaggaagtaaaatgtgcgggtcctagtgatggatgcaaaggaagaaaggaggcgtct

SEQ ID NO: 1241412 - DNA, 4001 bp, Homo sapiens
tgtcttttgtgctgcttctcctggcagaatgtctatgtagcacagccatgtgtgggagcctcaaggaggctcaacttgtcgccccacctcaccagcgagctcttctagagtgcacaggggcagtagctacagagcgctcagcacatgcaccctgggctgtttgcaactgccagccttttttgcagcttggaggccacttcctctccgtctaactcttccaacctccctcccctgctccaggtctctttttgcccccctcagaatttatttctacagcatcttccctaacccccattaatcacttgattattcttcaaggatgaacaatctttaggggtgtggcgcagactcccccaaatcattttccttctgctgggaaataaacacagctgattgtagctgtgctacatctttgctaaaaaattctcaatggctcccaggtgcctctaggtaaattccagctcctcagtctgtcagtgaaggtcctacccccgcctccatcccattagccagcagaccttcctagtcttccttccaccactccaaccagctcatggggcccctgagtgcgattctctcctactctagagtgcaaccgcgctttcagttcccaaacccaagttatgcctaacacgaattgattcagcccaaaggtcacttccctggttcttcctggtggaaaattttccatcttttgaaccgtcattggcacttttgcttcctcactttcagtctgctgttctgattttttctcggtaagtgtgaagtcgagggcagaatcttttaaaatctgcacttcccctctgactgactcagtaaatgtttagtttcctgtccctatctgtaaaagccttcttccccatgaactcaagccgtgtctccttcattagactgaaaatctcccagagcagagcgtctccaatttaaggatcattccaatcctttggggactttgttaacatgcagattctgactcggcaggtctgcagaggggactgagactgcatttctaacaagctgccaggtgacgctgaagctgccggtgcctggaccacattagagcagcggggaggcaataccacctgttgatcaggcgacagctcatgtcagtggagtctggctgggcgcccagatggatgaatgaaaggatgagagggtcggtcctgccccccggaggaagtggaggccgcccggaggttgtcagcgagtccggccagcacacttacctatggtggaaacgacggtgcccacgaagtagaaggcgccggtgaagtcccagcgcgggcggacgttgtccacgcggatgccggcccgagtggcctcctcgtagtggcggaggaagccgcgcagctcgtcgcggctcaggttgtggccgcggctgaagttggccaggcgctcctcccagcgctgcttggcctggcgctcgtgcgccagctccagcgcggagaagacggcggcgccgcccagcaggtagagcacgatgagcgcggccagcagcagaaagcgcgcgttgtcctcgttcaggtggcccgggccccagctgaaaccccggccagccatggccgggcccccgggggcagcccccaggcccacggcaccgggcgtcggcggagtctcgcccacacccccgggaaataagggccccggcgctcagccagctcccgggcgccccaccgccggctcgcccatgaccgccgggctctcccgcaggccgcgaggctcccccggccgccgcctcggtagctcctgtggcgccagctccccacgtcctccttgactcctagtttcaaatccgctttgtcgccgccgttcccctccactccccctgctctcctcggagttctccttaacgctgaaggtcccggggaacgggcgcagagttcacgtctgcttggcgctgggatgcgggcgcagtttccaccccggctccctgtccggctcagataggggagggggcgtggcgcgtcttcagggcaagctcgagccaactcgagtttcccgcaaagagacggtcgcggggcggggcggggcggggcggggcggcggggggggggcgcggtccggaggtctgcgggtaagcagagcgccggggtcctgggtcctggttcctttgactatcgcttcgcaggccgccgacggctaggacacgggtgtcagtctgctggctttgtaggtgcctccccaggtagatcgacgatggtgcctcctagttgtggtcgtggtgtcgcgctgagcctgtggcctcccgagtctccgaatcggctgccggggcttagggatggagggggtccagggcgggcgcacggagagaggggctgtgctgagcggcgtccgagggctgcggcgtccgagggctccgacctccggccgggccccaacgctgcgcatccgttgggcggacgggctggagagaggagaccagaaagggaggttggaacagggagcaaaggaagttaggggcttctcccccgggcagcctccctcgccttgaccatgccagagcgcccttggtctctggatcctgcgcgggggcgtcctctgcgcctactagtaggctccgcccggaccaagcgcgcaccgcgagccagccccgcttccggagaggaggccaaacactgggggctggaagggctccgcggccaggagaccttgaccttggagcgttccatctcttccccccgggcttggctgcctagtgcgttccagagttttgcctggacgcggggtccgcgcagaaggcatcccccacctcatgcagaacagtagcaaggctctccagcaaaccgccggggccccctccccgagaccccgccttgtagcgggcgctggcgccgctgccgcgctcagatctcaccttccggggagcgccctctccgcgccgctccgtcgggactgttcccgggcctcctggcagccgcggccctgccctgccagccggcgcgcggagcacaggtccgcaccgcgctctgccttctcaggcgggcgcgctccgacgctgcaacaggtagagccgtgcggctgccagctgcggcgactccaccctgtcgcccgcctccttgcgcgcgggcccgcctcctgcgctggtctccgcgggtagacgctcggcgttcgaagggccgacccggggctgcggtgctcccaccagggcgcgcagatctgggtagtggatgcagaaccggctggtgggacgctcagccggtccgcgtgggccctccggggccgggagagggcgctctgccccctccagacacatcccgcccccgcccgcgcacacagccccgcgcggccctccggaatcacccgcccgggcgtgtgggagcgaatctgtacgcggagaggaatggatacgtgggcatcttcccaccttccgagagagcggtttcaggcgcagagccccacacaccgcccttacgcaccaggagcagagacagaagggctaggagccctgttgagtaaaaccgtgtgatttcgaataaagaaacacagctctggcgagtgcattttcatcagaaaccctggtgctgttagcagtcctctcggctctgttactcactccccaatgcccctctttcatctagccttctgaggggcaagagctttaggggcatcgcgagaatgggtgcatgtgtatacacccagggtgagtactgcaattaccttttaaatccattttattatgaaaaatttcaaacattctaaaaagttgaattttacagtgaacacccgtatacccaccacctagattctacaattaacatgttactatacttgatttattagatatctacccgtccctctgtccatccatcaacccatcttgtttggatgcatttcagagtaagttgcagagcttggtacacttccgccctcatccccagtacttctgcctgcatatcactacgtagggttcaatatttacttgcagaatttttttccttttcggataaaatttacatacaatgaaatgcacaaatcttaagtgtatcattaggtgagttctg

SEQ ID NO: 1241413 - DNA, 4001 bp, Homo sapiens
tcctggaaccccagcctaatcccaaaggaagcaatgtggcccagcctcccaccccacagtgcattccttggtggggccaacttgttcagccagatatctctattctcccaaagagcacagaatgatttttgccagcctgggccatcacagaagaaattaagctgaaactgaaaacaaatatagagttggaaagtccctcaaaactcaggggcactgaggttgccagtgagacaaccaagaagtggagatcctccccaggcccctcctcttccctgctctcctcggccctgctctcctccgccctgggggaaagcgtccttggtgcctggagggatgggggagagaaggcgttcaccttggctctgctggcgttttccttggggccctccagctgcagccagatgtgggggttgtccggacagtccttcggaaggacgctcacccccacgctgaagatgcgctccacatggggctgctgttcccgaaccttgttctcagcctccgcagacaccgcaaagcgatctggggacgcggggcgggccccccaggtaggcatggctgctgcccccagccctggaaggggagaaggcagctcagagcctcattgtaccctccatccaaatcctggttcctgggactacaccagctatcaacaggtcgcacctagttaaggctctggtaaacagccccaggaggtgacaagcatctgagtccactggaggtagggagggtgtatgtcacgcaggcctctccggagaggaagtcccggtaaacaaggctgtctatcgagagtgggcgtctgggctttggaaaaggatgaccacagtccggagcaagaagggtgggggggctccagctcggcctggaggccagaaggagtctcctggggcactctgaagcttcttaaggacgaatcctcagcaggggattgaactaggctgtcctctgggggccctggtctgccatttccaaggttcaagccactcccacccctcccccagccgtccgctgcccctctccgtcgggccaggagcaccgcccagggcccaggggccgggccgggccgggcccgcccaccgcggactggggcagccaccccgggccgggcctactccgcaccgcggcccccgctccccgctcccgggcgcggtggaggggcgcgcctaccgcctccgccgcccgcgccggcttcaggtcctctcagcgcccgccaggcccccgctttgcccgcgcccccagcccaggggacaagggcagggggcccgaatctgggcgggccttcccgggttcctcacccagcggggacctctcttgtccacatcgcacgcaaactgtttcttgagtcacttcctggcctggggcggagtcagcccagctcctcccggctgcgcgccctcctcccaaccccgccgccgcgcccagaggccccgacgggcccgctcggcctagtcccctcggcggctccagggctcgccccttgcgcttctcaccagccctcccgtctgtctcccggccctcagggtcctcgcgcattctgcgcagttacttctcggaaaggggaaccatgcgttgaaagttgtttcccgcgaataaagatgtggccgaccaaagaggcagcgtgactggcccactggtgctctaggcccaagcactttccaccaaagcaatcgtggcggagggggtaggcgggaggcgggaggcggagggtacccgtggtggagtacccctttcttccaacaaacggaaagatgccacgaagaagggctgttgatttgtgggggattttgaagagaggaagagtaggaggaaggggttgaggggctgcctctggcatatgcacacactcacacattctgtcacacccgtcacacacacataccatgttctccatccccccaggtccagccctcagtgctgtcccatccagcagggctgccctgaagctctggctgcagccctcccgtccagtgggcaggcggcttcatccctcctttctctcccaaagcccaactgctgtcactgcatgctctgccaaggaggagggaactgcagtgacagcaggagtaagagtgggaggcaggacagagctgggacacaggtatggagagggggttcagcgagcctagagagggcagacgatcagggtgccggcggtgagaatccagggagaggagcggaaacagaagaggggcagaagaccggggcacttgtgggttgcagagcccctcagccatgttgggagccaagccacactggctaccaggtcccctacacagtcccgggctgcccttggttctggtgcttctggccctgggggccgggtgggcccaggaggggtcagagcccgtcctgctggagggggagtgcctggtggtctgtgagcctggccgagctgctgcaggggggcccgggggagcagccctgggagaggcaccccctgggcgagtggcatttgctgcggtccgaagccaccaccatgagccagcaggggaaaccggcaatggcaccagtggggccatctacttcgaccaggtaatccccctacccctgtccaggggacctggaaagaccctgcaaggacctggaagcaactgtccaagcccactttgctgtctctgaggctttaagaaaacagcttcctacatctttcactaatctggcctattgccccaccaccccaccgacggtttcccctccctccacccatacgcagccctctccttgccccttctcaccatttcttttgaatctgttcactcctattcactcctacttgccactccttctattcattactcactgcccctgcccctagtccccatggtacccctgagccatgggcatttcctgagccccactcagcaggctctgcttcccccaggtcctggtgaacgagggcggtggctttgaccgggcctctggctccttcgtagcccctgtccggggtgtctacagcttccggttccatgtggtgaaggtgtacaaccgccaaactgtccaggtgacctcagcactggcccccatccccggctcaggagggtggggagggggaagaaggggagcccagctgacctccgggtggactctccattgacctgtgtcctggaggccaggaccaggggaggaatgggcctgccttgcattgagtgtggaggatgtgcagagtccaatgctggccgcccctcagccctcccgggagagcccattaaaacccagcttcccaagaggaagctcctgggaaagtggggggtcctgagctaagggctggggaatgggggctaactgggctcccctccccaggtgagcctgatgctgaacacgtggcctgtcatctcagcctttgccaatgatcctgacgtgacccgggaggcagccaccagctctgtgctactgcccttggaccctggggaccgagtgtctctgcgcctgcgtcgggggaatctactgggtggttggaaatactcaagtttctctggcttcctcatcttccctctctgaggacccaagtctttcaagcacaagaatccagcccctgacaactttcttctgccctctcttgccccagaaacagcagaggcaggagagagactccctctggctcctatcccacctctttgcatgggaccctgtgccaaacacccaagtttaagagaagagtagagctgtggcatctccagaccaggcctttccacccacccacccccagttaccctcccagccacctgctgcatctgttcctgcctgcagccctaggatcagggcaaggtttggcaagaaggaagatctgcactactttgcggcctctgctcctccggttcccccaccccagcttcctgctcaatgctgatcagggacaggtggcgcaggtgagcctgacaggcccccacaggagcccagatggacaagcctcagcgtaccctgcaggcttcttcctgtgaggaaagccagcatcacggatctcagccagcaccgtcagaagctgaaccagcaccgtatgggct

SEQ ID NO: 1241414 - DNA, 4001 bp, Homo sapiens
ctcactccttggcactgagcacccagcaaggctgagctccgcccctcccaagaagccagtgctcctggcccctgcccactagacgcctcctgcaccagactcagcagctcctcctggacagccaggggcaactgcaacagagcctctctatgggcatcccccggggactgcagcagggcagagaagtctctcagcactccagtacactgagaggctccggaagatggtcctggcgtgaagtcccagctcagccgctctgccagctcttctacccggctctgagccatgacaaaggcttcagtcaggccactgatcatcagtgagcctggcgccctgggcaccagatgggctgacgtgctccaggccaggcagtcaaggaagaagccctgggctcccagaaagatgcagtgcagtttgggcgggtagtggatttcatcctgcagttctgggctgcagaggcccttcaggtactcctggttgggaggaagggaaggtcaggaaaagtaaactaactggcccagatcacccctcctggctccttgctcgctcctgagctccaggatgtctggagtatccacatgatgttattcccattttagagataaggaaactgagactcccatcacaaagctggtacatgattgagccatcctggaaccccagcctaatcccaaaggaagcaatgtggcccagcctcccaccccacagtgcattccttggtggggccaacttgttcagccagatatctctattctcccaaagagcacagaatgatttttgccagcctgggccatcacagaagaaattaagctgaaactgaaaacaaatatagagttggaaagtccctcaaaactcaggggcactgaggttgccagtgagacaaccaagaagtggagatcctccccaggcccctcctcttccctgctctcctcggccctgctctcctccgccctgggggaaagcgtccttggtgcctggagggatgggggagagaaggcgttcaccttggctctgctggcgttttccttggggccctccagctgcagccagatgtgggggttgtccggacagtccttcggaaggacgctcacccccacgctgaagatgcgctccacatggggctgctgttcccgaaccttgttctcagcctccgcagacaccgcaaagcgatctggggacgcggggcgggccccccaggtaggcatggctgctgcccccagccctggaaggggagaaggcagctcagagcctcattgtaccctccatccaaatcctggttcctgggactacaccagctatcaacaggtcgcacctagttaaggctctggtaaacagccccaggaggtgacaagcatctgagtccactggaggtagggagggtgtatgtcacgcaggcctctccggagaggaagtcccggtaaacaaggctgtctatcgagagtgggcgtctgggctttggaaaaggatgaccacagtccggagcaagaagggtgggggggctccagctcggcctggaggccagaaggagtctcctggggcactctgaagcttcttaaggacgaatcctcagcaggggattgaactaggctgtcctctgggggccctggtctgccatttccaaggttcaagccactcccacccctcccccagccgtccgctgcccctctccgtcgggccaggagcaccgcccagggcccaggggccgggccgggccgggcccgcccaccgcggactggggcagccaccccgggccgggcctactccgcaccgcggcccccgctccccgctcccgggcgcggtggaggggcgcgcctaccgcctccgccgcccgcgccggcttcaggtcctctcagcgcccgccaggcccccgctttgcccgcgcccccagcccaggggacaagggcagggggcccgaatctgggcgggccttcccgggttcctcacccagcggggacctctcttgtccacatcgcacgcaaactgtttcttgagtcacttcctggcctggggcggagtcagcccagctcctcccggctgcgcgccctcctcccaaccccgccgccgcgcccagaggccccgacgggcccgctcggcctagtcccctcggcggctccagggctcgccccttgcgcttctcaccagccctcccgtctgtctcccggccctcagggtcctcgcgcattctgcgcagttacttctcggaaaggggaaccatgcgttgaaagttgtttcccgcgaataaagatgtggccgaccaaagaggcagcgtgactggcccactggtgctctaggcccaagcactttccaccaaagcaatcgtggcggagggggtaggcgggaggcgggaggcggagggtacccgtggtggagtacccctttcttccaacaaacggaaagatgccacgaagaagggctgttgatttgtgggggattttgaagagaggaagagtaggaggaaggggttgaggggctgcctctggcatatgcacacactcacacattctgtcacacccgtcacacacacataccatgttctccatccccccaggtccagccctcagtgctgtcccatccagcagggctgccctgaagctctggctgcagccctcccgtccagtgggcaggcggcttcatccctcctttctctcccaaagcccaactgctgtcactgcatgctctgccaaggaggagggaactgcagtgacagcaggagtaagagtgggaggcaggacagagctgggacacaggtatggagagggggttcagcgagcctagagagggcagacgatcagggtgccggcggtgagaatccagggagaggagcggaaacagaagaggggcagaagaccggggcacttgtgggttgcagagcccctcagccatgttgggagccaagccacactggctaccaggtcccctacacagtcccgggctgcccttggttctggtgcttctggccctgggggccgggtgggcccaggaggggtcagagcccgtcctgctggagggggagtgcctggtggtctgtgagcctggccgagctgctgcaggggggcccgggggagcagccctgggagaggcaccccctgggcgagtggcatttgctgcggtccgaagccaccaccatgagccagcaggggaaaccggcaatggcaccagtggggccatctacttcgaccaggtaatccccctacccctgtccaggggacctggaaagaccctgcaaggacctggaagcaactgtccaagcccactttgctgtctctgaggctttaagaaaacagcttcctacatctttcactaatctggcctattgccccaccaccccaccgacggtttcccctccctccacccatacgcagccctctccttgccccttctcaccatttcttttgaatctgttcactcctattcactcctacttgccactccttctattcattactcactgcccctgcccctagtccccatggtacccctgagccatgggcatttcctgagccccactcagcaggctctgcttcccccaggtcctggtgaacgagggcggtggctttgaccgggcctctggctccttcgtagcccctgtccggggtgtctacagcttccggttccatgtggtgaaggtgtacaaccgccaaactgtccaggtgacctcagcactggcccccatccccggctcaggagggtggggagggggaagaaggggagcccagctgacctccgggtggactctccattgacctgtgtcctggaggccaggaccaggggaggaatgggcctgccttgcattgagtgtggaggatgtgcagagtccaatgctggccgcccctcagccctcccgggagagcccattaaaacccagcttcccaagaggaagctcctgggaaagtggggggtcctgagctaagggctggggaatgggggctaactgggctcccctccccaggtgagcctgatgctgaacacgtggcctgtcatctcagcctttgccaatgatc

SEQ ID NO: 1241415 - DNA, 4001 bp, Homo sapiens
cactccagtctgggcaacagagcaagaccctgtctcaaaaaaaaaaaaaattaaagaataaaaacatacatataaaaaaaccaaaattacctctcaaaccatgtttttatactgtgtgcaaatgactcccctggatacagctgattatttcttagatatgaaagaatatctagtagtttatttgaatagttatcatcctttatgtcttttccaaaatcaaagaaagcttttaaagtttccaacataggaacaatatcatgacctagcaattcctgatataaattccaagctgtgtttacatcttgatgaaggagagctccctggatacagtcattatagttcttttttgaaggagttataacttttttgatgtcctctaacagcaacaatgcttctctccatctgtctgaatggatcaatccccggatgagaagactgtaacctctaggttctaaagtcttatatctggctttcataatttcaaagacatcaataacttcagatgtctgcatatgaaagacacagagatacaaatacttgaccagtaaatcgtaacttacaataccattatttttggctgctacccatgccagcagagatttagccacatctatagagctatgacagccagccatctgtgaaatgatccaactttcgaaactggtctttccggtgttttcttttaaatcttccttaagtttatcccactcctctgaattcaaaggttgtgttgggagttgaatagtgttcctcacaggtgccaaggcatgatcttcagtttgagaattcatctgtgatctctccttagctgctccagctaaaaaaaaatgaggaacagaataaacttgcttattactgccctcatctttcctgagatatctggccttggcaatcagattcgttgctttggtattctgtggagacattgttttaagagaaaacaacctctgctggttcctgatgccacagcggtctgccagaaacagcgagacataagagtgccctgggcctagcccaaggtatgggctcttccaaagcttcggaaagcttcgaataccaaacaaatagaaagtcattatgcagtgagatcagcaccagatagtgagagagatgttgaaaaaacccctcttctatggcaaaattaaagagattgggggtcggcggtgcagagtcgaagtggaactttttaaaaggtttgtgtttcttccttacagacaaatcaaggttctgcttttggggctacttaaaagcaagaaggcaggtgagttttctctattaaacaacaatccggggatgtccaacgtcgcaagccgcaaaccaggggacagagcaggaatcctctggtgcctcttacattccagttcatgaacctgaggaaaaagcacaagacggaacgcccagttttactcacgtggatcacagctgtcctgaaaaggaacagattcccacgggaagcttgctggaaagggggtgtaaagccaaaaccgtatccagggacccccaactccagcctaccaccaacagcggcgaaagccgaagtctaggggccctcaccctgcatagctctctacagaccgcaaaactcctccggtggggggacgaggagggaggaggtggcgagtcagctgcgccaacgactcaggaaaggaagagaggtacaggaagggcgctgcctagactgcgtaccgaacgctgacaaatgaagttcacttcattcaacaactcaaagcggcactcagacttaacgcggccataaacgcggcggaaactacagtgcccacgatgcaccgcgccagccccgaccgacggacgagactgacccggacttaggcgttccgcctggcccggcggcgaggaaaaaaggcagttttgaagcatttagtggcaaaaggggtaggagacggctgctgaagtgtctactacattcaggggacctggaaggcttccagatatccgcaatgaacaatgaaaagaaattgtgaaagaaggcgcttccctcaagccggaactaatgaactcctgggtcacgtggtgcgcacgcgccaaaggcacacgataaaggaaaacgcgggcttatcgtggcctttaaaatccggcttggtgagcttgggtcgcctctgaaggagaaccattttccatctctttcatagttttttcccccagtcagcgtggtagcggtattctccgcggcagtgacagtaattgtttttgcctctttagccaagacttccgccctcgatcaagatggtggttggacggccttcctaacctttacggggcctggcggtgctgacgcctgagctggtaggggtggagcaggtaggaaacagcaaatgcagaagctgctgcgcggaagtcggccatggactggaaagaagttcttcgtcggcgcctagcgacgcccaacacctgtccaaacagtgagttttgggaggggcagcccgttgggatggcccggccctaaactcctagaggtaggggggaggtggggaggaggagcaagggggagccgccttttccgcttctgtgaaacctcccgacaaaggaggcggagtggaatgtggtttaaggatcccgataggtttgacccaaactttcctggggcagaatctagaggaacgaaaaacttagctttagtcactgacttccatggtcttaatctaaacttgtgaagaataacttggaaccccggctccaacaacgcctgaaccccaccaggacctataattgtcctcctgcctttttactgtcacgctttttgcttccctcgtaatccattttatatttcataatccatttttccttttatttttctccttcacattgcttattaactaacctcgttaaatctacctttcctattccacacccgcactaagggctgttgaaagtggctggagaaaaacagaaccttggtgagttgtctcacttttttttttgagacggagtctcttgctctgtcgcccaggctggctggagtgcagtggcagcatctccgctcactgcaacctctgcctcccgggttcaagcggttcttctgcctcagcctctggagtagctggaactataagcgcgcgcaaccacggccggttaatttttgtatttctagtagagacggggtttcgccatattggccaggctggtctcaaactcctgaccttgtgattcgcccacctcggcctcccaaagtgctggaattacagacgtgagtcaccgcgccccgccgagttatctcacttttaatacaagtccactaatctaaagaaggtgttttggtcatgtctaccgtgttttcctggacgttcattctcctacattcaattttcatctcccaaactgccaatctgtgttttcctaaatacacttttttttttccgatacaggatctccctgtgttgcccaggctggagtgcagcggcgcagtgaagtattgctgcaacctcgatttcctgggctcaagggatcttcccaccccagcctcttgagcagctagaagtacaggcacacgccaccacacccggctaattttttatttttagtggagatgaggtcttgctatgttgcctgggctggtctcgaattcctggcctcaggcagtcttcctacctccacctcccaaagtgttgctattacagacgtgagccgccgcacccaggcaacactcttttacactattcttctcatctcctacacctgcagtctgtcctacccgcttcttactttaagctgatgaacttgtattttaatatatatctcattaagaaaggagaagcagtcggccgggcgcggtcgctcagtcctgtaatcccagcactttgggaggccgaggcgggcggatcacgaggtcagcagatcgagaccatcctggctaacacggtgaaaccccgtctctactaaaaatacaaaaaaattacccggtagtggtggcgggcgcctatagtcccagctactccagaggttgaggcaggagaataccttcaacccgagaggcggagcttgca

SEQ ID NO: 1241416 - DNA, 4001 bp, Homo sapiens
agagaaaataaatcttactaagagatggaaaaaagtataatcagaagagtgattctcagcaactaacaacaaaaaagaatggctactttgaggtttaaagttattaaattaaaaataattagccaggtatggtggcacatgcctgtggttttagctactgaggagactgaagcgagaggatcacttgaggccaggagtttgaggttacagtgagctatgaacacaccactgcactccagtctgggcaacagagcaagaccctgtctcaaaaaaaaaaaaaattaaagaataaaaacatacatataaaaaaaccaaaattacctctcaaaccatgtttttatactgtgtgcaaatgactcccctggatacagctgattatttcttagatatgaaagaatatctagtagtttatttgaatagttatcatcctttatgtcttttccaaaatcaaagaaagcttttaaagtttccaacataggaacaatatcatgacctagcaattcctgatataaattccaagctgtgtttacatcttgatgaaggagagctccctggatacagtcattatagttcttttttgaaggagttataacttttttgatgtcctctaacagcaacaatgcttctctccatctgtctgaatggatcaatccccggatgagaagactgtaacctctaggttctaaagtcttatatctggctttcataatttcaaagacatcaataacttcagatgtctgcatatgaaagacacagagatacaaatacttgaccagtaaatcgtaacttacaataccattatttttggctgctacccatgccagcagagatttagccacatctatagagctatgacagccagccatctgtgaaatgatccaactttcgaaactggtctttccggtgttttcttttaaatcttccttaagtttatcccactcctctgaattcaaaggttgtgttgggagttgaatagtgttcctcacaggtgccaaggcatgatcttcagtttgagaattcatctgtgatctctccttagctgctccagctaaaaaaaaatgaggaacagaataaacttgcttattactgccctcatctttcctgagatatctggccttggcaatcagattcgttgctttggtattctgtggagacattgttttaagagaaaacaacctctgctggttcctgatgccacagcggtctgccagaaacagcgagacataagagtgccctgggcctagcccaaggtatgggctcttccaaagcttcggaaagcttcgaataccaaacaaatagaaagtcattatgcagtgagatcagcaccagatagtgagagagatgttgaaaaaacccctcttctatggcaaaattaaagagattgggggtcggcggtgcagagtcgaagtggaactttttaaaaggtttgtgtttcttccttacagacaaatcaaggttctgcttttggggctacttaaaagcaagaaggcaggtgagttttctctattaaacaacaatccggggatgtccaacgtcgcaagccgcaaaccaggggacagagcaggaatcctctggtgcctcttacattccagttcatgaacctgaggaaaaagcacaagacggaacgcccagttttactcacgtggatcacagctgtcctgaaaaggaacagattcccacgggaagcttgctggaaagggggtgtaaagccaaaaccgtatccagggacccccaactccagcctaccaccaacagcggcgaaagccgaagtctaggggccctcaccctgcatagctctctacagaccgcaaaactcctccggtggggggacgaggagggaggaggtggcgagtcagctgcgccaacgactcaggaaaggaagagaggtacaggaagggcgctgcctagactgcgtaccgaacgctgacaaatgaagttcacttcattcaacaactcaaagcggcactcagacttaacgcggccataaacgcggcggaaactacagtgcccacgatgcaccgcgccagccccgaccgacggacgagactgacccggacttaggcgttccgcctggcccggcggcgaggaaaaaaggcagttttgaagcatttagtggcaaaaggggtaggagacggctgctgaagtgtctactacattcaggggacctggaaggcttccagatatccgcaatgaacaatgaaaagaaattgtgaaagaaggcgcttccctcaagccggaactaatgaactcctgggtcacgtggtgcgcacgcgccaaaggcacacgataaaggaaaacgcgggcttatcgtggcctttaaaatccggcttggtgagcttgggtcgcctctgaaggagaaccattttccatctctttcatagttttttcccccagtcagcgtggtagcggtattctccgcggcagtgacagtaattgtttttgcctctttagccaagacttccgccctcgatcaagatggtggttggacggccttcctaacctttacggggcctggcggtgctgacgcctgagctggtaggggtggagcaggtaggaaacagcaaatgcagaagctgctgcgcggaagtcggccatggactggaaagaagttcttcgtcggcgcctagcgacgcccaacacctgtccaaacagtgagttttgggaggggcagcccgttgggatggcccggccctaaactcctagaggtaggggggaggtggggaggaggagcaagggggagccgccttttccgcttctgtgaaacctcccgacaaaggaggcggagtggaatgtggtttaaggatcccgataggtttgacccaaactttcctggggcagaatctagaggaacgaaaaacttagctttagtcactgacttccatggtcttaatctaaacttgtgaagaataacttggaaccccggctccaacaacgcctgaaccccaccaggacctataattgtcctcctgcctttttactgtcacgctttttgcttccctcgtaatccattttatatttcataatccatttttccttttatttttctccttcacattgcttattaactaacctcgttaaatctacctttcctattccacacccgcactaagggctgttgaaagtggctggagaaaaacagaaccttggtgagttgtctcacttttttttttgagacggagtctcttgctctgtcgcccaggctggctggagtgcagtggcagcatctccgctcactgcaacctctgcctcccgggttcaagcggttcttctgcctcagcctctggagtagctggaactataagcgcgcgcaaccacggccggttaatttttgtatttctagtagagacggggtttcgccatattggccaggctggtctcaaactcctgaccttgtgattcgcccacctcggcctcccaaagtgctggaattacagacgtgagtcaccgcgccccgccgagttatctcacttttaatacaagtccactaatctaaagaaggtgttttggtcatgtctaccgtgttttcctggacgttcattctcctacattcaattttcatctcccaaactgccaatctgtgttttcctaaatacacttttttttttccgatacaggatctccctgtgttgcccaggctggagtgcagcggcgcagtgaagtattgctgcaacctcgatttcctgggctcaagggatcttcccaccccagcctcttgagcagctagaagtacaggcacacgccaccacacccggctaattttttatttttagtggagatgaggtcttgctatgttgcctgggctggtctcgaattcctggcctcaggcagtcttcctacctccacctcccaaagtgttgctattacagacgtgagccgccgcacccaggcaacactcttttacactattcttctcatctcctacacctgcagtctgtcctacccgcttcttactttaagctgatgaacttgtattttaatatatatctcattaagaaaggaga

SEQ ID NO: 1241417 - DNA, 4001 bp, Homo sapiens
agcagaagttaagtctgatgaacctaacaaaacaaaggaatagattttagtgattttaaaatcagatccttagctttagaaactgtatatgcatgattcaagatctataaactccatataacgcagaagttggaaagacaatttgcatgcaaaaaaagttaagaaaatgtatttaaacatatctgaatgaaagtttttacagttgatatttgggaaaataaggttcggtactgacaataaagtgagattaagcacgaaacattttaaaatataaccatacactattggatgtggacaaactatgggtagaaatatgtatacgatgtaaaggtctaatttaacagcagtactatttgagtgtcaccgctgtatcccccaaagaacagcattacaaaagcgttttgctgtttttgctcacatattcattaatttaatcctcacaattagcagcgaagtgggtaaagcatatgttatccttattttcactgagctctagacagattaagtgaattggaatatagaagccatcaattggcagaagtcctgcttttcccactatgaaaagaaagtagtgaattaggtaaaaagcactactttgggggaaaactataaaaaacactacgtgggggaaaataaagcacattatacaagttaagtgtatccaccataaatataaaaaaaaaaatatgcaaaagtcaatgcaaaaaaaaaaaaaaaaagcacaacaggggacgttaaagtttcattcattccatctattcaaacattttataggcttcctggccattttcccgggaaacagggtcagttttcaaacatctgtacaaactagacttatatcttacgtttgggaatttaaacaaataaggactaaagatttactaaactaaaactggttgaaaaactacatggaatcacataccacgtgatgttccattcaaactagtccccgttccaacaggaagacgtttatttgcagacaatgccggaggaacacagggcaactcatctttcagcaaaaccaaatgatctccatgattttgagaaactacctcacgaagtctcttcactggcatcttaatcttttttttcttctccaagctgacctcagagcctttcatattgttggtcacaaaacaagtcccacacttaaggacggaaaaactttctctgtttccttaagacttcagaacaaaattttcacctctttgcaataactgtttttaaaatgtcgaacatccacaaagctgaaaatctaaattctgatattgaatccaggattagagctgactataaagtcatatttacccattaatcccactcagtctattaatacaccacgccaaaatgtgaaagtggggatgacaagagaatggccacaggagcaacaataaccataacagtgcactccccaaccccagagctggtagggcaaaaccaaacacatgtagtggcgggcttaaaatttgttgagaagaggcagtcaagcaaataaaagcgaaatgctatttttaaaataatgacccacataagaagcgtaatagctttcttcagccacagagtcttacacacccctccagatgcaatcgtcggaaacataaattcacccctacgtatctccagaacgcccgagacccgcaccgtcgtgggtgtaatctgacaacagcgtcagttgcccgcaggtcaacacccacttcccttcaaacccgcccttgagacacaacacgcatgcgcgccaagaaactcacccaaaacatccaaccagaaagctaagcgctctctggtgctcttccattcctctccgggtggaaacaaactccggacataacaggggtttatttatttatttattttaaggtagcacattgccgcacaagaccgctctacagtctcatccaagacttgaagagctcccgacttgtaatactacttgtgtttaccagggactgttgacactgcttcgcttccgaagaccgttagggacgtgggattaggtaaattaggcttccaagaagtttcgacagattcgggtcattattggagaggaagtcgggaatagaaagcgttgtctaagcagaaaataaccgaagttaatccttaggagattttagaattcgctgatggtacctgctttttcttctagatttcctcgcgttataacgaatcggcgtctaagggtttaagtgtcacttgacattactgctcccacgtgttctttcccatctggcggccgcggctcctgtccagaccctgaccctccctcccaaggctcaaccgtcccccaacaacccccagccttgtactgatgtcggatgcgagagcctgtgcttaagtatggtgtctgttctctgccgtgagaatccggggttcccggacggggggtggcaggctacgctccaggaaagtggcggggtctcccgaggaggccgccgcacgtacctggagcagtggggggtgcgaagcgggacagcgcttcgccgggtcgggtgcagaccttcctggagatggtgtcacctgggcgagggtaggaactttaggccctgagccacccccaacccggatctggggagtcggggtcctgttttgggacactgaattagactataaggtatttacgatgtgaccttgagctgcccgggggaagatcctcctttaaatgaaaatcgtctttagacataataccaggtctaacaccccttccctgatctgctcatttcccaggatgcgctacttagagctttccctttacgccttactggaggctttagaataatcaaagcagaaaatgtaatccgatctaaaagctaaataactaattttatttcttttacatctcggcagtctaccttcatagaagtctagacttaaaatggactttaaagtctgagcgcggtggctcacgcctgtaatcccagcactttgggaggccaaggcgggcggatcacgagatcaggagttcgagaccagcctggccagcaaggtgaaaccccgcctctactgaaaatacaaaaaattaactgggcatggtggcgcgcgcctgtagtcccagctactcaggaggctgaggcaagagaattgcttgaacccggcaggtggaggttgcagtgagctgagatcgcgccattgtgctccagcctgagtgacagatcaagactgtcttaaaaaaaaaagaaaaaaaaagactttaagggctcagcgttaaagacccttttaattattatttttttgtaacttgctgagtttctctaatgagttttgtgttgttttttgagacaaagtctcactctgtggcacaggctggagtgcagtggcgcgatcttggctcactgcaacctccgcctcccaggttcaagcgattcttctgcctcaggcctcctgagtagctggattacaggcgcccgccaccacgcccagctaattttttttgtatttttattagagacggggtttcaccatgttggccaggttggtctcgaactcctgacttgattcacccgcctcggcctaccaaagtgctagtattacaagcgtgagccaccgcacgtggccattattttttattttagttacattttctcttcgtaattgggctcataggtggtacttgtttgttcacaatttattgtatattatgagtgtactgaaagaactacaatgtcagagtcgccagagaccttggagatagtttaactcttaccttctaggtgaaacttatgtgaaagaaacagtgacctaagatctgagtgtaggcactctgaattattaaaatgacaacttaatttggatcttacagctctttgtcattactctttagttcctttccctctttttttttttttttccagagacagggccttgctctgtcatgatcatagctccctgaagccttcaactcctgagctcaggcaatcctcctgtctcagcctcctgagtagctaggactacaagcacttgccaccacgctggctaattttttacttttttgtagaaactaggtctcg

SEQ ID NO: 1241418 - DNA, 4001 bp, Homo sapiens
agcctgggtgacacagcgagactctgtctccagaaaaataaaataaaacaaaaagtttggtctgtaactgactgtgaacaatcaattgagataacttattaccttcagacaagctgctgtggtttttccattattgataatttcatcctccaaatatttatataagaattataacattatcggccaggtgcagtggctagcacatgttatcccagcactttgggaggccaaggtgggcagacagcttaaggccaggagttcgagaccagcctgggcaacatggcaaaatcctgactctacaaaaaatacaaaaattagccaggtgtggtggcacacacctgtagtcccagctactcgggaggctgaggtgggaggatctcatgagcctgaggaggtagagactgcagtgagttgtgatcaccccactgtgatcactccagcctgtgagacaaagtgagacactgtcccagaaaaaaaaaaaaaaaaaaaaagaattgtaagaattacagcactattgatgtacactttgtgactattttttatcccactttactgaggtataattgaaaaaaaattgtatatatttacagtgtgatattttgatatatgtatacattgtaaaacgattatagtcaagctattagcatacccatcacttcacataattatctttttatgtgatgagaacatttaagatctactgtcttagcaattttcaagtatacaattcattattattaaccatagttacatgctgtacaatagatctctagaatgtattaaccctgtctaagagaaattataccttttgacctctatcccccactttctccccacccccagcccctggcaaccaccattctactttctgcttctataagtctgactttttcagattccacatgtaaatgagaatacatgatattcatctttctgtgcctggcttatttcacttagcataatgtccccaagagggattgataacaccactgaaaagaattttctgaattctaggtcatttagatttacttaacaaatatcactcaggtaggccaggcacagtggctcacgcctgtaatcccagctctttgggaggctaaggcgggtggatcacctgaggtcaggagtttgagaccagcctgaccaacatggtgaaccctgtctctactaaaaatacaaaaaattagccaggcgtgatggcgggagcctgtaataccagctactcaggaggctgaggcaggagaatcgcttgaacccaggagacggaggttgcagtgagcagagatcacaccattgcattccagcctgggcgacaagagcgaaactcagtctaaagaaaggacaggacaggacaggaaagagggagggagggaggaagagagagagagagagaaagaagaaaagagaaaagcagagcagagcaaagcaagacagaaagaaaggaaggtcactcagtttattaaaatgttcacaaaatacattattaagaagcctgaattaggtgggtgtagtgctacatgcctgtaatcctagcactgtgggaggctgaggcaggaagactgcttgagcccaggagttcaagaccagctgggcaacatggcaaaccctgtctctagaaaaaaaaaaaaaaaattaaaaattaaaaaaagaccctgaaatgaaaacaagtccagcaaatagatacatacttgcaataaggcatttaattaaatactgaaagaaaaaagaaggctagccaatttgctcggtatttggcctcaaagaaaacaatgaaaggaaccactgacaaaactgaagagtccctaagagagtctaagtaaaattggcaggaatacattccatctccagctgctggacttccccgtcgacttttaagggcatcacagaactcttaaacttactcctctttgatatttccccatttctactaagaataacatttttctctcagtctcaaaatgttgaagtcatcttgacttctctacttgcttaccgtctcatacccaattgaatcataaagagttgtcaattatttcatcacaattgcatgaagagtgtcatagaattatagagctgagagaaacttataggacatccatcctaatttcctaattttatagatgaagaaattgcagtccacagaggtcacaggatatcctaatttcctaattttacagatgaagaaatggcagtctggccaggcgcggtggctcacgcctgtaatcccagcactttgggaggctgaggcgggcggatcacgaggtcaggagatcgagaccatcctggctaacacggtgaaaccccatctctactaaaaaatacaaaaaagtagccgggcgtggtggcaggcgcctgtagtcacagctactacggaggctgaggaaggagaatggcgtgaacccaggagttggagcttgcagtgaaccgagatcacgccactgcactccagcgtgggcaatagagcgagactccgtctcaaaaaaaaagaaagaaaaaaagcaatggcagtccacagaggtaacaggatttacttgatcactgtcatagaactatttattaagtggtagagttagggcccaattcccagaggtcttaccatgacaccagggctttttctctcagtttggcacatttcccttctcacttctctctctcaaccgtaaggtttcatcacctattactaactattccattcttccagtttctacttgcttagaaacttcctacacgtcaccattcaaaaatctaaaattattccttataaacaactgaattggctaatttcctctgtttggctttccatacacgaggcactcctcactaactacatataccatgccatgcccacaagtgactccacactttgcctcactctgctctctcacccttcttccacccaacttattacatccttctcctcctttaaggtgcaatgcaagtactaccttcttcaagaagcctgttcttctagcacttcctcttgatctctcccttcattaactccttttgcatttactacctatcaacggaggcttgctacttagccatcccagggtttaaatatctgtatgggacaatttaataatatattgaatgtaattaatcactaattcttccatatatatacatattatctccccaattaagctgtaagcaacctggggttgggaatggtagcaggacttctttcataccaaacagcaagtaacaaagggttaggtatgtagtaagtgctcaatatatatatttaaccaattgaggggtagagtatgaaaatataattcaggaattccttatttttaaggtttctgcctgaagtctgaaagtgacttacctttgcccaataagagaaacattataaggctagacataaatttctttataggcttttaaattttattttttccaattattacattaataaatgctcaatgtggcaaatgtaaagagctacgacatataaatgtcaaaaaaatgcacataaccctcccattaagaagcaattatttcattctagtcttcttttttagccagtttttctttattcttaaacccactgaacatcccaatgctatgctgcaactattctcaccaaagccactaagaatcctgcttgctcaattcagtgtatttttcagtacttagcttccattacctcggagcagcatatcacacttggaacctaattccccttggctttgttaacaccataccccctacatctctggccaaactttctgagcagcatttagaagctagcttgctttctccacatactccttaaatgtttggttttctcagaatgcatccagccctagccatctctctttcactatcataacctcattgaatcacttcaactattcccagagcttagacttagactaccacttacataatgatgacttctgcatcttaatttccagcttggatcccttttgtgaacttggcctttttttttttttttttttttttttgagacaggatctcactgtcaccca

SEQ ID NO: 1241419 - DNA, 4001 bp, Homo sapiens
acttattaaactgacaatacataggtcaacactatgattagccgtcaaagtctgattagatctcataaccaaaacattgtatttatcaaatactttcggcattataaagttaagatgataatttcatgttattcttaaagaacctcccttctaagaaaaccaaaaccattctcacaagtgttagaatgacatgcaagcacacctcacattaaagaaaaattgtactgttagttgttccttttcttttacctaagaacatgttaagtctctgggcaagaacaccttttccctgaatagtaagagagtttcttttcagttatcctatctctttcagcggccattatcttactaataggtatttttgattctagggaaggccttttgtttaatgtctcaaacaccattcaaagtcacaattgtagtatataaaacatttgttttggtaagtgatatttaaataaaaacaaggcatgctgctaatcaaacataatttaagaatgcattatttgacaatactgaaaattttaacgtgagcataattaagaatccttttgcttacactttctgacaccatgggattttctaatagaggctggtaacaatttctagcagaagttaagtctgatgaacctaacaaaacaaaggaatagattttagtgattttaaaatcagatccttagctttagaaactgtatatgcatgattcaagatctataaactccatataacgcagaagttggaaagacaatttgcatgcaaaaaaagttaagaaaatgtatttaaacatatctgaatgaaagtttttacagttgatatttgggaaaataaggttcggtactgacaataaagtgagattaagcacgaaacattttaaaatataaccatacactattggatgtggacaaactatgggtagaaatatgtatacgatgtaaaggtctaatttaacagcagtactatttgagtgtcaccgctgtatcccccaaagaacagcattacaaaagcgttttgctgtttttgctcacatattcattaatttaatcctcacaattagcagcgaagtgggtaaagcatatgttatccttattttcactgagctctagacagattaagtgaattggaatatagaagccatcaattggcagaagtcctgcttttcccactatgaaaagaaagtagtgaattaggtaaaaagcactactttgggggaaaactataaaaaacactacgtgggggaaaataaagcacattatacaagttaagtgtatccaccataaatataaaaaaaaaaatatgcaaaagtcaatgcaaaaaaaaaaaaaaaaagcacaacaggggacgttaaagtttcattcattccatctattcaaacattttataggcttcctggccattttcccgggaaacagggtcagttttcaaacatctgtacaaactagacttatatcttacgtttgggaatttaaacaaataaggactaaagatttactaaactaaaactggttgaaaaactacatggaatcacataccacgtgatgttccattcaaactagtccccgttccaacaggaagacgtttatttgcagacaatgccggaggaacacagggcaactcatctttcagcaaaaccaaatgatctccatgattttgagaaactacctcacgaagtctcttcactggcatcttaatcttttttttcttctccaagctgacctcagagcctttcatattgttggtcacaaaacaagtcccacacttaaggacggaaaaactttctctgtttccttaagacttcagaacaaaattttcacctctttgcaataactgtttttaaaatgtcgaacatccacaaagctgaaaatctaaattctgatattgaatccaggattagagctgactataaagtcatatttacccattaatcccactcagtctattaatacaccacgccaaaatgtgaaagtggggatgacaagagaatggccacaggagcaacaataaccataacagtgcactccccaaccccagagctggtagggcaaaaccaaacacatgtagtggcgggcttaaaatttgttgagaagaggcagtcaagcaaataaaagcgaaatgctatttttaaaataatgacccacataagaagcgtaatagctttcttcagccacagagtcttacacacccctccagatgcaatcgtcggaaacataaattcacccctacgtatctccagaacgcccgagacccgcaccgtcgtgggtgtaatctgacaacagcgtcagttgcccgcaggtcaacacccacttcccttcaaacccgcccttgagacacaacacgcatgcgcgccaagaaactcacccaaaacatccaaccagaaagctaagcgctctctggtgctcttccattcctctccgggtggaaacaaactccggacataacaggggtttatttatttatttattttaaggtagcacattgccgcacaagaccgctctacagtctcatccaagacttgaagagctcccgacttgtaatactacttgtgtttaccagggactgttgacactgcttcgcttccgaagaccgttagggacgtgggattaggtaaattaggcttccaagaagtttcgacagattcgggtcattattggagaggaagtcgggaatagaaagcgttgtctaagcagaaaataaccgaagttaatccttaggagattttagaattcgctgatggtacctgctttttcttctagatttcctcgcgttataacgaatcggcgtctaagggtttaagtgtcacttgacattactgctcccacgtgttctttcccatctggcggccgcggctcctgtccagaccctgaccctccctcccaaggctcaaccgtcccccaacaacccccagccttgtactgatgtcggatgcgagagcctgtgcttaagtatggtgtctgttctctgccgtgagaatccggggttcccggacggggggtggcaggctacgctccaggaaagtggcggggtctcccgaggaggccgccgcacgtacctggagcagtggggggtgcgaagcgggacagcgcttcgccgggtcgggtgcagaccttcctggagatggtgtcacctgggcgagggtaggaactttaggccctgagccacccccaacccggatctggggagtcggggtcctgttttgggacactgaattagactataaggtatttacgatgtgaccttgagctgcccgggggaagatcctcctttaaatgaaaatcgtctttagacataataccaggtctaacaccccttccctgatctgctcatttcccaggatgcgctacttagagctttccctttacgccttactggaggctttagaataatcaaagcagaaaatgtaatccgatctaaaagctaaataactaattttatttcttttacatctcggcagtctaccttcatagaagtctagacttaaaatggactttaaagtctgagcgcggtggctcacgcctgtaatcccagcactttgggaggccaaggcgggcggatcacgagatcaggagttcgagaccagcctggccagcaaggtgaaaccccgcctctactgaaaatacaaaaaattaactgggcatggtggcgcgcgcctgtagtcccagctactcaggaggctgaggcaagagaattgcttgaacccggcaggtggaggttgcagtgagctgagatcgcgccattgtgctccagcctgagtgacagatcaagactgtcttaaaaaaaaaagaaaaaaaaagactttaagggctcagcgttaaagacccttttaattattatttttttgtaacttgctgagtttctctaatgagttttgtgttgttttttgagacaaagtctcactctgtggcacaggctggagtgcagtggcgcgatcttggctcactgcaacctccgcctcccaggttcaagcgattcttctgcctcaggcctcctgagtagctggattacag

SEQ ID NO: 1241420 - DNA, 4001 bp, Homo sapiens
gtctgccagaagagaccaagacacccccctagatgaggaacctagaatccaccagggactagtatcacctgcagccctctccactaggacccctggcctgcccgtgaccaggagccccctcccctccacgagtccatgccaggaccatggccccagggccaggcagcatcagcagtccaagcccactccaagaatgaggagaccagctcaatcttaatgcccctcctgtctctggcgtgtttcccctaatggggcagcaagatgggcctttagctctggctggccctctccagggggccctcaagggtctcctgctaccttttaaactagatacaggccactggggcacagagtatggccaaggctgcagcctgtccagagcagaggacagggcgggtccagccccaccccaggacaggcccacaggcgcctggcctgagccagagagaggctacagcaatcctatccctcgccgagactccagagagcccggagacggtgcccaggacagaaaccagactggtaccctgccccaccctgccctgccccagacagggcagtcagggtctcagctcactccaacccccacagcccttagagaactatatttagattcaatggggattatgcggacttcccaggaactctttcataaaggctgaaggcccggcagcgggcttcctctggagacccccacccgcccccagcctttgcaaacttccagcatgcattgttcctggaacaatggtccctgctccctccaaagccggcaggcccactggctggaaatccaggagaacccctcccctgcaagcacctgcccctggggctggagcctggggaacccagagggccccgactcaattccccatgggcggccactgcctcagtctatcccaggaggtatgggacaacagttcttatccttgaggctgggagaggagtaggcagggaccccccagctgctgtggcccaccctttcacctgccaggccccccggccccaggtatgtaatttccagacacctggctgggggcccaggtgccccaagggccacaatgcaccaaataacctctccctgctggtagggctggagctgtcccgccctgggtggagtccctgccatccgctctctcccctcctcctcccacacaaacctgcgttccagctgtgggacatctgggctgggggaggaacgccagcccaggcccctcccatccgaggcagcagggcccctcgggctgagctccctagctcacacatggtgttacagaccgggaaactgaggcccgcagaagggaagtcctggctgataactctttgtggaaacagcagcagggaaggagtggaaccctgcttccctccaagccccaagttctacccaagttcggcgtggccctgctcggaggggtcggcctaaggaagtgtcacttacccggagggtggtcccgggcccgctgaccagcttccacgcctgtcgcttgagctccaccagcttcgtgtggcagtggcggcaccagccgcctccgccggccgagtggccctgctctgggccggccccggcgccttcgggagcagggcggctgccgcatgggtcctggtcgggcccggcgggtagcctctttcggggggacacctccagcagcggcggcggctcgcgggccgggccgccctcggccacctgcagggtgtgggggcggaagcggacagtgagcctgggacgtccgtcggatccagacccctgcgcgccctgccccagcgtgacgctcttgccaaagttaggagccctgggcacgaccctggcgctcacccactccctccatccccggaggtcccgcctgcgggtccgctaccctcagcaggaggcccggcccccagggatccagcgcacaccgcgagtatcttcgccgtcccgggcccccgccgcccgcctccctctccaggccgggccgcgcgtaccgcgggctgcgcagcgcacagagggacgccgcggccgaccatggccggggcgcgggaagagcccggcaggcgctcccggccacgctggctctccgggggcgccgcggctacgtgatccggccccgaggcgcccccatggcccggcccagccgctcggaagttcgcagagcctgcgagtgtcgcgaggagcgcggtggctccggtgggcgcgctcgggaggcgagggcggggccggggaagggcggggctcgggctcccggggcgggcggcgaggggcgggagcccagagagtgccccgcccttgcccagtgctgggcggcgcgtggggggggtagggtccccgcttccccacgcggccccgcgcactccaaggaccccaacctgttaggtgagtccctgccccggggaggggcgctgggggcggcggcgaggatctagttgcgcgcgcgcatgcgcctcccgcccctctcccgggacaccagggctgcgcgtctcccaggaggcgccgacgcccctccctctacaggcgggaaaactgaggctgcggaggggacgctcttgcccaaggcccacggcgaggtgggccgaggaaggggcgggaccccggccccgagactcccaggcgcctttccagcaagcccagcgtactctgcgtgtcgcgggccactttaggtctaactgtcgcgcgtgggttagtgtcgccgcggtgtgcgcctcgagccgggcagcgaccgcgccggcgtatctgtgcctcggcgcgtctgcgaacggcacgtgtctttacagccgcgcgtgtgcccgcaagtgggtgtgcgcgccgtgccgcccgggaagcgggaggtcctgcgggcgtgcgccggacctgttgtcagcaggcctggcagatgggaactcagctccggaattaattgcttgtttgtctccggctgggaggccgcccccccgcccttccctggcgaccagttgctctgtgcctagccgggccccaaatgtcgccggcatccgcggccgcaggcagctccgggccaggctccgggtcagccccaaagcccgggtcaagccaggcgggcgcggcgggcgggctccccgtgacgcgagtgccccctgccggccgctgcgcacacggctccgagactggggagacagcgccgcgcgtcccaggcctgaggcgcactcggaaactccgaaggtcgtgacccggcggagaccaggacacgcggctgccggcacatacggtgaggccttcgcagagactcagtacgtcaaagtgaccctttccgttttgcccacccccttttacttggataagcctccccgcccacgcacgcactccccagaaagtggggtgggtgatcccctcccggctttccgggtcgttgatgaccttaggggttcgaaaacgcaagggggtatggaataaagtggcaggggctctccactctttctgagatccgtaagcctgcagtcgctttccacccagcctggggggccggaagcgcttcccctacccgtctcttcgcagcctggagaatgaaaacgggcgtcagcccacatctggatctgggtactgaggacaacacccaaaccccaccccgcactgccggcagacagcaccgcctcccgccgctccactgctccgggacacacactctctatatcccgtccccccacccacacacgcaacacagaagcacgcagcggtcgggagcaccggtcctgcgcccctggccagccacacccgcaacttcagcgcttctaccgccgcggcgcttcgggaagcacaagctcacatcccatatccgcagaacacggggtgcacaaggctggagtcacctcgggggctcacgatcagtcaggggccccgaccccctacttcgcccatcctagcaaggcgcaaggtgagcccgagaatccctgcgctgcgctctccgccctagccacagcctccgggtgggtccggttgggacacagccttgaaggcagagggagacttggacaacgctaatgggggaaagtgcggcagcgagtcccagcccgggctg

SEQ ID NO: 1241421 - DNA, 4001 bp, Homo sapiens
gaatggcgtgaacccgggaggcggagcttgcagtgagccgagatcgcgccactacactccagcccgggcgacagagcgagactccatctcaaaaaaaaaaaaaatgtgtaagtttaaacgactgcagttatttgctatgaaatactgaagatactgtgtgcctctccccagtgtcattccctccccccttgctggagataaacgctgtccagagtcctgtgcatgtctggatgcttttctctaagacaatgccaaggctgcagtagggttagaggttaccacctgggtcctccacagcactcagtgccagacagggctgccaggctcaactgcaacatgatgctgcattctttgatgacttggagagacactggctctttagagtgcctaccctcccacacagaattccatacaagttgaaatatacttcatacttagtatcattgtattcctacaaatatttaggaaacagagcaataggtcaaatttctcaccataacaggcttgctgacaatccctgaaagaagcaaggccatgtctgtaatataacttcaggaggttcttccagttttctaaagtgtctttcactaaactagtgcaatgtattccgagctgattctgatcaatggcttagtcatgccgtaccaaaaaaaaaggccttgggatttaactaatgcaaagaatcaaagctctaactgcccttttacagaacacctgaaatagtatatctcaaattttttgttctcacatttttaaaaaacatcatttttgtaagtattccttttcaaacgcttaatatgtaaattcttaattcatttaaataataaaacagtaacaggcagcaacaattctaatacaaatatacctagaaatgacctacaaatgttaagttataaaaccatccactccatcacgcattaatttcactacttttacgctttattttaattttcttaaggaaaagggtacacccaattttacatggaaaaagcattccaggacggaggctgcttcaagtttagttggagcaacgccagcctaggtgaacagggtcgcctgaaacgtttcgcatctggttactgaaaataaggggtcgccaaggaggcaaagcggagccagctctcgggagggacccggccccccgccgcccgcgagaatgacaggcgcgtccgctcagggcggtgccgggagaggcgggggtggaaggaagaggaggaatcggacaaagccagccccgccgggcctccggcctccccgcccgccgcgatcccggggtcagccacctcccctgtcgcgggttcccggggtccacagctgtccccgggaacggccgccgccgcccgcagcagggccaagccggggatgcggggccagggcggggccctgggcagggccggggaccggaacctgcagtgggacgcggatggggaggacgcgcggcgccgggagccggggctggcaaaagggccggggacaagaacccgacctgaacctggaaggggtcgcggaccggccggggcggtgaactggggcgggtaccggggtgggaacggagaggggccgggacccaaaccgggaaggaggcctggatggggacagagttacggccggggcgggtccgaagaggagcgggacagggacggggcggaggatgaggagggggccgcggtccggggcgcacgccggggactcaccgccttgctcctgagggccgcgctctctcgcgctgtcagcacctggagcgccgccgggcgcgcgcgcggagcagcgactgtgcgccgagcccgcctcggctgtgtgaggcacggcgcagcagtcaccagctaggggcgccggagctaccgccccgcagcatcctcggccacccacgcgctgtccccttggccgccgagcacagccccgcggctcctcgcaccagcagcccagccgacccagccagtcccgctcggccgcctgcgccgctcccgccgccgaaaatggcgtctcagtgttgctccccccggcgccccgcctcgccccgccccacaatgccgcgcgccggcatgacgtcatcgcccctcgccccgcccggggctggggaaactgaggctgggtggctccccgcaagcgctcggcgagctggggactggaggggcgagaaagttgtttgggtatcaggtgggcggtcacagggaggagggtgacggtgcaggacccagcgggcctcccggttgtaacgcggacgggggtggggcgctcggggcagggcgcggctcgcggggtgggcggccaggccctggcctctccgactccgcagccgcgatgaccgagcgcttcggcagcttcccttccagccggactgtgggccctaccagaatgcggccggggacggtgcaggcccggccgcagccgccaccactgggctcccgccccaccccactcccaggcccgcgagcttcatgcgctcgtttcggtccccccaaaacccagctaggaggccttcgggaggccccggaatcagatgatcccggccaggcctttctccctcctccaggaaaaccgacagcctttggtcgagaccctgacctctaaccctgcgccctccccttctcattattccctctcctcggggcttttggaccctcgtatctgtacgaggaaactttccaggcgctccccctcgacacaaactgcgcctcagacgggcaaaggggaagggccggggtgtagactgtgagggtgggagacaacccccctctgtccccacgcagccaccggcgcatctccctggctgcagggcctcgacctccagcccggcctgaagggcagcggagcgcgcctgggtcaagtcctgcggcttcgccggctccgcaggcctgactcagcagccagccgggagggcatgctgattcaatgggcgaggctccgctcgctgctgccagcggcttgggaaaaaccctcccagtgcctgcagacgtcccaagtgcggggcccggaggcatcatttaacctggaggggttcctgggccagtcccccagccccatcttgtgaactgctgttcctttccgatgttatcacccagcaccagcagccctttgtgaaccctgcagttaggccccgcagtcaccagagaagcaagtgctcctcggtttttccagggaggtctggttacttttatctcatttataaagacaaagggggagctcctaggtaacacggtagggttggcccggggagaggcactgagtcagggtcaaacaaactttctccataccactttcaggttagtgatttcagccagactgcagcttggatgtcactaagttcagccactgggctgggcaccgccaagcatcgactgctcattctttctgtgccgctgcgcccagtaactgtcccctctgctcacccacaaccctagccagaaacctgggatgcctgcaccgctcccttacgccctactacaacaggtggaaaagattctacttcctcaatatttctttgagttagggtatctttgtcaccctgactggagggcagtggcaatcagctcaccgtaacctcgaactcctgggctcaagagatcctcttgcctcagcctcccaagtagctagggactacaggtgtgcaccaccactcccagctaatgttttttaaattttttgcagagaggagatcttgctatgttgcccagactgatctcgaactcctggccacaagtgatcctcccagctggcctcccaaagtgctgagattacaggtgtgagccaccatgcccggcctctcagtatttcttgaatccatctccactgccaccactttgttctggctttattaccttgttcttttatttcctcaataaatatttgttgctctcccatgatcctcataacagccaaggatgcataggtgaacaagatagataagatctctgctttctaagagtttacattccagtgaggagaagtaggccataaacacataaggaaataccggatcttgccgagatgatggaacaggc

SEQ ID NO: 1241422 - DNA, 4001 bp, Homo sapiens
ttgcatgttacagagaaatattttgtgaaaggaaggctcaatgtggcaaacttcattgtcttgtcttaagaaactgccacagccactccaaccttcagcaacaaccaccctaatcagtcagtagccaactacatagaggaagaccctccatgagcaaaaagaatacaactcgctgaaggctcagataatccttagcattttttagcaataattttgaaattaggtatgtacagttttttgtttttttgttttgagacggagtctcgctctgtcgcccaggctggaatgcaatggcgcaatcttggcttactgcaacctccgcctcccgggtccaagtgattctcctgcctcagcctcccgagtagctgggattacaagcatccgccaccatgtccggctaatttttgtgtttttagtagagacggggtttcaccatgttggccaggctggtctcggactcctgacttcaggtaatccacccgcctcagcctcccaaagtgctgggattacgggtgtgagccaccgcgcccagccaggtatgtacattttttttttacacataatactattgcatgcttaacacactacaatgtaaacatgacttttatatgcactgagataccaaaaaaattcgtatgacctcgctttattgcagtcatacgaagtattctgcaatacttcgaggtatgcctgtatgttggtcatttcaatatgattcagtcacgttacaggtctgtcacataatggtagggagacagaagatgtaggttctactatcagtagaacttccagatggcttaagaaaaaaaatctgtaaactaagagggttggcatatagtattcctgttttccagctttaccattcttgcttctataattctgtgattatggacacacaacacacacatacgctcaaacctccattgtagtaagaattttaaagcataatatttcttagcatattattgctaacatgcgtctattttgagactagaaaaaatagtcattagtaaagaaacgccactaaaaatagcttagaaatatttaaaatgcaagccaggcacagtggctaatgcctgtaatcccagcattttgggaagccaaggcgggcggatcacctgaggtcgcgagttcaagaccagcctgaccaacatgggaaaccctgtctctattaaaaatacaaaattagccaggcatgatggcacatgccggtaagcccagctactagggaggctgaggcaggagaatcgcttgaacccggggcggggggcggaggttgcggtgagctgagatcgttccattgcactccagccctgggcaacaagagcgaaactccatctcaaaaaaaaaaaaaaaagaaaaagaaaagaaaataaatatttaaatgcttcagtgatttcgatattttatttcgaatcgcgccgtgggaataaggaaatatatacaaaatgatacagcacggcgtcctcgggtccttctaggtctgcgccagtatttaaggataataattaatcgcgctgtaactgcctttgcattgggcaaaccgtggttactgaattgctggcaaagaggggcggagagtggtaagaggcccggagccgggtctgaggctttaatagaagaagcaacggcgggacgacgtcaagccctggcgcggctgtgggggcggcggccagcggaggggctggggggctgcaggcgccgggcgcgccaggcctgggccgcagcctcgggagcgggtgtggcgggcgctgcgtccgctcaggccgagggtctcccggcgcgagtctaccccgtcccgcctcttccccttaccacgtagcccccccacacgtagaggaagtttccgtccaccacggcgcagtggccgctgcgttcctccgccacacagaacagctgagagtccgccattcgcgccgtcgctggcccgccgcttgccgcgccacaacccctgcccgcccggcggcctcgcctccagccccgactgctccacgcacgaacggaacgcggcgagggtcgagattggtgggaaggcggagccagtgcgtctgcaacgtcccgcggctctcgctcgggaagtcgagccaggggcggcgcggctgtggagggacgttctggctcctcgcagtgggcaaggggcctgggctttccacgcgcagattccttctctcttggaattgtgttttggcagtacagcctcatttagtagtcagtctgtagtcagattccttgattatctcaaaatgtcttttctatagttggtttgttcagcaccgtaattcgttgttaacgcctcttaagactttacgtctgttttactctagaatagcttctctcccttctctcttgtgccatttgtttgttatatggattagttttcttattttcctacagccgtaccaccttctgggtttggttcctcagtgtcttttctcattaacttgtgcatcctttccccatacttcttttaggctggaagctgtatctaaaagctttattagattctagttcagatttttttttggaaaatacttcatattgcatcacattagaaggcacttaagtctggtgcactttaatgatactttctattgtttatttttgactatacaaataaacagagtatctgctccttttcttacacaaaaggaagtatatacagtgttccttaactttctcttttcacttgacgatccatatcaggatacagcaagcagtctcctcagtccttttcatagcttcatagcactccaccgattggatgtgtcatagcttattcaaacagattcttattgatggacatatcggttatttccaggtttttttggctatcataaataatgctgcgatgaaacgttatgcatatgttattttgtatttgtacaagcctatctttggagtagagttctagatgtggaattgctgggtcagaggataaatgcatatttaactttacaaatgtaactggattgcagtggctcacgcctctcatctaagcactttgggaggatgaggtaggcggatcacttgagctcaggagtttgagaccagcctggccaacctgggcaatcccgtctctactaaaaatacaaaaattagccgggcgtggtggcgcatgcctgtaatcccagctacaaaggcaagagaatcgctttaacccgggaggtggaggttgcagtgaaccgagatcgcgccactgcactccggtctgggcgacagagcaaggttccttagaaagaaagagagaaagagagagagagggaaagggagagagaaagaaagaaaaaggaggaagggagggaaggaagaagggagggagggaggaagggaggaaggaaggaagaaattcaagatagacaaaagtgatctatgataatagaaagcagaaaagtggtcatttgggagtagggagggggaggggactgatggaaaggagtacaggaagtgttctggagtgattaaaatgttctgtatcttgattgaggtggtggttacatgggtgtatacatttatcaaaatgcattgaactgcatacagatatgtgcattttacttagtgtaaactatatgtcaatcataattctcactccatcactttattgttactagtaatattggtattgtatttttgaaatggagcatttgtcctcctggactgtagagtctggtggagtctatagaccagcaaacagacaattaccataccgtgcagtaagtgtgaaaatagcaaaagtccagggcaccttgggtgtacagaggccctttaactcagattgagggaagacagggaaggttcctgagagaaagtaaagtctaagttaagaactgaatgatgaacggaagttgttcaaggaactttcattcgtgagagggaagagtcaaggatatgcctagtttaccagcttggtcactgggtgggaggtgggtggagcccttcgctaggttattgaacatgggaggaggaacaggtttgggggagggcagggctaatggtgagttcat

SEQ ID NO: 1241423 - DNA, 4001 bp, Homo sapiens
ttaggtagcttagaagtgtcattgacaggtttctccaggggaattaatttacatttttataagggtgactacatgcttgcccccccgccccccttcttgcaattctctacccctttctaaagtatttttgagacagtttccttcttgttgcccaggctggagtgcaatggcgccgtctcagctcactgcaaactccgcctccctggttcaagtgattctcctgccttagcctctcaagtagacgggattagggcgcccgtcaccacgccaggctaatttttttttttgtatttttagtagagacggagtttcactatgttggccaggctggtctcgagctcctgacttcagctgatccacctaccttggcctcccaaagtgctaggattacaggcgtgagccaccgcgcccggccccctttctattttctaaccacattcattggaaactggggaaaacactgcagattcattaggattggcaaaaaattacttttgcagttaaaccaaaataaagtatcaggacagccatctttgaaagctatctcaaaaatggtcaactatgatcaagtcagctgtaccataagctaaaaacaatcacaaagcaagtcatccaaggcacgggcgtggggagggcggagaacattttcaagaccaaagaggaattttgtggtaggactggctcagagccatcctagcaaataaaattctagatttccgaggttagcagggtaaagaatggcaactggctttaaactgctaactaatcacgttgtttataaccaggggatcggagagtcaaagagctgcactctgtagttcatttgatgctggggattttttggttactggtggagcttttccattatcttaataggggtgtctgctgaaaaacttcaacccagctgaagccagaaggaaaacagtcctgatggccatttgcacaggcgggaaggctgaataaggtggttcctgtaaccttttggaattccagttttcctacacctcggcctccctgtaagtgggcagcggttcccagctccagagggtgaagtcctcgtaggccgtcctcataacgcgtctgagtgatatcacacaccgtcacctttcacaccccaacccttccgaatgcaccgcccaagcaacattaacagggccttccccggaataacgctccaatggcaacaacgggggtgggagtgagttggctttgtgagcaccagggtgacatgacagcagccctggaggttcgagacgggttggggtactcgagagaaggaagattcccgcgcgcaaaaaaaaaacaaccaacgggcagagtctgaggtggggcgcgcgacgcaggcggggagcgccctcggcggcccgctctggcctccccgcctggccgcgaacgcagacccgagtcacagccgagcgacgtccgtcgcggcccggccactcactgaccttgtagccgccccagacgaacatgtggcgcccgtcgctgacggctacgtggccgctgcgctcagcggggcaggcaagctccatggactcatagctctcgaaggctggcccaggcaagtcgtcagcccgcagatcctcgttgccatcagccatcttgaggctgcacttttgctaaccaacaatgcccacacccgcgaggggccaaaaaaacaaaggaaaaggagagaaatgcacagcggcgcgaggcaaggaaaaggcggtggcgaaagggacggcgttgaggcctctctgccgcctgcgctcgcgtttcccagcctcctcggccgaggacggctctccgccgccgccggggcacgcctgcagacagaggggccgcgagcggagccgggcggcggcggcgcgggcccgggactcggggcactgcagggaagcggtccgcgtcgggccggctccctattgcagcccgtctgccccgcctcctgcagtccacggccttgtttacgccgcggccggaagccgcccgttccgctgacgccgcccgccgagctccggaagcgaggctgccgctcagcgcccccagcgccgggtcctccagccgccgccgccgccgccgccgcctctgcccgcgcctccgcctacggcctgggcaccgcagatctatggggcccggcgacttctagtcgcgcttcgagtctcctttcactgagggaaccacagggataatgtcctgaatcggtccctgaaagctgctgaattttagccggattgccgcaattttttttttcttcccgaggatttctattcgtttgattgagggatgatctcagagggttcacagcccgggcaggggcaccagaattgctccactagcaagtttctggtctcgccttagagtcgatgcaggccctgctgttctgcgggcgcgagggcagtcgcttagctctcacgtggggcccagcccgatccccgggggcctctcctgagctcctgccgcccctgccgggcgccgcctctgcgggaatctgacgttgccgccgccgccgctgccgccgccagccgggctgcagagttggcttgaaaagcgtttccgaagccgtaaccacccttttcttcagaaagaaaggcggatccttttcacgcacacacagctttctcttatatgatacctttcaattgggccaaaagaaaattacgagttactgtgcttgatacctcacctgtaaaatagggtgggacaaaaataatcttaaattcttgatcttacagtgcctgtagaatttatcgtgtttggtaggagggacgtgcttcattatctccatttccctcatcttctggttgggagcactccatagaaaaggaacactttgaacaataaaaggctttttttttttaattattaaaatgcttatagcctgccactcctcccctagtgtgccagtgtgtttacttgaactcaagaacttgaaagttacttaagaggattaattaaagccttcaacaaggaagcaaatcaccttgaggctgttaagaccttatctgccatccaccctggttggtgccctcaaatctgtctggttcacagaattccttgcagcagtgtcttctcccagtcgaattatgctcactagactttggggttatcgaagttccttgtgaaccaacctcgtgaatctgatcgagtcacttaaaaaccttgagctggctcccgtcgtccttagtagaatccaaaattaatatctcggctgggcgcggtggctcacgcctgtaatcccaacactttggaaggccgaggcaggcggatcacctgaggccaggagttcgagaccagcctggccaaaatggcgaaactctgtctctactgaaaatacaaaaaaattacacaggcttggtggccggcgcctgtaatcccagctacttgggaggctcaggcaggagaaactcttgaagccgggaggcggaggttacagtgagccaaaagggcaccattgcactccagcctgggcaacaagaacgaaactccgtctcaaaaaaaaaaaaaaaaaaaaaaaaaaattcatatcacagtgctgtgcaagaagacccagcatggtccagacccagcttgcctttccagcttcaattcctggctgtgtcctccttccagctacattacccttctatcatcgtttttgttttttgtttgttcgagagaagtctcgctcttgtcccccaggcttgagtgcactggctcgatctcggctcactgcaacctccgcctcccgagtccaaacgattctcctgcctctgcctcccaagtagctgggactaaggcacctgccaccacgcccggctgatttttgtattttttagtagagatgggatttcaccatgttggccaggctggtctcgaactcctgacctcaggtgatccacccgcctcggcctctcaaagtgctgggatcacaggcgtgaggcaccgcacccacccagcctatatttcgtatatatatgccatttaataaaatactataatatccactttgatttacttatttatgtttcaaaccatacttt

SEQ ID NO: 1241424 - DNA, 4001 bp, Homo sapiens
ccacaaaataactctaaaagataatcagtaagacgtgatgctgatgaagtcccatttcctaaatatccactatggagactaatgcctcttctaagtcttcaatcaaagagacaaaatgtaacagataaaaaataaattgcaatctgtaatgtatagtgatccacagggatctaaaaaaacaagaatcaaaaggaagactcatcttgctttgttcccaggaaaagggcatgataactgcttaagtatccacgtctctcatttaagactttcgaagttccttttctgtgattccatgattaccacacaacctctagttattaacttggcttcccaagttcttggatacaagaaagagtgcactggattttcaacttgaaaattctgatccaacataaactggcactgtaatgtgtacatcattgtctaggttagtttgaactgggttcctcaagtctgggcaatacatgactagaagtctacacatttgagcttcttaggttggaactgtgagaaccagacactttctcattgacaactgctacaatcatttcttgtttttcacctccctgtctttaacctgtccctaaaatgaaacatgctagctaaacctaatttaggcagattcatttaaacacgaaaatggctcattaaaaccaaagtaacagcctagaatttaaaccaaaacataggatgtatatttacacagcctcatttacattatagtctattccccacccccacccccccaaaaacaaaacaaaacaaaactgatattcaaatcgtactttaaggcaaaaatccagaaattatttttgcacttgcatcagctgggagcattatttataaagctgtttggcatatgtgactcatttattccaagactttaaaaagtatttaagagaaatcccacctggtacagagcagggtaggaatacttgcatttgaagtgcataaatttgggtcttcaaatgataacttagacttttcgcacgagtcattcaaaagtaatagtattattccttcaaaaaaaaaaaatatctcttccacactccaaagcattcaggctcacactagacactccagctcttccactgtgtccgtttaagtatcacttatgaggagaaaatgcacacaaaattctcagttcgcctaaaataaataaatgtctactatcattcctaaatccacaaggcagaattctcttagaaccatgatgccaagaacttccaccgcaagtgaaattgtcttcgcaatctctgtctctaggagactgaaaggctgcagagacgcttgaggatcctgcagggaggctagggcggcagacggagggggcggaggttaggggagagtcccacagaggaactgcattagaaggaaagattttgataacgtctaagggagaggcggttagctacagggggaaaaaaacagacctatttccatattatgtacgttgtaaagaaaacgcaaagtgatgagggtaaggaaacgttgccaaaaacaaacaaacaaaaacaaaaaaaaattaaccctctgcggccggagggttaagagaagtcgacaaaaggagaagggggaggcgaataaaggccccaaagaccaggaattgaaaaaaaatacccgatttgtgagcttggccgtggtccagatcttctgtcctgataagcagatggcaagaggaaaggatcgcagttactcagggtggtagagagtaacgcgtttacaagggtgacgagccctgcacaagaagatgtcgcctctctttccacctgctccgctcagtcctttgcctcttactctagcaccagtggcattcgggcaaaacactgccaaagcctgcaccgctggaggacagcaaaaggaaaatacctgagtctcagtaatcacacgggcagcgacaggaggaggaaccgcggacaactggagcctgggctggatcctcactagctccggtcaaaccctaactcttacgggtggggcgggcaacttccgcccagagcaaggaaagcgtcacatccgtcaaatggcttcacccctcctcccttctccgctgtagctgcgtttacaacgttctgacttcctcttccaggagactttggcctagtctcaacacctgacgtggactacataacccagcattcatcacggcaagtggatttccgggtcaagaggtccgcgctgggtacatcaccatggaagcaatcggtttggtcacgtggtgcccttggttacgcccggtggcagctgtggggtctagggctcagacgggggccattttgccagaggctgcctcccggagttgggggcggcctggcggcaggctgaagctgttcttttgcctcttctgcagcttggggcttggagaggatctggaagtctgggctccatcgagccctttggagacggcaatggtttcttccaaccaccaccacctgacaaccctgcatggcggctgccccctccgcgctgcttctgctgccgccctttccagtcctctctacctatcggctccagagccgcagtcgtccttccgccccagagaccgatgatagtcgagttgggggcattatgagaggagagaaaaactactacttccgtggagctgcgggggaccacggttcctgccccactacaacttcgcctctggcctcggccctcttgatgccctcggaggcagtctcaagcagctggtctgagtctggaggcggtttgtcagggggagatgaagaggacactcggctccttcaactcctccgcactgcccgggatccttctgaggccttccaggctttgcaagctgctttgccgcggcggggcggtcgacttggcttcccccgacgcaaggaagctttgtatcgggcactgggccgagtgcttgtggaaggaggtagtgatgagaagcggctctgcttgcaacttctctcggacgttctccggggtcagggggaggcaggccagcttgaagaggcctttagcttagcacttttgcctcaactagttgtctcgttacgggaagagaatccagccctgcggaaagatgcgctgcagatccttcatatatgtctgaaacgtagtcctggagaggtgctgagaacgcttatacaacaaggactggaaagtaccgatgcccgacttagagcttccacagcactactgcttcccatcttgcttactactgaggacttgttgcttggtctggatctcaccgaggtgataatatccctagcccgaaagcttggtgatcaggagacagaagaagaatctgagacagctttctccgcacttcaacaaattggggagcgacttggccaagacaggtttcaatcttacatttctcgtctgccctctgccctgaggagacactacaatcgccgcctggagtcccagtttggaagtcaggttccttattatttggaacttgaagcctctggatttcctgaagatccccttccctgtgcagtgactctttccaacagcaatcttaaatttgggattattcctcaggagctgcattcacgattattggatcaggaagactataagaaccggacccaggccgtcgaagaactaaagcaggtgctgggaaaatttaaccctagttctactcctcattctagtcttgttggcttcattagtttgctatataatttgttagacgattctaacttcaaagtggtgcatggcacacttgaagtcctgcatttactggttattcgccttggagagcaggtacagcagttcttgggaccagttatagcagcttctgtcaaagtgctggcggacaacaagttggtgatcaaacaagaatacatgaaaatcttcctcaagctaatgaaggaagtaggacctcagcaggtgctttgtttactcctggaacatctcaaacataagcattccagagtgagagaggaggtggtgaacatttgcatctgctccctgctgacctatcctagtgaggattttgacttgcccaaactgtcctttgatcttgccccagctct

SEQ ID NO: 1241425 - DNA, 4001 bp, Homo sapiens
aagtgacagattcgcaaccattaagtaggaatatttcctagggaaataaaagcagtgatatgagtatgcttaaattcaaaagcctagtgagaattttatgattatgaaaaatttaaatcccctctccatctagtgctatcataaatgaaaatagacttttggagtggttttccttctaggagtcccagaagcacttcagttcccagtcactcctctaatgggcagtagctatgtgactttggacaagtcttggattctgatttcgtcatcatcaaagtgtaacagcccaactagataatctctaaactaatcccttgtaattttaaactttcaatgtgtccacatggcctagtggaaggagactggactagtgatgtaggcttgtatcctggggttgtcccaagtcaacatctccaaatttaatgttccttatgtgcacctgtagataatgatattgacctcaccagctttcagtaaaatttaaaaagagatgtcatgtgtaaaaatttcaggtacccagtgcctcactaaatgttagtagactccgaataatactcaacttatgcaaccctacttagctttcctggtgatgagcagagttaacttcaaagtgccatggccaggccgggtgcagtgactcatgcctgtaatcccagcatgagacaggtggatcacctgaggttaagagttcaagacaagcctggccaacctggtgaaaccccatctctactaaaaaaataccaaaaaaattagccaggcatggtggcaggtgcctgtaatcccagctactcgggaggctgaggcaggacaatcacttgaacccaggaggtgcaggttgcagtgagccaagattgtgccactgcactccagcctgggcaacagagtgagatgctgtctcagaaaaaaaaaaaaaaagtgccacggcctggtaaccttaaacagtaccagaccttgctcattagctgcagggcccataagtcagccatggcgtcaagcacaccaaggtgaaagcacacattgagttttccaccatgttcccctggctttcctgtgtcctgaatggaggatgccaagaagggccttttgttaatttctgcttgagtcaatccactttctgcttgttctactgccatggattgtacccttagctctagccagctggctggagattccttgttactggacacaggaaaagccagacagagggtcagtttaaatctgtcagagcgcctagaaaacaactcgactgcgcatgcccggctctccgtggggcaggagaggcaccaaaggccaccccagggaaattctgacagcagcagggatcaaaaccatcatggtggggataaaaccacctgctgcttgcacacaccattccgttagcatatgcacctgcagtaatttaatgccccacaggccctcacccgacagctggcagccgcctgcctccagcttcaagtcacacccgacgccctctcggtagaggagctcgattccgcgcaggttctccctcagctcctctgcctggctgggcttctttacatcttccctggcatttccagccctctcgcatgtctgctgggcagcagccttcacccggggcgctcccagcgcctctgctgcggccagcacatccccctgcgaggcggggcccagcaccccctcataggcaaaggtcagcacggcctcccagccccctggggacacctcgaggctgaaggggggccgcggacctccgccgcccagcagcctgtctcggaagaggctgctgattgcggccaggatcacccgatgcaccccgtatacccgccccgcgactgacacctcttcgtccagcaacagtctctgctcccgcagccgctgggcctcggcgaaaaactggctcggatgctcctcgctgcgcagccactcgggctctgccgcatcttcatcttcttcctcttcctcttcttcctctagggacaaggctggaaagggaaggttccttgggaccaggggcctggaaccaggctcctccagaggaaaggaaggcaatctgggatcctcgtcgggggagggaggccaggaaggggttctctgggcgtgcacaaggagtccaaggcagtccctctggacgggatgagagacactctccagctcagggggataatgtggggtgtccgagacgctcatgccgaggtttgctggatagctgcaggtgagcagaggcaagacagcctggcgtcagagctgggcccaaagaggccagagcaaccatgtctccagccagttgaaatgtcagtctctcccctgctccaacaccctcctcctaccctcagccacatcccagcactggagtatctgggatatacaggacagctatagggtgcacgcggtgcagtgaaacatgcaagaagccctgtaaagatccggtaaccgggaccacacccctcccctattgcccccatccttttagtcaccctcaggagacaccagcgttccgcttgccctctcacttaagcgcccgctgtgcttggggctgcgtggcagagggaacttgcccacatggcatcccagtcagccagtggccccatggggctaattatagccagtcctggctggctaggcacttggcacctggtgtcctaactctgacacccaatcccctgggctccctcccagactgacatccccacccttccacctgtaggtcatacaggagtgtgctgagctaggcaaattaggaaaccaaggagaatgaggggatctggtggaatgagcccaaggccagaagggctgggccactagagtgggctggaaggatcaggcaaagagtctggaccaggctttggctgttgacttttctgtgcatgataaagctgggaccccgccgggcatggtggttcttgcctgtaatcctagcactttgggaggccaaggtgggtgagtcactggagcccaggaatttgagaccagcctgggtaatatgatgaaactccatattttttatatctaccaaaaattacaaaaattagctggacgtggtgtctcatgcctgtagtcatagcactgtgggaggccaaggcggatggatcacttgaggccagcagtttgagaccaaactgggcaacatggtgaaaccccatctctacaaaaaaatacaaaaatgagccaggcatggtggggcacatctttagtcccagcttcttaggaggctgaggtgggaggatcacttgagcccaggaggcagaggttgcagtgagctgaggtcgcaccacacactccagcttgggtgacagagcaaaaccctgtctcaaaaaacaaaaaagctgggacccaggagcgaatatagcccagctttattcatggagggcagaagagtggggaaagtgaagggccagggggcagggctacggacctaggtggctcaccccacacagggattactatctgtccagaggtggggtccagggtaagagcctgaaatccaaccctgtgtctttggaaaagtgtggggaattctaactctcatcttggcactgggataagaaccagacagtggaaggtgtgcttgatctgcatgctgtgaggaccagagtcctggactagatgggctatggacatgcaagtattccatttgagccagacggtaacagccactccttctccctccaggacaacacttcctttctcatcctgaggccaagtgctagactaaagcccctaaaagccaggcaatcactttgtgccgcagttttgagtgtcatcttgcagaaaggatttagggaaaggtgcagtgacacacttcctctcccttctctgggggaggtaggacaggccaaggactcctacttcctggcctataaaatgtctggtccaggctggataggttgactccacaggcagacttaataagggaaggaggaacgattgctccttgtgattcagatgaaagggctcatgtggagggcggggtagggtgggaagtgggctgacctgcacagcaccccctcctactttcagag

SEQ ID NO: 1241426 - DNA, 4001 bp, Homo sapiens
tgtctcttcataatgctgacgctgaatcattaagagttaaatacttgatattctttataattttcaagtattaagaaaatttttcaatagatcttgttatattttcaaattcattatcagcctcaagtaaatcaagtagaacaccttattctctaagctcacttgataaggtattgttatgtctgatgaaggctacaaaattagaagagacatttgaaactcaatgttggggtgggagggaaactcatgaacagacccagctatttcaggttagatccttaaactaaaaaaaaaggaaaaaggaaaaaaaaaaagagccttttttatcaggcagcacatcaaatatgaaagtctactgcaaggcatgtctacccaaaatactcaagagtaatttagtgttattcttgggatcattatcccaagtctcaccagcttgggatcattatcccaagtctcaccagcaattgcttcggaccaaactggagacactgttgccattagcctgctaggtaagctaaggaaaacaaatgcaacctaatttagcaaaaattctaactttaagtcaactcctatacaattcagaacctttagttcaccgaagatgcttatctttagctgggctggccatgagtgtctacatttctcaaggctttccacaaagtcatcacacacacacacaccttaacagttaacttcaaccgtagctctttactcaaggctttccacaaagtcatcacacacacacactcacacacacacacacaccttaacagttaacttcaaccgtagctctttaagcactactaacttaaatagcggctaaggaatccgtttgccaacacagttctgaatttagattcctccttcctcccacaggaaagaagggccaacactgaacagcttactttcaacctaacctagtcaaggtgcaactggggccggctgggacgccgctgcccgcgtccggggctgcccacatctagtgcacccagcgccttcaccgccagcatgcggggctgcacatcccacaccagacgtatggctgagagccagacgacttctctagacttcccgcgtagttttccggcgaggtccccaaggccaaaaatctcacttttggaaactgaaggggtcaggccgaatcgctaggacacacccctcggggacaggaagggataacttcgccggtgtcgagagtggtccatggatttttccaaagtcccccctcatgctgctttccgtgcccaaccgcctcccgccctgacctggggactcgcaaagggcagcgggaggggcgccggggaagggggcgagcgcccagaccgccggaggcagcggcgaggactggaactccagcatggcgtaagtgtggcccagctccggcccggggacgccgccggagacgcgctgcctccgtccaccggccgaggaggcggtaatccgccttccctcccgggggccctcaggcttggctaaaaataggtgcctcggtcaccccagggcccgctcgggtcgacctcgccttcgggagagtcgtccttggggagggtggggggtgtccctcggccgcgccccgggtgccgcgacagagccggggtcgggcccagagcggccccgcgaggccgaggaggtccctccgagcccgccccctgcggcgtcccggccccaacaagagccccgcggcggcaaccggatgcccgaggcctacccagcgggcggcgtccgggccccgcggccgcgcccccccgcccggcgcggccctcccgcctgccccaggaccccgcggccggcgccgcctccccccgcgctccccgccgccggcgcccgtcccggtgcggcctgctctccctcaccctgtgcggccgggaaaggagaccgggaagacgcggcggcgccggcactacagcccgggccgcccgctccgaggcgccgccgccgccgccgccgccgccgcagtcgctcaggtgccgtcgcgccgctcggcaggaaacgggcggcttcggggcggggcggggcggacccggcacgtcctggcgtctgggccggcggcgccgggagaccggccccttaaagggacagccgccggcccgcctctgcctccgcgcgcctgcccacgcgctccggtactcgctgctcgcggctggccggctcgggattccgggctttcttcccgagaccgcgtcccccagctgggccgaaggtggacgctcaggggctggaggctcagcggaatcccctgcgttcagtagccccgctctcccctgtcccgaaggttggtctcgtctcgcgcggccctccctccagggcaccacctggctccccacgccttttaacttcagcaaacggcactagatttaccccctgactatcccagatttcccccagaaattactggaaaacgacatcccccgtccctttctccaggggatctctctgaaatctccttcgggcaacgctagctacaaacggagaaagaaattagaaagcgacccaaataatggtcgggcgcggtggttcacgcctgtaaccccagtactttgggaggccaaggcaggcggatcacctgaggtcaggagttcgagaccagcctggccaacatatagtaaaacccgtctctgccaaaaaaagtacaaaaaattagctgggcatagtggcgcacgcctgtagccccagctacttgggaagctgagacaggagaatcgcaggaatctaggaggcggaggttgcagtgagccgagatctcgccactgcactccagcctgggcgagagagtaagactctccgtttctctcaaaaaaaaaaaaaaaaaaaggaaagaaaagaaagcgacccaaatgagttgtgtgcaaacattatgaaagtgttgtgactgccagctggtagccatttatgaagccggggtaaaaatctagaaactgctgcgcgaggagggatgggcccggatctctccttattcgtttgctctttgctgaaaggatggcagcgatcctccccgtccactggcaagtgagtttcgtgtggattgtttaccgatgatcaatctctcacaggaggccaggcactgccccactacatgtacaaaacactccaagctgtccgcaaatgttatgaaggcttaaaataatcctaacgattccagactgtggatagagatagaaaaaattaggactcaccaccaccacctcgccctacatctgacaaagtgggaacagaagcagttaaggaatgaacagcagaaccgtttctacaccaacagaatttcctgtacatgggctggttaaaagtatccatactttttattctaatcatttctaagttttctagagcacctccaaaatacaaatgaaaactgcgcagtgtatagtggcctgagatattgagaattctgccagtcttcagtcaccgtgttctccacagatgcattgtcttattttaactccagaggcgtcctcttttttctttctcattaggattactctgcccctcagcggttccagtgccctcaaagcaatctgtctctgaagtactggctatcttctgagcgtgtgccagaagatccagctttgttgaaaagcgaagccgttagtcccttaatacaaagggtaagtgtatcatttatgtaatggagtttaagggctcttgattagcttacaaacaaccatgttatttcctcaggttagtactaacgcaggttttaggttagaattaaaaatttatatcattcattttcctgaccagtaaaaccgcaatgtcatttacaggcaataatatttcggtgcacttgtaagtaagacaatgagtggagtttaggattttctcaaaacatactactgcttatactaaaggatgactttgtatcacctatttcggcttttctggcgtttgaactttgactatagaaagggaagtggttgaatgctttattttttataagctttctatttattcacatcaaaacaaaaagatttactagaggccgggcgcagtggctgacacctgta

SEQ ID NO: 1241427 - DNA, 4001 bp, Homo sapiens
atttatttttattttttattttgtagagaagggatcttatattttgcccaggctggtctcaaacttctgggctcaagtgatcctcctgcctcagcctcccaaagcactgggattacaggcctgagtcaccacgcttggcctgtactatttttgcaatttccaatggatctataattacttcaaaataaaagtataggccaggcacggtggctcacacctgtaatctcagcactttgggtggctgaagagggaggttcacttgaggccaggggttcgagaccaccctgggcaacgtctctacaaaaaaataggaaaataattagctgcctgtggtcccagctcctggaggacaggaagcattggggaggggggctgaggagggaggatcgcttgagcccaggagggtggaggctgcagtgagctatgattgtgccactgcactccagccttggcaacacagtgagaccctgactccaaaaattttttaaaaaaacattttaagtataaacaaaactttcactagccctacttttctttccttaagaaaagcttcccaaaagaactgtccacatgccccataacaaatcacaatcgctattactggtatcccactctactccccctatccaccaacacgcagcagccagagtcaacttttagaacatcaacatttaattattagcctcttctttttttcttttcttttctttttttttttttttttttttttgcgagacagagtcttgctctgtcgcccaggctggagtgcaatggtgcgatctcagcttactgcaatctccgcctcccaggttcaagcgattctcctaaggctccggagtagttgggattacaggcgcccaccaccacgccaggctaatttttttgtatttttagtagagacggggtttcaccatgttggttaggctggtctccaacttctgacctcaggcgatccgcccgcctcggcctcctaaagcgtagcctcttcttaaaacccttttaaatagcttcccgtggctcttagaataaaagtcaacgtgtggttaaaataaactaaaaaccttgctgtgatgtagtccttctgggtcattccacaccatatgtcttccactaaacttcagtcacactcatatggcccaccttctagtcgtcaaaatagccaaaacctctccaagccttacagccttcacacaaactgtttcttctacagaggacagagaaagacaatggtttcgaatgtgacgtccaaactataaatcacaggacactgaattctgcgggctttcattagcataagagctgcctccgacgggggcaacactatgcggggtgtgccaggaactgatttaagactgtattcagatcttccaagcaacgccaaagactccagcttataaagagcatatttgattgcttatactgtgtgctaggtccttttatccttcaaatgaccacctacaggagagactaaggtccaattcacaactgagcctttaaggaggttaagtaactagcccagagttcaacagaaagtggacgggttgttcaaagccagagctactcccgacctctactctatacactgcctttcctccggcccgtaaatacaacgaatgaacctgcaggttggtagctcctgggatccgaggttggagtgccacaggaccccaacctgctctcaccccgggacagggaaatacgaacaggggcacaggtccaccaccaggtgcctccgcgaggggcagcagcgcaggcggcggggaggaccagcggccactcacctggtgctggcgctgcggctacctccacacagcggtcttggcctcccagacgcgaacccgcacgccccaggggagccaccggcgaaaagcccgcgggcccgtccgcaggcaccaaccaaataacgcagcgctggcaccatcccctacgcacgctcccctccctcagcgctcagaagaagccacttgaccctccacggccgaggacccgcgctctttagccccgcccctcacgcgggggccaatgaagtggcgcgccttcgccccatgtgggagaggctgcggtggccaataggcgcgcgcgtcggagggcgaagggccggccagggtgccgcagacgcggggacgctggctcgctccctccctccctccctccgacgctgtgagtagagaagctaggccccgagccgggcgggactagggtggtggttgtgttctgccctcgcccgtcgccaacgctgggctgactgaaaacctggccctttgggtcgcgcgtcttcgaccttcaccgccatgcggacatggggccgtgggagaaactctgggcgggattacggtgaaaattcttgtttgggcgggccctgcggcttctttcttccggctcgccctcggccccgcccccgccccgcccccgctccagctccagccgggtcctcgctcggccccgcacgcggcccgcggtagacggagggcctgggcacccaccgtctccatcccggccccagcccagtcgagcgtccactagaagggcgctccctgtccggccctaatcctcgctcctcacggaggctctttgtcacagcgaagactgacagcccgcagtcttctggacttcttttatggggctcctggcggtgctattcattcagtcattgattcgtcttgtaaatatggagcgcctgctctgtactcgacccggcactgggtaccggaagaaccagacagctcggtttttgccaccatttataagtctgtgtccttttcttgagtactgaaccgagatacagttttaaatgtgctgtgcggtctctgagcagcgactcacctgtgcaggtcacttcacctgattccctttatgtaaaaatgagggcgatgggctgtgtaatctctaaaggaccttctaactctttaaaattgtcactgtgccggtgttgctaacactcattctgtatgcttgatggcagtttttaatttttagggttaggacagctgaacataacaaatagaattatacagatttattaccagaaggacttcgtgtgcctctaagaatcttggttccagtctttggtcaggtagctccaggaaatcacttcacctctttgcctcagaccctcctcagtgaactaggaatgatagcagtgtctccctagtcttagggccgttgagcggattacacgagataaggtcagcaggtgtttagcacagtgaagcatttgctacgtgatgacatttattatggttaaagggttttaccaccagaacagtggtacatagtttgctttatttgttaaaacaatgtagaatattgcctgcttgttccatcacagatgaaaaaaagagatggttattcaactttgtgaggtaattgtggatttccatgcaattgtaagaatagagattctgtgtaccctttacccagtcttcccagtggtagcatcttgcaaaactagtaccatatcacaaccaggtaattgacattcacacaatccattgatctcattcagattcctcattttgtattagtgttctctgtgtatatttagttctatatggttatcaggtgtgtagattcttgtatccaccaccacagtcaaggtacagcccaggtccatcaccacaagggtccctccagttgcccttttataaccacaacttacctttgcagccccacccaatctattctctgtttctaaaattttgttatatcaagaatgttacataaatgtaattattgtaattatacagtatgtaacttttattgactctttttcattcagcataatcccttgagatatatccaaactgttacatgtatcagtagttccttcctttttattactgagtggtattccataatgtagatgtactacagtattgatatggtttggctgtgtccccacccaaatctcatcttgaattgtaactcaccattcccatgtgttgtgggaggaaccaggtgggaggtgattgaattatggaggcaggtccttcctgtgctgt

SEQ ID NO: 1241428 - DNA, 4001 bp, Homo sapiens
tcatacagtgatgctctcaggaactactgagaggaactactgaggtcaagtggttgactgaccctgccctaactgacccagaaatgagatgtagtttgtgttcctgctgccagctgccatttcctacagaagtctagagtgtttctactctgctgctggagttgcctagggggaattctggtagccacgctagttaaactgttgaggttttaaaaatggaatcgtaaacataaattctgtctccctcaagtggcctcccagtctggaagtgacaccattctctgggaaaatggcatcaatttctccagaggcattcttcgttaactcgtggatttcagctgcctaaggttgctctaaaagtgcctgttctatcagttatcattcataatcaggctaatctgaaacctagttcttcagggggaatcaaggtccaactttctaacagatgatttgcatggcttgaagatttttaagaaaaggataactctattcctggtaaactggctcctggctcacttccagtcacaatgactaaagcattcttactgatagaattcagctcctgggaggtagtagtctgatgagaaaccagatgccagcttgccaggtcatccctcctgtaagggttatggttatagagatgccctgctttacatgataagctgtacaaggatctgtactagagaatccagcaaaaccttttaatggctcaataggcctagggaactttagcgatcatataaaccttgcaatctatctccaggaatacagtatcttgcatactctcatttaatcctaacaaaaaaactctatgagggaaaagaagaaacacaggcacagagagattaagtaatttgcctaaggttgcacagctttagggggttatcaggatttgaaaccaggcaatgtgtgttcctgttcttaaagaaaagcaacattcgtatcttaatgatttataaactgctttgttcattcattctcatttaattcttcaaagaagtgggggaggtgaggaaaggagaccaggtttagtaacttattaagtgtgattctgtgtctaccaagcatattctcagccagcctggaaccctggtacattggctgttcttcgctctttccttgaccccaccgtaccttgctttatccaccggtgaaatctctaggaatgcctcaccagtgcagagggaggcgctgagtcagggtaacacgcaattcctcgctcctcaagggtctcccaaaaccacaggcggatgggagtcagggaaaatcgaaattacacgcaccaaatacgcaaggctgctgacacacgttggcagtgatttacctttctattaattgcaaggtttcgcggagtaggttagttgccagagttccagcccagaaaaaccgttaatgtagttagtcgcgtcccggttgcagctctgccctgggctggaaaggtcccgcccattacctgtggccagcacgaaggccgggacgctgtggaagcgcaccggtccgtggctgcggccgtcctcgcatgccacgaaggcggtcaccagcccgcaggggcagtggatattgacgcgggcctcgcgggtgcccgcagggggcgccggcacaagcccgaagtccaaagcgaagcggcccagcgccagcactgcgtggccgcacatggagctgtagccctcgttgtgcaggaacaggacgcccagatgcgcgtccggcagctcgctcgggactaggaccgccccgtacatgtcccggtgccctcggggctcgaacatgagccgtcgccgcacgtggtcaaggtgctggcgcatgtagcgccgcttggccagcagggtgggcccagacacctccggacaccccgccagcacgatacgcaagggctcgccgcccgtgtgcatgtccaccaccgacagcaccggcgtccctggatcatgcgggggcagccggggcaccgccagcgcgctctccatggtctgcgtcgggggagacgagtacggtcccgcagctatggcttcaagcccgaccctcacccactgactccgcgggaggagggcgggacgctaaccagccacgtccggggggcggggtctcggagcctaaacccggaagcgagggaggaacttcggagctgtcgcccgggttaccgggaggcggagccgccgagctcgctgtggcccggatgttcggtgcagctgccagatccgctgatctagtgcttctcgaaaaaaaccttcaggcggcccatgggtgagtggtcgccaagatcccgggaagcgtttctggtagtcccgactactttcctacacggctggcctcgggctcggctctttgtaggcggccttcggttggcggcgcaggctcgccccttgaccccgcccgccctcgggccgggctccgcactcctgcggggttggggtggtctgtccgcaacgggctactaggggaggcgcgctgtctgcggcgaaatgccaggtctttgttgtttggtccgaaatgtctcttcagtcccttagtttaatgtcgagggaacacttgcttgagggttgacttcggaattgaaaacgcgggtgatagtgcagaaaaaacagtaaagcagaagcaagttgctgcataatttgtctactgcttcaacctcaaacgtagatttatagcgcccgtcacaaagggcaggaccgctgcaaaaaaatggaatcttaaaactttagccatcgttcgctaaaggaaatgaaaggagaaattcaacagtcgcttggagcctgggttttgcttagtaagtgataggctgtttatttcagttcagtttatcatactggttttcaggccttggattttgagaaactttagattattgatattcacgtgtatttattaagcatctactagatgtaaagcccatacagaagtttccaattccttaccttctgcattcttgaaaaacctgaaatattcattttcatgtattaatttagaacattgtgattacaattggttacaaaaaaaataagcgcccattaaagaggccagtgggtttaaaaagctaagtccgaaatttgttaaaagcgaaaatattaaactggaggaatattattcaatgctgtttctctttttctctcagcagcataaggagaaggaagtaaaaagtctgcttgaatgtgaaaggagagaaggcactgtagaccaggcagtctagattgtgaattcgtgaataatttgggaaatgattgttcaagaatagtcaaaagatgcataatttttcaaattaattcacatgtagaccgcagtttgttttgagacggagtctccttctgtagcccaggctggagtgcagtggcgcgatctcggctcactgcaacctctgcctcctgggttcaagcgattctcctgcctcagcctccccagtagctgggactacaggcgcgcgccaccacgtcaggctaatttttgtatttttagtagagacggggtttcaccattttggccaggctggtctggaactcctgacctcatgatctgcccacctcgacctcccaaagtgctgggattacaggcgtgagccacctcaccgagcctgtttgtttgttttaatcaatgaatgaatgaagggaatcagatgtcactgatgaagaaaacttccataatttcttgtgaataaggtcaaagacaacgtattaggttcttagttgttggggtttttttaagtaaggaatagctgcttttcccctaagcctttagatcaggggcttaattttaatgcagtggtttctaaaatattggcccagtgacagccttgatgaaattttcacttatcctccacaaaaatgataaaagctaggacaatgtaggaaactttttataaaggtaatttgcatacctctgttatgaaattatgttctctctgcttttcccatgtgaaaatgtgttctgttatgaacataggtgataatgataattgtgtgtctacatgtgggtgcttaatgtcctgactgggcaaaatacaaggtggtgaccct

SEQ ID NO: 1241429 - DNA, 4001 bp, Homo sapiens
actcgtcctcttctgcttcttacgtaacttagtgaggcatcctcctagcacttctaagtgctaaatattcaaggaccatcatcaaacttctccccagaatctggactaagtgctgattttaaacatcacctctaaatattatgaatttaggaagttgcttaagtcccccaaagatcaaggatggggtatgatcatctttagaatgagagaccctaccctaaggattgagagtcaatgtctaaaagggagactattgttgtagaaaagtaaatgatcattattcaactttaccttttatggaaacacacaatttcctagtatgaaatgtttataaacttgaggtaggccaggcgcagtggcccacgcctataatcccagcactttaggaggccgaggcaggcgggtcacctgaggtcgggggttcgagaccagcctgaccaacatggagggacccccccccccccaccaccaccaccacgaaaaatacaaaattagccgggcatggtggcgcatgcctgtaatcccagctactcgggaggctgaggcaggagaatcgcttgaacccggtaggcagaggttgcggtgagccgagatagtgccgttgcactccagcctgggcaacaagagcgaaactgcgtctcaaaaaaaaaaaaaaccttaggtaaacaaatcagaactttggaagctgacgaaagctttttcttctcaggccctgtgcccaagtagttaattgtatcagtctcattttcttcagaattaactgagccttctcccatttcttccccagaatcctagagacagcctgagtcactgaggtccaggtgtcctcattgcgcagcaacccaattcccagagtcactttacaaacattccgcagtctctggaacccgcatggcgaacttgaagggtaaggctgaaacctaagtcccagcctccaccatgcgtccccgactccctggacctgaacgcctactgctcagagggcaatcgttttagtgtttctatttgagcacccgataattcagaataaactctcaaacatgttgtgaaagccccccggtagggctctgcacgctaggaccaacattttgccacacccaccatttcctgggcacagacagtctgggcagggaggggcatttgattcggaaaagcttagagtttgcagtctttgcaaagccgggtcatgcccactcaggccatggggcaagcaccattttctgtgggatcagcaaccagacagcggctgcagcccggccgcagctggtcccggtggaagaactcattcgcgctccacagcgagatctcctccaagtccagcctcagctgatgctcaaaaggggccgggccagccaagctgtgggtcccgggaggcgccctatgcagtcctgggaagtcccttcgctcccccgcggccgtgatctggggaagggtgacggggctccaaccccaattagagaaactggagcggccgtctggtttgctgagcgagcccctccgcctcccctcgcagcgggacctggtgggactggggtgaccagactgcggctcgtcaccggatggggcttactctggggccgcagagcgcaggcggcggaggtgcgacggcggcgaagcccacgaggctccgcagaaggtggcccgtgccgccccggggacgtgtgtgggtctcgtaaggtgctgccaaccttccccgaacgccagcgccctcgataatcaaaggcgactgccccgggcccagatcgctgcccgccgccccgctcctggagggcagagcacaggctgtggggctctccgcgcgcgccccggcccggtcccggggagccgaaccctctccggaccgcgccccaagcagcgcccgggcgccctctcccctgcccggccggagccgcgtcccccgcgccccgcgcagctcaccgctcgttggctggctccggacggctgctggcgaggaggtgctgcgggcgccggcggggcggtggctccgagcctcaaatactcccagccccgcccggcccgcctctcccgaggcggggcggcgcccctgcccagccagtcctctccccggaccaggctgggcgagccccgcgccggccagacaccccgagccgccgccgcaggggcgaccaggaagctcccgacggggagagcgcgggcactgaggggcgcgacctccgctgccaccgttaggttccgtggcgctcccgggacctgggctgcggccgcgtctgtcccccgccctctccagaatcacctgagtgaagaattcgctgagaggaattcaattaataggttgctttatttgtagaatacaaaaccaaaaatcttttcaatgtctattccctagggaactgactacaaattgactacttattctagatcaataggcctagtctcaaagcaattcccttataaagcaattaatcagacaactctttaacacattttacacaggaaattcacattatatatatatataccctccttttaacttcaccttatctttttgttggaagaaagagataagtattattatctcatttttactgtcagggtgctatagtctgaatgtttatatcccgccaaagttcatatgttgaaatcctaaccctcacggtgatgtattaggaagtggaggccttgggaagtgattaggtcataggggcagggtccttatgaatgagattggtgccctaataaaagaggccggagagagaccccttgccacttccaccttgtgaagacacagccagaaggctccctctgtgaaccagaaagcaggccctcaccagacatcaaatctgctggcctggatcttggatttcccgaccttcagaactgtgggaaataaatgtatattgcctataagctacccagtttatgatattttgttacagaagcccaaacagactaaaagagaaaatgatttacttatccaagctcactcatgtctaggaacaaaatccagaaatcctggctcttacactttacctggaaaagcaccaggccaaagaatccttgcaggttggaacaaggatctctgaggaaaaaaaaaaaaattaaggggggtaggggaagaatctttgcagggactggcttatgtaaactatggagaaaaccaggtatcatctggttcctaaataattcctgtagcccttatagtaaccaattaataacataaagataaattatttcctgcagtttttcaacttagggaaatgttcctgtgaaggactcacttgatggaattgagaagctgtcttggcattctctaggataaacttgaaagtgtcttagtggttggcacggttcctgcaacatcgtcccctctaggcttgcacatagaagtcacagtgtggctggggattatttatgcaagtttgaactcttatctgaagaggtagcctggcaaccaatttatttgaatggatcacccatagtaaatgactaacctctgggtagtaaaaaggtatcacccaaaggaatgcccttggtctccagggaaaatgctataaatcttaagactttgagtcatgaggcctcatggccaggagtggtacccttagagggttagccattggtaataagaaaagtagatagccaaatgaattgctgtggaggcaagggatgaatcacactcttgccttttcttctggtcatttcagagatagacaaagttcatgccctggctacttagggggcttgcttacacctgattgtatgatcagacatgcttttggcttcccttccttacttgtacatccccatgaatactttggtgccaacttcatgccccataaagctaacaaaaggatcctgctatgatcagggtgtgcctgggaatttataatttgtacacatgcaataaacggctctttattacccaatccaaagtcacatcccttttctaagataagcgtaaaaaggaacccaataaaatcaattaagatatcattgagtaacttctatgtacagctcactgtgttatttgaaatagggac

SEQ ID NO: 1241430 - DNA, 4001 bp, Homo sapiens
aagccctggaagatgtacccctctattctcacactcataaaatcccaccaccagccgggcgcggtggctcacgcctgtaatctcagcactttgggaggccgaggggggtggatcatgaggtcagcagatcgagaccatcctggctaacacggtgaaaccccgtctctgctaaaaatacaaaaaattagccgggcgtggtggcgggcgcctgtagtcctagctactcgggaggccgaggcaggagaatggcgtggacctgggaggcggagcttgcagtgagccgagatagcgccactgcactccagcctgggcgacagagcgagactccgtctcaaaaaaaaaaaaaaaaaaaaatctaccacccacatgaaatccctttactgcaccagactccacgactccagtgcaaaaagcattgctctttctctgccttcatcatgctgttttccagatgaaacacttttctcttccttcatctcactaggttctgcccagccctcaaactccaaggcgagacgtggtgactcatgcctgtaatcccagcactttgggaggctgaggcgggcggatcacttgtcaggagttcgagaccagtctggccaacatggtgaaacctcgtctctactaaaaacacaaaaattagccgggcatggtggcaggtgcctgtaatcccagaactcgggaggctgagacagaagaatcacttgaaccggaaaggtggaggttgcagtgagccgagatcgcaccactgcactccagcctgggcgacggagcgagactccgtctcaaaaacaaaacaaaacaaacaaacagaaaaacacataaactccactcaagcctccccacctctgcgaagtctcaacctctcccacaagttagggttagatgctgcccctgtacacacgtgtatactccagccctttaacactggaactgttcactagagattgtctctcccctttatgaaacaatctctgctcaaaaagcttagtaaggctcgaaaatgtttgctatgcaagtcccagagtaaagaaagctgggctactccattcaccacataccacagggctagtcaactaccctgggcactccttttcatctataaaacaaagcacgcgacacaaagtttcttcttccagcccccagatactataatgcttggcatagaacactccacgtaggtataacctcaaatcaaatagggacgggaaaggaaaccagttaactttcacttccaagattgaagcgggtggtcctgaaactctcaccagctcaaacctcccagaaccagagcttccctgacttctctaaatagatgtctttataagcttgggtatttctgttgtcgtcgttaatagccctttcccacgggtgcaatcctccacattaagaacatcaaaagtctgaactgttcctaggtcgtaaaggctggaaccaagccccagtcccagtaggggcccttggctgcgggatctcagcaaatcccgtctcctcccgcgcctcagtttccccctccagagcactgagcccttccagccacaacacgcgtgagaaacgagaaacctccacccccagccccaccaagcagaggccacagggtttcccttccctcgggattcactgtttcctgaaattccccctcgcacggtgagaaactgattactcagaaagggacgggaaaaatgaaaatcccagccctgaggtcgagagcctgagagagcagacgggaggccctggcctcgggcgtggggactgaacccggttctgtgctggggctcgcggttacctgtggcaggcgaccgtggtggcagtggtggcggcggcggcggtgagtgaccgcggtggtggcgccggcgggaccgtgagaactcgcggcggctcgcagcctcacaccaaacacccacgacgtcggcactgctgtgattgctgcgggcgccgccgctcctcgcttaagggccactgtgccgcggtgactggtggagctatggggcgtggcatctgccaaaaccaatgggaggagaggacgaggccggcgagccaaagggactacaaatcccagtgtgcatgggcaggggcttctgggctgggcgcgggggtggaggggcagtagttgcgcactgaagtgaggtggggaatccgaggtacttgaggtctgggggcgcggtgattccagaagcatctaccgaaagatcataccagctcttggagcaaacctgtccgcacattggagccacttaggaaagcctcaaaaatactgatgcccctgtgaaaataaaattgaaaagctgttggaacccccccaccgaaaaaatattttaagccttgaactgactgtaatgtcagtcacgtatgcttacaacttctattcccacattatattctcgctttcttttattgaacgatgtctaggaagaattaaacggcttcagggacaaaagctcctgccttgttaagtaatgaaccttgttatagattataacttcttccctctgttatcctgttttgcttagaccagagacataaaacctatgattattacaccctatgtaaaaaatgttcaatgttcccttcccaaaaagaaaccaataaccaatcaaattgctgtacctgtgtgccaaccttgtaggaatactgttatcctgctcaaaattcctatctctacctatataaatgaaaccttaacttccctattttagaatgccaaatccattcctttggagttggtgtttctgggtggtccatcctcacactttacgcctaaataaactcttcttttaggttgacacctccgccttacccccaggaattgtgattttgttggtttgtatgtggtctgggttttggaatctttagaaagcctcaggtgatttggacccgtttagtccccataacaaccctttgagagagaaagacagttattgtcacccaagctttacagatagggcaactgagggaggttaagtcagggaggttaagttaattttgcaaaggtcacatatgtcttaagtgtcagagccagaactatgacctaagcagtatggttccagaatcccaacctcttacttccttcacaatgctacttctcaaatgtttggtggcattgcctcccaagaaacttgagagaaaaacaaactacgatccattcgagtgccatgtagtgaggctcagtcaattgagttaaatggaattaatgtgatgtagtatgtgcactcctgctcaaggacattccagcacaagagttcgggctaccttcatgggttgtctcatgtggtcttcttctacaatcttttttttacagtaagttatagatcagcacactgctgtcacctatttttgtaaataaaagcttataagaacacagccacacccattgacttaggtattattgagaggtgaagccagctgggcttctgggtcaggtggggacttggagaacttttctgtctagctaaaggattgtaaacacaccaatcagtgctctgtgtctagctaaaggtttgtaaatgcaccaatcagcactctgtaaaaacacaccaatcagtgctgtgtctagctaaagatttataaatgcaccaatcagcactctgtaaaaacggaccaatcagtactctgtaaaatgggccaatcagcaggatgtgggtggggccaaataagagtataagagctggccacccgagacagcagcggcaacctgttggggtcctgttctgtgctgtggaatgtttgttcttttggtttttgcagtgaatcttgctgctgctcactcttcgggtctgcactacctttatgagctgcaatactcactgtgaaggtctgcagcttcactcctgaagccagggagaccacaagcccaccgggaggaacaaacaactccggacctgccacctttaacagctgtaacactcactgccaaggtctgcggcttcactcctgaagtcagtgagaccacgaacccaccagaaggaagaaactcaggaaacagctgaacatctgaaggaacg

SEQ ID NO: 1241431 - DNA, 4001 bp, Homo sapiens
tttttcaactgtggtgaaatatacataaattttaccattttaataacttttaagtatacatttcagtggtattaagtacattaattgtgcaatcatcacattcatttccagaattctttcaccttcccaaactgaaatttggtacccattaacaataactccctattcccttgcctgactttttaaatgcccttctttctggcaagagaaggacatttttgcaagagcgcacccaggcaggagaatctcttttgactccaaacatccataatttctttttttttccttcttttttttctgagacggggtctcgctttgtcacacagactggagtgcagtggcatgaacatggttcactgccgcctccaccccctgggctcaagagattctcttgcctcagcccccccaagtagctgggactacaggtttgtggcatcacacccagataatttttgtatttttttgtagagatggggtttcaccatgttgtctaggctggtcttcaattcctgagctcaggcgatctgcctgcctcagcctcccaaagtgctgggattagaagtgtgaaccaccacgcccagccataatttctaatacagtatgtacctgcgctcacaaaatttaagactcggttaaacttaaaacttaagatcaagtaatatattatttctgcatatatctaatcaatctttcaataaatgttaattaaagacctactgttcgtcaggcactgtgctaaacctggatccaactatgaacaagacaaacttggaatttacaatctagcgcaaaaggggcaaagttaacagagtaactatgctgacaaggaagatactgagataatgaataatggtgggaaagggcaactccagatactgtgttctaagaaagactctttgggaggtgacatctaaaaagagaactgaaactgaaaaaaaaaaatgtttatatgtttgagtcatcttttggtctcccaaagcacctagcattatgcctttcatgtagcaggtacttaatatagctcaccttggcttcaatttcttcattcctgcaatgaacttccaagattccttccaaatataaaatgtttttgtctaagggaaggaaacctatatatcaataaaatcgatatatagttgggatgaggatggtagaactaaaaatgagtttaaaaatgactgcaagaccctaactctctaaagcagaaccaagaggaaaagcatgggagtataccaaaacaacttaattgttacttgaaatgacttgcattttacacaatatataaacagaaatcgttaattcactcagccttaagaaacaacacgtaaagcagatggaagacaggttgcgacctgtgcaagacgacacttaaaagctcaatactgattctcctcgcgactctcagggcgaggggccgagaacgtcccccgcttctcttgctgccacggcaatggtcccaaactgaggagacaggagagagatcatgtttctcttgcggttcagtatcgagatgaggtcagccagcagccctgcgagggtttgtgagaatcattccatccgtgcgctcaatcagaagagaactgatcctttcaatgggtaccccaaggaaaaaactacagtaagccacgtcctccagaaacatctcctcctcgaccctcagcctcgcccaaatagagataaggaaggcacagggcgacccccctgtccttttacccagaatgagtccctccctagtgccctcctccacacgcctggtacagagcggggaaactgggcacctccggagctgctgtgaagaaccggtgagctgaagacggcgatggatctcaagaaaaaaaataaaagggaaaggagaagagcccaagaaagaaatgtatgttcgaggggcagagacagagtggatgttcccagtagagcaaagaaggaggctgcaggcaaagatctctaagccggctcttaccgtctgtgggagacgccatcttccaacccatgtcacgtgacgtggccaaccgtcggcgggaaaacgaggttccataagccacgcccccaaagagaaaccctatccccaactcgcagcccagtctcattccctcgcctcatagggcaatctttgcctagccccgcccctaagtatagccacgccccttacgcggatgttgaggtggagcgactgcaaaattcttgaagggtcttatttacttttttcagtgggggggtggggcctcggttccgcccttggccaatcggagttccaggttaggggggcgtcttccccgtgtgctcggtagggagtgtccaagtcaggggcgtcttctctacctccgcctacgtcattggctgaggtggcagagggcgagagcattttcgctcctaaccaatcacttatccccaggacgggggtgtgaggagaggaatcaggtgttcggaccagtgattggctggagaaaatagtcctccccaccaatgaggaagcctggcaggatggagggcgaggcctggcagctgtagtgcttctgggcagtagaggcgcggggtgcggagctagggcggccgagagccatggcggcgctattggcggcggcggcagtgcgagcccggatcctgcaggcgagtgagggtggtgccaaggcaccatgaagctaggaattggatcctttccgtccgctccctgagccatcctcgggcgggaccaccttcttggcccaacccctttttggccagacctcctacccgacctgtgcggccctgtcccatgcccagccctcacttcataacctccctggtcccggatccaaccctgggctgttacccttggccctctacccttttactcctaagcctcctcttttctggctctcgcccactctccttctccagctctgcccgctccctgctgtcactctcttgccctcatctctccatccgcccaccgtctttcctttttacctctgcaccagccttctctctctcccccagaaactactctttttggttactctgtcccctgccgtgagcgtccactttgccattgctcccttcccccaccctacttcactatccgtggtgatctgaggtaagggggaggggggacgcgaggggcgagggtcagtgtatgaactttgaatttccttctagaggtggactctagattttcaccaaaggcagccatttgctaagctattttccctaagtgtggctctttgtattttccatggactggctgtcccctttcttgccaaaactttgagttaaactttttctcagctaagttacagtttacatagatagggcacatctacatagatagggtagataagggcacacagttaaagctaccagtatgttccatgtatgttcaaggtaccaaacatctttaaaacgggtgatagaaagtgggagccaggtaagacaagaagtctaagttcccaccccaaaatcagctcttctagtgctacacaccctcatctctgcacttgggggattgagtcctctctgaagccaacctaaggagaaatggtaaagctacaggagttgcatgcctgaggcctgtaatctccaactctgtttatagtctttcccctgttcatggcctaccaaggatttagagtatgtggcaagatttaccgcaggcaagaaacagtctgcaagaaacaacagtgccgttcttattcattacatccagtctgagaatttcctctatattgctgagcttttaggtaatattagtattcaccaggtttccgtgagttctagtaaagaaacttgggcagttttaagattcttggcagagtcagcaaagattcatttttaaatatgctatttaatggggaaggtagaaaggatgagtttgaagggtttggcagatggtctggcctcactcatatttcttgctgcgatccttgttctgttctagtatctttttttagtagcaggaaaacaaagtttccaccctatatttttcttaccaacttcttgaaatcttttactgaaattggcttttt

SEQ ID NO: 1241432 - DNA, 4001 bp, Homo sapiens
tgagataagacgaaagggaattcaggggaaaaaaaggcgccagggtaaagggctttggaagttaactaaatttgttctgcttcagccggccatggaaatctcattttaacataccagacccaatatgttaattaggcagtcgcaaatccaacctgctccttgtaaatcaaggcaccggaaaaaaaaaattcaaaatatctattatacagggataaaacaaacaaacaaacaacaacaacaaaaaaacgcgcaaaggagttgcgtgtccgtgacggggacaatacagctggagagaatgttgggtggtggctatcgttttagcctggttctgctagatataaaaatgacttctttcatggatttattctgctacataaaagcacgtcctggcagttaaacaccatatctcaagacacacagccgtgacaatatgtattccctttcatgcaaaccaagttccaagaaaactccatttcgagtcaaagtctccagatgcgtaatttacaactactaaaaagatctggcaagctcctccacaacaaggaaaggaaaacaacctggcaccagaggtagaaaagggtagaaaagatctttggtttaaatgatgggtggaaaccaaacacccactcacacttcacaatctggaaagggttgggtaccaaatggtccgtggcaaccacagcctgaaggaaacacagaattttgatctctggcatcttcagacaggttccacacgcctagctctcaaaaaatatcctcagggtggagcacatccatattctcaaagctttcactactagattaagtgcttaggtatagatttatatttcacctactagaaatcgtattacaaaatcacagagcaggcgcccttggatacccaacccttcccaatgattttcaaaacattaataagtaaagtagcctgcaatgcagataagacactagaaacaagatcaaaaggaaattgggtgaggcgagtaatcgttggtttgttacctggtgcctctaagggaaaagacggtcgtaggaagactttctgcctgcaggtacaatcccggcaaggtggctccaggtggctttcacagtcgtacgcgggtctcgctcgtcacttcgctgccctttgccatagctcagcacccgcatcgtagggaatcggaaaggcggctcctgccactgccgccgctgcccgcaggtcgctctgggtgggggaatcgctgcaatcgccccatgaaacccgcggctccgcgcccggggagcgggcagaggcagggcggccgcgcacgcacacacagacacacgctcacactcacacacactcgcacccgggcgcgcgcgcacttgcactcacactcgcacacgcacacccagcactgcacggggaggaagcagcacggagggaaccggtccttctcacgattggcttcgaagcccaccggaccgcgggcagcaaagagagcgttctcgcatagccctttaatcacgtttccttcaagttctcctccaacccgaatccacgtaattcaagagctggtgacattttggtggggaggagggagccgagaaagggctgaggaagagtcggggattttgttaagcagtttaataagcaatcctcattaccttatttgttttgttttgttttgtatagcaaaccagttcgaagggctgaacttttggcttcaaatgctgtgaaccaaaacgtaaatatccttctggccaagagaagaaggtgtagatacacggaaacaagagggctgcaagacactctcttgaccttgtgatgtacctggaagcaggttaatattggcgctttccaagcttctgggtaaagcgatccacacacctgggtccacagcccagcagccgctccaaatccagccaggaaaatgggtctgggcgtcctcagagctctgcaagaacccgggcatgaaggggcatcgccgagttaacacatttgcttctgggcagttggataaaagacagtcaaatgcatcagataggcgcgcgcgtacacacgcgcgcgcacacacacacgcagctagctggaaagcggcttacaaaacactagagacatgccaagatgacttgaaaaggtagccaacatccaggatctttccggaacacagaagggccagcagggaggttatcaaagtcttctcaagtctttcaattcttcctctctcctctgagtgtgtgtgtgtctgtctaggtttcgttggtctgccccacccccgtccagttgcgctttttttttctgatataacggaccgtgcaaaatggattatatgggtgggctgtgttcacagccagagctccccaaagtcaaggatcctaagggagcagccagctgctaaacaattcacatcctcaagggaagaaggaaaaacacgctcaaacacacgcaaacacgcgcacacacatacatagtcctccgttcgggcagctctgcacacgctcaccgcctccctgcgcgccgcggaacacagcgccccgcccgctggccaccgcgctggggcgagtccgcagttcaggcgcgaggcaagcagccgaggtccggggctgcggccgcggccggggcggacccgggagctgggcttcccaaagcgtcgcgtgtgggcaacggcggcctcctggccgcgtggaactgagccctgcgctgcagcatgaaggcggcggcggcggcggcggcgggcgcgcggccgtgagctcagcccgcgctgcagtgacgggagcggccgtgtcggccagaccccgagagtccgtgagaccccggccggggccgctccgctgctgtcagccctcgggcctcccagccagactggttctgaaccgatttatcagggggttgcggagagggccggcgaagcgccaggaaatccccaggctgaggaggcgcgggggcgttgcaggaagggggaagggaaaaggcagaaaacctggagaatgaaagcgaacttccaggggcgtccccagcctcctgcaaaagggcaatttgctgatcgcccacttcctcgcagttacgggatagagagaatcatcactgagtcaagcttcggctgcttagggcggtgggaaaagtcattatctataataacccgccggaaattttgaggagagctactgacttgggggtttcagtcatctgaggctggcttccgctgtccccttagttgtgggtggtgatttgcttactaatcagatgggagcggattctgaaaagaacatttatatttgggaatcaactcagctcagcatcagacattacgaatactgcagttggtcacattttactatgtgaagggcagaaagggagcccaacagtcttcataagccagacctagtctctaaggtcaccggcacagacgcagggtctaaagcaggaaagaggtgcgactggaaaggaggttagacagggccctgcgggaatggatctgcccggagccctcgcctggttttgcttgagactccgacaagactcccaatgcttctctccccgaccctatccccactccctccatcctggaaaagccagtgagcaaagttaactctttcttctaagaaaccctgagtgaaatcttgctcttcctttctgctagagtcctgaaaccctttcgcttctcattgtgggttcaccagcacgtggtcttcggacactgagagcaccttcgctctcagctgtgatcctagctagcccagacaccagtctgtacccaaaggaagagtaggaagttgcaaagggaagctggctaacaagggcttcttctgccctacttggcaaaggcccatacgggtggcctccgtggatatggagctccttcattttgttccaaaaagagctctgccaggctttaccattgccctggaggtgcacaggcgcccgtatactcgagcacaaccatgggctcaccccaagcgcgcacacctgcacccacgcgtaaggaagaaccacacagctatctctgtcggggaagaacacgaggagtgaagtgctttaggtg

SEQ ID NO: 1241433 - DNA, 4001 bp, Homo sapiens
agttcaagaccagcctggccaacgtggtgaaaccctgtctctactaaaaatacaaaaaagttagctgggcatggtggcgggcacctgcaatcccagctactcgggaggccaagacaggagaatcacttgaacccgggaggtggtggttgcagtgagctgagatcgcgccattgcactccagcccgggtgacaagagtgaaactccgtctcaaaaaaaaaaaaaaagaagtgatccctgaagacttccaatggaggggaaggggcaggggagaagaatgggttcttgctcttgttctgcttctcacctgatggtgacagtctgttccttgctgcccaggatgagccaggtgcagttggcaggggaggtgcggctgtcccggaccaggggcctctgtaaggtgccctgcacttctaagagcactgctggggggtcctcacaagctggagagaggaaggtaggacacgggtagtagacagcccctttgcatcccacccttccccttccgcttggaggcttgaggtttccaaaagtctgggctctgcaaggaggagcagagtatctgcccctgcccacacacagcctagagttacagccttctagcttcgctctttctctccacattcttcatagcttcaccagtaaatactaatatcacgaacaattctgacgtctgctttgtgccagccactgaaccaggaggagcaggaaatactgcctctaccctcagggagactacatcctggttaggacgatcaagcatagatattcccagaaaaaataaaatagtacatagcaactaccagatgaaggtccacaccgagcctcagcttccttatctataaataaaggctaaattatctcccctctaaaactttggtaggtcccatggaattcagggaacagagagtccttctcgactgctccctcattcccaagcccacggagccccagaggttccctcaactcaccatgatttggaaaaataatccggtctggatgggccagagcgcctcctagaggaggaacgagaaagggcaggagcgtgagacactccttaggagttttcttcttcacctgagcaactcaagggagccatccgggacttccgggcagttaatcggaagagggagtggggggcgggagagggctgcggcgtgggacttccatggaaggaaggtccggcagcagggccttgtggggttggtggggtgatctaggggaagccggagagaggaccagggcccagcggagcagctgaagacttcctgggggttggggccggcagtgctggggctggcggcaggggctggggggaatgggcaggcaggatagagtgcggggccgcactggagggagttagagctgctggcccggtgacagaaggctgggggttggtatcgtttcggttcttaccaaggaggaggaggaggagggtggccaacagcatcctgggctgtccagaggtgccggaagggtcccggagcttctgtggtctacccgatggggtcgcggcggagccccgggcgcccaggctccctggtgccgcctccccaggggggctccatggcccgggctcgacccgtactctggatgccagggctgggggcggggaggcggcggcagcccgggagtaggggcggtgcctttcgccaactttggagttgttttctccgtccgccgccgcactcttctctcccggggccggctcctgaagccccgggtctcggcactggggcgcgccctcgcctacagcccgcccgcaggcagcgagcgcccctggtctggcctggtcgccacctgccggggtttgagaccacttcctcttcgggccaaactttgccgactgtcagcccccagggccggccgggtgctgctccactcctccagcgcgtccagccagcggagcgcgacagggaagcgggggaggggaagaggtggctcggcccggcgccccggcccttgcccaggcggtacccccgcccgcccaggggttggagtagccggggcgggtgacaagcccggtcccacccctgccaatcaacgcacgggccacacccacttgctcgccttaacccctttcccggccctgccggacttgtcagacgggcccttgacttgcagcttcagcttccacatttaaccctgctttgtttaatccttggggtgtaacacgtttgtcgttacaggacatgtttgtcatatgtttgtcacacgtttgtcaaaggacgtctgcttattccataactgtgatgtctttcctttgggccctaagctctcagtacttttcttgtcccagggtctgagatccggcagcacttttcggagtgagactttattacagctattaccacacggtacggtaactatttattcgtcattcccgcccccgccccgccccttctctgcaaactgaaacttcccgtaggctggggcctagactgtttacctttgcacctacagggcttctctcctgctgagacacaggaagaactcaataaatggtaaataaatgaataagtacgccttctccatttgctggctgtgacctccaggaaattacttaacctctctgttctcctcaggtataaaatgaggcttatgatagtgcaacttcctcttaaggttgttgctaacatttaaggagagcaagttccctgacatacaggaagtgctccatatctggtagcaactattattatcagtcacagaaggtgtttctaatttgtgtgagctggaggttaccgatttcctgtggcactgatagataacattaataaacaatattgaagctcagaattttcagtgaaaaaataaacacaacaaatagcaaacaattttagatttttccacttttcaggcacagatctaagtaagcactttactaaatacttaggaactattttagtatatactaaatacattaacactttacaagcatttgcgggtttaatcctctaaacaaccctgtgaggtacatactattattacttccaatttccaaggtattccgagaaatgcaggcacagaaaagttaagtattttgcccaagatctagtacagtgggccctccatatcttgggttctgcattcgcagatttaactgatcgtagatggaaaatattatcaggggtggggttgggggaattgagtggaattgcatctgtttttttttgtttgtttgtttgttttttgagacggagtcttgctctgtcgcctaggctggagtgcagtggcgtgatctctcactgcaacctccacctcgcgcctcccgggttcaagcagttctcctgcctcagccacccgagtagctgggattacaggcgcccgctgccaccatgcccggctaatttttgtattttgagtagagacgggtttcatcatgttggccaggctggtctcgaacacctgacctcaggtgatccacccgcctcggccccccaaagtgctgggattacaggcgtgagccaccacgcccagccgcatctgttttgaatatgtacataatttatttccctgtcattattccctaaacaataaagtatattgactattcctatatgtatatttgagacagagtcttgctcaggctgcagtgcagtggtgcgatctcggctcactgcaacttctgcctcccgggttcaagcgattctcccacctcagctcccccgccccctcccccccaagtagctgggattacaggtgcgcgccgcaacgcctagctaatttttgtatttttagtagagaccaggtttcaccatgttggtcaggctggtcacgaactcctgacctcaggtgatccgcccgccttggcctcccaaagtgctgggattaacaagtgtgagccactgcgcccggccatgaagctagggtttgaacccagggaatctggctctggacagagtgcacattctgatcttaaccactttctcccctctacaaatgatataaaatagttttttgttttgttttgttttgttttgttttttctgagacagagttt

SEQ ID NO: 1241434 - DNA, 4001 bp, Homo sapiens
ctataaaaggtctgggtatagctgcagcatttcatttgctttctgagagaaatggacagtttccttggccactgaagatgtttctcacgtaattaaacaacagtttatacatcttgatcctattcttttttttttacagtgtgtttctttggagttaaaatggctatgatagcctcatcaaaaacagtcttcaatcccttctgggttaaagctgaacattccacatagcagcatgctcctatctcttttgctagtttctgtccttgttccacacatataggtttttctttcatatcactcagtcttgctaaagttttggggtcatctcggagatcaatctgagctcctattaataaaaagggtacatttggtgcgtattccttaagttccggtacccactcctccctcacattttgaaatgaggctggatttaccaccgagaagcatataaggaagacgtcggtcattgggtaagataaaggcctcagatggtcatagtcttcctgtccggcggtgttatagagtcctaggaggtactgcttgccccccacggtgacgctgactgtgtagtggtcgaagacggtgggcacgtactcctccgggaaggcgtcgttggcacagctcatgagtaggcacgtcttgcccaccgccccgtcgccgaccaccacgcacttgagcatcagcgcgccgggcccgtgagccatgatgctgctgccggccggcctccgggcatggtccccccggagcccccgccccggccccgggctcagcctcagcccgcctggagggtccgccgccgtcgccgccgctccacgccgcggggccgcccccccggccccaagcagcgactcccctcgccggaggggagagggccgcaggcccgcggcgctgccgccgccgcggtcgccgcccggatccccgccccggccccggtcgccgcgcccgcccgctgcccccgccactcggcgcccgcgccctctccccgtcccggcctccccaggaggatccgccggatcataagaccggccggccccgggggagacggcaactgtggggagggcggccgacctgcttttttaagctagggagaatattgtgggagaaagaattcactgaacagaactgcagttattttactgttccccaactggacagctgcttcatttgcgcttgtttcacgcaaaatttcagaaacttgaaacaggcgggattgccatccactactaaatagcaacactgtaaattcaaagtcgtaaaagtggggaggaaaaatagcgaaaaggtacactctcaaagctttcttctttcgggtccgtaggaagacgcacaggaccctggggtcgggctgatggtaggtctcaaggctgggagttcaggaacccccaaggcgggctttcgcctagggagcagccgggagcatgaggaccgagggtggcccgcgtctcggcttccaagaagaacgcgagactgacagggcctgcccacttcacgcacctcatagcgggtcccgcgcttgtccttcagggtggagatgagcaggaaggctcggaccggcggctgactcctggaagtctgctgacagaggctcaacacggctcggacgcccttgccccggttcctaagccccaaggcgggcaagtgccggctgatcacctccacctcacagtgtagcttcatctcgcccaacggccacaaccacgtcaagctggctttgaaacttcctccttcccgccacccggcgccgccatcggggtcctcgcgcacgcgggctgcccactgatctgcctgcctgttggactggtccgcgactcgggctgtcttagcaccgtgtctgtatgaagcccgcgggaaacggcttcccttctcccttagcagggccgggttctcgccgtggttgcgtaccgggactgaccacctggatccgggctcgcgcccgggaaaccggcagtcggcgggggcgcaacgtcttttcccccgagcgcgcagctggcagcggtggttgtttctgttcggggaggattccgagggtttcagctgttgacgctttacgcgttgcgggcgcacgtcgggccgctgtttcccgagggaaggcaggtgtgcctctgcgttacagggaaaggcacttagaactgtctgagtggccccgtaagccagcgagggcgcatttcccggcgcggacgggctgctggtggttttggtggctgctctccggaggcacacctggcacgtcgaaggggggctttatatggctgtatttgacttggcaattcctgctgaacaaataatttttcatggcgggtaggtggatggagtgtgactggcttaactgcacctgagacgtggaaagaccgtccagaccgcacaaggccttcgtactcttgattttcttgattgattgaactaggacggggcccggctggggagtgggaagcgcctggggagcaaatgttaagcaggcgctcacggtcggggtcgtggtcttgcctccttaaaatttgtgctctaggcgcctctctcaccttaacctaatcctagccgtatattaaacattttattgtgtctgagttatacttccgtaatggtaaaatgacgttcagaaataccgatttttcaatacaactgtgacaaaatgtgatttattctcaaatgagcgtccctatttacatgttgaacctgaagtgttgtcagttaattcctcattctttgaaacgtaatagttcctggaaaaaagtgattaagataaaattatggccgggcgcggtggctcacgcctgtaatcccagcactttgcggggctgaggcaggcaggtcgcttgagcccaggagttcaagaccagtttgggcaacatggcaaaacccagtctctaagaaaaatacaaaaaaattagccgggcgtggtggcgcgtgtctgtagtcccagctattggggaggctgaggtggcaggatcacttgagcctggggaggtcgagaggctccggtgagctgtaatcgcgcactggcactccagcctgagtgaccccgtctcaaaaaaaaaaaagaaattactttccctccatttagtattcttatatgtacatctagtagagcattaaaacgcgactcagcatttaagcaaaactttatggctaaagagaaaacggacactacaattttcagactattagactttataggagttacctgcttttgttctttgagagggtaataatgtagaaaagataataaaacaccagcctgaattattacaagtacattaaatggactctgaacttataggtacagttgggagctaggaaaactgtaaaaactgttataattttcattagagtagaaatgttccgccaggtgcggtggctcacgcctgtaagcccaacaatttgggaggctcgaggcaggaggatcgcttagcccagaagttcgagattagcctgggcaatagtgagacctcgtctccacaaaaaaattaaattaaaaaattaactaggccgggcgcggtggctcacgactgtaatcccagcactttgggaggccgaggcgggagaatcgcctgaggtcgggagttggagaccagcctggccagcatggtgaaaccccgtctctactaaaaatacaaaaattagacagagtgttggcgcgcacctgtagtcccagctacccgggaagctgaggcaggagaatcgcttgaacctgggagacggaggttgcagtgagccgagatagtgccactgcactccagcctgggcgacagagcgagactctcaaaaaaaaaaaaaaaaaagaagaagaaaaaattagttgggcggggcggcgcgcgtctgtagtcccagcttgagcctaggaggcagaggtagtgagcgaagaactgccctccagcctgggcgacagagcgagaccttgtctcaaaaaaaaaaaaaaaaagcctcaatctcagtcctttatttggtgttacttaggcttgggttgttgaagcatggattcagtaattaaataaatagatgaa

SEQ ID NO: 1241435 - DNA, 4001 bp, Homo sapiens
gtgtctccccaacccgatgccctaccctagacttctggacatcaacacagtccagccctgcctcctccccccaggttttgtctcctcagtgtccacccacttctgtctcttctgtcctcccggctccctgccctctactggccagctgcccttgccagccacctcctccctccccacatgcccagtgccctcaccagcactcggtcctcaaacttcttgggctttgtctccaacttcacatgatgttgttggagcacggccccttggctcaggcacctccggatgctgtctgagggggggtgggagcctgctcagagcttcaccttaccctggccacccccacctcccagagctctccagatagaggcagggtcagggtcaaatgggataagagagaaacagagagacaaagaagggaggacagggacagagggcattccttcttgggtgacttttcacactgtctcttttttgacttttctcttcctattagagagggagtagggtgtggagaaaactccggctcctgatgtccctgagtcaggggacggttgctgactgtctgtgggagggtgtgtctcacacttctgagggtgtgaagaatttttccaacccatgcactacaacagccattgacacatacaaagtgagtcactgtgtgggggtgtggggtgtccctttgactatattctaggtggtccgggtgtgagtgtctgcctttactatgagagtgtgcatgcctcctggagatgtcagggagcctgagtgtggcattggtggggacaggtaagtgtgaatgagtatgctgtggaaggggcacagagccagacacttcctctgtgtgtgttgggcggggagaagaattaatgtttaaatgagccccatacccatctgctggcagaaccacccagatatagtgtgtgtgtgtgtgtgtgcacgcgcgtgtgctggggtgccatctctgtgaagatgtgtttacacacgtctaatgattgtgctgtgtgtgtgtgcaggtgtgggagattgccacggcgcagcatgcctctgagtatccacgagcatcctgcgctttgcgtgggctagcctgtgctcccgtctctgggggtcagggttgtggcagtgctgggtggccgggcctgggtttgggctaggtctgagaaccatgcaaacgggagaagccttgatgtgtgggtggtgggtagcgagaaggaagcaggctgggacggggctgtgggaggcgagcctcagagaccctcctgctcttggttttagctccaatccagggcctcttccctgactcctttctttgccccactggcctgggcgctgcccagctcctaaggggctcttcagggccagttccggggcggggccgggaggagggagggtgttaagccacgcagcggtcaggaccaggggcagctcccatcgcagggaggggcgggcttggccccgcccggcggggaagcggggactctccggatgggagactggacgcttcgccgagggtgggctaggaacgccgagagtcagccccagggagcgccagggaactgcacctgtcaccgaagggcgggacgggcggctccgggacaggaaggtcccgaccgggtgaggcgaggcaggcagcggaggatgctccggggacagcgatgcccggactggaatgcaggggctgccttggagccaggatgcatggggtgaggggtgtgagacaccgggctgggatgcaccacggggaggaacgcgctgggtctgggatgctcccggacggggcgtcccagagaccgaggcagcctcgtaccttgcaactcgcgggtgagctccacgctgggcttggccatggcggccgctgctgctgaggctgctgcagaggagccgccgccgccgccggggagccgcggcacatgctagacccggcttcagcagggcccgggcgctgagcgctgcagcagcggccgagcccgctccggtcaggggcggctgcttgagcgctcctccccccgcctcggagcgccggctcccccgcccagcagggagagctgccggactgagcatgcgctccgcgctgccgagccgcgtgagaccccgcgcgcgctcgcgccgacccttctcgctggctcccgcgtgagctggccggtgtgcgtcgcccggtgtccgggccttcggggcggggggcagcgtccccgctttccatctactcaatcctcgggcccgtgggcagaagccatttcttttgtttgtgggcccgggcaccttgcagggcctttctctattccccaccggctcaggacccctccagcttgtccttgctgactcgggacctagggccatgctgggagagggcatggctggatctgggaggcgaggggcggggaggtgttagagagttcctccttccccaccctcgcccgactcgccctgcctcggggatccccgtggcgtcctgggagttcctgtcccaccttccttccagttggcagctctgcagacacctccacccctgaacatcacgctcaggtcctggagacagggaggagggctgggggatccagagatccagcctggccagacttctgctctctgctcagctaagcaccccgcactgagaaaacgtcgattcgattcaaagccgcgcaatcatctgcattttatttgcacctcatttgcaagttgttaatttgcaactctgctccttccactccagcttccttctctctcatctcccctcaaattccccagtggcctgggcaaaaaatatcttggtctttgccaaggtagactcagccttgtcagcaggcctgtcctgtgttctcaggggaggcctttacccaaggccacaacaacagcaggaatcccgagtaagacaccaccttgacggcagggaaggctggatcttttcacagggcagaactgatttgatgaggtgaacagtaaggtgagcagaggtgggaaaggccagtgggtgaatgcaggaacagcaccaggagctagagcccaactctggcctgtgggctgtctccgggtcctcagaggcgggacggggttcctccacccaccatcactgtttccccagtgaggtagctggcatcttcagagcacaggaaagacacgatgccaagagaatcctctggctcgcctaacctggggaataggggaagcaaggaagggagtaaaaatcaaacaggtctgcctccctcacctgggacacggggaatgaaatttgcttaatcaagaattatcagataacttttcaggatcagtgtacaaactttccgcctatcaaatagggttaccatgaggatatgctgttataatttagtataagcatactgtactctgcaaaaaccattacccataatattcaaatactatagagacactgttttttagagagctcaggacaccaaaatccaaagttatacaggtaaaatagtaattatttcatacttcaaaaaaatggtttcacatgtgcacacactaaagtatcagggagtctgtgtgacagtaaatggtgtgtttaaaatgattccatttgtacaggttcaacttagagacaattttttcaggaatctatacttgtcccttaaagtcaggatcatttggtgagaatgtgctaattcttattttatcagtgactgcatagttaggagacactttaatctgcctgccatagaatgctctagaggtgggcagagtaactcaaacctagaagggctgaattaatgcttctccattctagctgtaccttgcaatcatttgagaggcttaaacaaaaaaagaaaagaaaagacaaagaaaaacaaaaccctagatggtcaagtcctaccttggaccaattaaaaaagaatctttgggagtgggtggggcctgagcacctgcagtttaaaaagctccccaggtgattctaatgtgcatccagtattgagctacatgggctagatcattcactggagctctaggttgacaatcccctgacttattaatgagttatgaactag

SEQ ID NO: 1241436 - DNA, 4001 bp, Homo sapiens
tggtttcactttttcaacagtcggcggggattcggcctcacagtagagcattttatcgctgctctgtcgtactggctcaatttcaatctcatctggaagaaaaaactcatctccttgatgccaggaataaaacttgctggcctcccaataaagcctgccgctgccgcccctccatctctgctcccttcctctgagtcccaggtcctcaaggtgccaagccctgccagggcaagtccactctacaaacctcccttccccaatagcgctgcctccggctgcagggtctacgggagcttgtgaaaccaactcccttctgctccctggagaccggctgctccttcccccttccctgtctgaggcgtgccttggagatcggctccttgctcacactttcccattcttaagtgtttgggtgggttttggggtgtgctgttactctttcaggtgaaagggtgggtcccgatacataggcttccttattgtcaggcacaaatggtgccagggagtataaggggcagggcagggcaggggaggtgacaacttaggtcaaatagaaaataaaatggaccaggagcagttccagagagcaagagagagaacttgattcctaagaatttgacttagcttctcttccttccaatctaacattgatttgtgattaggaagaaggaggggcttgaaaatctcccttgggtcgaaatgaattactatgattaattcatagtaatgaattaatcatattcattgctgggaacagagctcccctcacaccagtcctctgcacttgctagatgtggttttaccacctctgggccattgacctgggatcagccataggctcctgaaagccatgggcttctggaagccacacataaaatccagagctcaatccttaggcactgacaggactcagtagtttcaagaagccatgccatgcctctgaatgacctgtcagaatttagccaacctactcattgggtgggctgagcatttgtggcaggggtcccaagttttgaccacccagattctaggatggtggggttcctaatgagtccatgcaggtctttcttaatccttgtccatagacccaggttccaacatttatctcccagactgtctgggatacacagtgcaggtagcagtggcctggtagttagaagacagacaacagcttggctgtcagactgctgagtgcccttagaaaagtgatgaatttctgagtgttaatttccttgtcaaacaatttagaattccattcaaccagtagaatgctggtaaattttaacaattgattctccaggaaaaaaaacaaacaacaccaaaaacatcctgatttatagtgttagccaattcatgtggtgtaaatattcccaatgtgactgatttcaaactataaatgtggtatcaactggcccacacaataaaaattaaagctggctagagccagtatgaggtagttgtggcatagcactgcagccaattcttcctgtttgccaaggcctgaacccaagtcagtataacaaatcatcctacttctagagggtcccaggtgaggaaagaagtgggcttcagggtcctgtgatcactaggtgttgtactgaggcagcagggacgggcctgagtggtgagagatgggatgccctttcaccttctgtctcaggctgaagaggcttgtcattgtccatggtgccaggaccctcttgagggcagctgccaacttcttgccacctctcgactgcttccctaagaagcacacctgtccattcacctctgtctcaaactctgtgaacttccctcacctgggggcatcccaggggagcctgcagttatccttccctcccagcaagccctgggaagagtaggctttgatgggaattggatgtgcatgaatttgaccccaactctgtctgggagaggtagctacttctccagctcatctgggagagtgggactgctctattgctgggagccctgttgaaaggatccccacccgcctgtgactttgtgactcaggagccactttcatttcatcttcaacattctgtgacctcatgcagtcattgtgattcacatggtggacctggcaacagcaggcttcccgccctctgggtggttctggcagtcacctgttctcatatgtctactggggccaagcccaggcttggctgtgagtgctcaggtgctgtggggggttcctctcagtggtgttgtatttccctctgagtcaggacccaacccaagccccttaattaggtgactgtgaagagctgccatcatgttcttctcgcaagagagctgtgcttcaggtatgaagtatttcagtgacgggtgaagtcagttttcttctgcccagctcttcttccttttttcttttccccgtgggagagcatcttaaccttggagctgaagatcaaaagcacagcgcaatgaacatatgtcctatcactacagtttgttgcagccaaagcattgttcaatccaaactatggggctgcctaccttgagacggttcaactagcattcccacactcggccattctcacatgtgttggagttgaagtccagttgcagtttggtttcgggagaatctggaggcacatttgttctttcttgataagttttcaggacatcaatggtcaggtcagtgactggagggtttgaggatgtgaaaattccttttttttttttttttttttgctactcagaatgaggaagatctagaaatgtgtgcaaggaaaacatgattagaaccatggatcagaagaaatatgtatacctgagatgttacttgttccttcaagcattcatgctgagaaatacatattgagtctctattacgtacgggcgctaaaataggcaccactgtggggaagggatgcagacatgattaagacaggacccttttaaggcatgtgcaatgcataatagaaattgacagggccaccctagggtgagggtcctgggcaaatatttttggtagagttcttgcttgtataaacaatttgagtcaccctaaatcggcatggcagcaccattctggtggcccaatctcatgtggtccttctaaagaaataccaaacagtccagggagagtgatcagctcctaggatgatcaggtagacatgagtcctggtgatcctcagggcatctggctggcccacactattgcagaggataaggaagcattaagggggagaaagagggatcagagagcatgtgtgtcctggtctagggctctgggtgctctacttggacggcaccatctggtctcaggtactgaagggtgagtgagaaaatctagaggtaggtgctccaactaagccactggatagaggcaccaccagcctggatccaacagcagcagggaaactgagatgggtctttggggaaatgcgctgggcgttcaggggagggtgaggtttcttcatattggggaacttgcttgggctctggacaagtagagtctggggaaaaggcatttccaggaggtcaggatgaaggaaggcagcagctccccgcataggagtgcaggctgtgaagacgagtagcagaaggggaggccaccagggccagggcagcttcagggagagatccgaatgcaattaaaaggcaatagggagacaatgaagatttttgaacaggagagtgacatcatcagatattttctttagaatggttgacagcaatattttttgcataatagtcaattctggaaaaaataaaaatgtttaaggaccataattttttttaattctttttttttctttttttgagatggagtctcactctgtcgcccaggctggagtgcagtggcgcaatctcagctcactgcaagctccgcctcccgggttcacgccattctcctgcctcagcctcctaagtagctgggactacaggcatgcgctaccacgcccagctaattttttgtatttttagtagagacagggtttcattgtgttagccaggatggtgtcgatctccggacctcataatccgccagc

SEQ ID NO: 1241437 - DNA, 4001 bp, Homo sapiens
gtataatggtggccactgaggtcccttaacctttccagagcccccacttgttctgcttggagaaaagccagagcagagatgacctcgcagctgtcagaggatatgaaaaaaatgggcagaaaccgcagcaagaactgaagtcagagttcaggaagggcttcctgaccgcacgggatgtgagagaatggcaatgtgcaacaaaggaagttaaggaacctctgcccagtgcatgaggacagaaagaatcccgtgaggcctgtgtttggggacagaaactccagggtcaaccagaggccccttcagacagaaactgggttgtccttgcctcctctctcaagctgttccccacccgcatctaccttgatggcctttcttccccacacccaggaccaggcactctaagcatactccctgctgttctagttcacaggtgctagttcatcccagttttggtagccctagcatgaccctggggactgggtttcttttgctgttttgacttctgtctgggaagcagggaggtgtgagcagtcgctaaagtagagcctggggtgatggtcagggtagccacttgagcggccaaccatctcagtttgttgggaaaccggcagggctgggacaaggagttttcagtgcttaaactgggaaagttccaggccaactgggatgagctggtcaccttagtgaccacagatgtgtacttgtggatgtcccctgaaaagaatcccattctacatcccccaatcaaaggggtcaggatctagaaccgtttttagacctagataaggattccaaaaggtgggggcagagaagtattggggaacgggctaggaatagctagcagcatcttagaaggagcccagacttggcaaagagaaaaagaatatgtggcacttctctgaaaaattattcctgtcctctaaatattcctgccattcctcataccccaatggccaacctccaaacttccctgactgagtgcttgctcctggctccttttcacgtcaggtggcctttgcagggaggatcagatggtcagggggcaaggtaagtctcagactcccagggcccctacaccactgtccactccttgtgtgcctgtctcatactcactggaccaaatacaagacaggcaggaaaacttccttttcaaaccccacagattcattttccccttcagagccatttcctcctcagaggcttttataagcctcagagaatggatcccattcctacccctcatccaagctcccatacctctccttccattttctcctttatttccagagtggttctatgggttggcctgtggaaccagggcacctgggctgaggagggcaggtcaagatgccactgaaggctggcactgcccagcctggcttgacccagcagggaactaggtggcttcagtacaactcaggcatgaagaaccaccaggggaagcacacttaagtcatcatctaatggcttcccagtgtatttcacaataacagctattggcaacaagtaagcaatgctggcacatgggtacatgccaacttgcaagcacacaatagtccttaacagggaccatcaccaccctcataatccctcagtttggaggagcctgggcctgccccaagtgtatagtaatcctacccagccagatccaaactctagtcaaagaagggtccccaaatgtcccagaacactgacctctggagggtgggtggggggtggaaagggacagggaagggcagcaggttgtagggtctgctgtcaaaggtcccattccggaccgtccttctccatcccaccccccgggtctccattgccgcggccctgccccaccactttcagctgaggggtagttcggagctccatggtcccttccctagagcggccgccccctcgggcctccccagagccttcgaagagccgcgtgaggaaacggggacctgcccggggcagcagatctccagcggtgaagacgtagagcaccgggttgacgctagaactgaagaaggccaaggccgtagttcccgctcgcgccgcctggccggctccgcccagcttcgccaaggccccttccggtggagccagcgctgcgaccgcctgcagaaggttgactgcgtggtagggggcccagagcaagccgaaggcaagcacgatggcgctcaccagccggcccacccgcgccccgtgccgcccggagccccagcgggcgccccgcagccgtgccagcgtcacgctgtagcagccgagcatcagcccgaaaggaagcacgaaagcggtcagagtctccaggctcaggtgggcggcggcgtggaccggcgacgggtggcacagctggcatacgcggtccctccacaggtggcggtagacggcggccgggacggcgagcaacagggcggccagccagaccgccagcagcaggcggcgggccagggccgggctgcgcagccgaggcgccaggaaggggcgggtgactgcgaggcagcgctgcaggctgagcaggccggtgagcagcacgctggcgtacatgctgagcgcgcacacgtagtacaccgccttgcagcccgcctggcccagcggccaggcctgccgggtcaggaaggccacaaagagcggcgtgagcagcagcaccgcgccgtcggccagcgccaggtgcagcacaagcgtggccgccagcggtcgcccccgtgcaggccgccagcccgccaagctccacaccacgaagccgttgccaggcagccccagcagcgccgccagcagcaggaaggctgtgcctgtggcccgcgaagtcttccagctcagcagtgtctcgttccctgggggacggtagcagaccgacatccttctgggcctacaggtgggtggaaggcgccacagagggcgttcaggggtggggcaaaaccccacctgtgatgcccgatgagaaggtgccatgcctcctccttacttccctgcagcctgcctcttttctgcctgggagtcctgacttccacgaggacccagaccccacctcaaacacaactccttcttggaacccagatcccctgctcccagtcagttgacctgccccactcctggcctccttcccagagctcagtggtaaacaggcataaagtcatcaccccaggctgtcactatctctaccaccactcctctagtctggcccctccttctttgtccagccccattctagcacatctgggcaaaactggatggtggggtgtaaagggacgtgcacagatctacttaccaagctgggagcaagcaggattgggggcctggagaagctgaaaggttaagcagcagtaggcgaggtgcctactcctgtcctgtgcctatcacatttgcagagggtaagacaagaatggggagggacaagatgaggctcatcctgggcctctcctggggcccctccctcaccctgctccttcccatcaccaacgcacccaggcgtccaggcatgtgagagcctgccttgccaggaaacagcacaagctgaagtggggcagtaagattccctggtggtggaaggaaataggaggactctgctgaatcctggtcctgcttctgttctcatccctcccccagctctggccccaatcctcccagcccaccttctgcagtgtgtatgttgcctggtctctctggcctgcagaggtgacccaaacaactcagtcccccacctgccttatccttgcctgtttccagtctcctggtccggctgagcccctggcctcctacctcctcccacctcttgcctcaggccctgccccagtcactccaccctcagggctctcaccgggctgtcaatgacagcttttccatgtaaggcatggtgctaggttccaggaggaacaggggatgcatggaggcataatggttagggagtcatgacacacaaccatgaagaggccccattaccaggctgcaccaggatacaagacaagaaaggaaaggatgagtagggacatactaagaagcagccctctcctcttggaaaagtcaag

SEQ ID NO: 1241438 - DNA, 4001 bp, Homo sapiens
tttctttggagattcctttgcaccttctttcatggctgcacactgtcccaccaccaccacaaccacggccgctcccaggaaacttacttacaagctttggcaggaactggttggaagctgatgccaatcccagggtcagggcagggtggtgtagcctatccctggatctgtcccactgccaaaggcctggccccaggtctaggtgctgtttgctaaatcagccagagaggaagtaccacagagcagaggacagggaagacgcatcttcctgagggtggggctgaaacccctacccactcccttcactaggaggggggatagtctgttttccagggcaacccagaaggcaggaggactccttagaggtggggccagatgagaagagaccaggaaggagcagtgagagaggaaagaggggtgtggggagtgagaaggctgggtgtggcctcaagatgcaggtctagactggataattgaacaaagtagtgaatggtatcatataggagaaggaggtatggtagccagagaagggaaatgggctcagattggaggctacaatgctgatatctttttgttttgttttgctttgttttaagattaataggaagtgtaggttggagctgtgactaggtcctgggtctgggtttgggttagataacatcatgatttaaagagggcacatcagtaaatgccgaagggggcagcactctgtccttggcttcagttcaagctatgatctaggtggtgggaagagggccatcttccagcaccccctttcctccccttacttaaagggactggttccatttaggtcaaccaattctccattctctttggtagaagccaaaatccaaatggtctccttggtatcacacagaatgccaattacttcccctttccccaagcacctaccttgtgcttgcccatgtggttaccctgctgagtctggatttatgatctgggcaaggagattggcactacctctttcctatcttctcacagcctactattcagttccactttagacacacaaagttgaggccgagctggcaggctgagcatgaggagcaggagtgagggagcaggaacagtgatgcctcatgcccaccctgccaagaggggaaaccagcaatgcagaaatggtccccttacccgtttcctggacagaggaatgtctcctttccttgaagtctcctgcaaaagctaaaaactaaaaattcctggcaggttgtggtggttcataccggtaatcccagcactttgggaggctgaggggagcagatcacttgatgttagcagtttgagaccagcctggccaacatggtgaaaccccgtctctactaaaaatacaaaagatagctgggtgtagtggcatgtgcctgtagtctcagctacttgggaggctgaggcaggagaatcatgtgaacccaggaagtggaggctgcagtgagctgagatcgcaccactgcactccagcctgaatgacagagcgagactccatctcaaaaaaaaaaaaaaaaaaaaaagaaactaaaaagtccttccttcaatctgaccatgggccttcctgcttccctttcaactctcacttctcaggaaagatgcaaagtataatggtggccactgaggtcccttaacctttccagagcccccacttgttctgcttggagaaaagccagagcagagatgacctcgcagctgtcagaggatatgaaaaaaatgggcagaaaccgcagcaagaactgaagtcagagttcaggaagggcttcctgaccgcacgggatgtgagagaatggcaatgtgcaacaaaggaagttaaggaacctctgcccagtgcatgaggacagaaagaatcccgtgaggcctgtgtttggggacagaaactccagggtcaaccagaggccccttcagacagaaactgggttgtccttgcctcctctctcaagctgttccccacccgcatctaccttgatggcctttcttccccacacccaggaccaggcactctaagcatactccctgctgttctagttcacaggtgctagttcatcccagttttggtagccctagcatgaccctggggactgggtttcttttgctgttttgacttctgtctgggaagcagggaggtgtgagcagtcgctaaagtagagcctggggtgatggtcagggtagccacttgagcggccaaccatctcagtttgttgggaaaccggcagggctgggacaaggagttttcagtgcttaaactgggaaagttccaggccaactgggatgagctggtcaccttagtgaccacagatgtgtacttgtggatgtcccctgaaaagaatcccattctacatcccccaatcaaaggggtcaggatctagaaccgtttttagacctagataaggattccaaaaggtgggggcagagaagtattggggaacgggctaggaatagctagcagcatcttagaaggagcccagacttggcaaagagaaaaagaatatgtggcacttctctgaaaaattattcctgtcctctaaatattcctgccattcctcataccccaatggccaacctccaaacttccctgactgagtgcttgctcctggctccttttcacgtcaggtggcctttgcagggaggatcagatggtcagggggcaaggtaagtctcagactcccagggcccctacaccactgtccactccttgtgtgcctgtctcatactcactggaccaaatacaagacaggcaggaaaacttccttttcaaaccccacagattcattttccccttcagagccatttcctcctcagaggcttttataagcctcagagaatggatcccattcctacccctcatccaagctcccatacctctccttccattttctcctttatttccagagtggttctatgggttggcctgtggaaccagggcacctgggctgaggagggcaggtcaagatgccactgaaggctggcactgcccagcctggcttgacccagcagggaactaggtggcttcagtacaactcaggcatgaagaaccaccaggggaagcacacttaagtcatcatctaatggcttcccagtgtatttcacaataacagctattggcaacaagtaagcaatgctggcacatgggtacatgccaacttgcaagcacacaatagtccttaacagggaccatcaccaccctcataatccctcagtttggaggagcctgggcctgccccaagtgtatagtaatcctacccagccagatccaaactctagtcaaagaagggtccccaaatgtcccagaacactgacctctggagggtgggtggggggtggaaagggacagggaagggcagcaggttgtagggtctgctgtcaaaggtcccattccggaccgtccttctccatcccaccccccgggtctccattgccgcggccctgccccaccactttcagctgaggggtagttcggagctccatggtcccttccctagagcggccgccccctcgggcctccccagagccttcgaagagccgcgtgaggaaacggggacctgcccggggcagcagatctccagcggtgaagacgtagagcaccgggttgacgctagaactgaagaaggccaaggccgtagttcccgctcgcgccgcctggccggctccgcccagcttcgccaaggccccttccggtggagccagcgctgcgaccgcctgcagaaggttgactgcgtggtagggggcccagagcaagccgaaggcaagcacgatggcgctcaccagccggcccacccgcgccccgtgccgcccggagccccagcgggcgccccgcagccgtgccagcgtcacgctgtagcagccgagcatcagcccgaaaggaagcacgaaagcggtcagagtctccaggctcaggtgggcggcggcgtggaccggcgacgggtggcacagctggcatacgcggtccctccacaggtggcggtagacggcggccgggacggcgagcaacagggcgg

SEQ ID NO: 1241439 - DNA, 4001 bp, Homo sapiens
tgccactgaaggctggcactgcccagcctggcttgacccagcagggaactaggtggcttcagtacaactcaggcatgaagaaccaccaggggaagcacacttaagtcatcatctaatggcttcccagtgtatttcacaataacagctattggcaacaagtaagcaatgctggcacatgggtacatgccaacttgcaagcacacaatagtccttaacagggaccatcaccaccctcataatccctcagtttggaggagcctgggcctgccccaagtgtatagtaatcctacccagccagatccaaactctagtcaaagaagggtccccaaatgtcccagaacactgacctctggagggtgggtggggggtggaaagggacagggaagggcagcaggttgtagggtctgctgtcaaaggtcccattccggaccgtccttctccatcccaccccccgggtctccattgccgcggccctgccccaccactttcagctgaggggtagttcggagctccatggtcccttccctagagcggccgccccctcgggcctccccagagccttcgaagagccgcgtgaggaaacggggacctgcccggggcagcagatctccagcggtgaagacgtagagcaccgggttgacgctagaactgaagaaggccaaggccgtagttcccgctcgcgccgcctggccggctccgcccagcttcgccaaggccccttccggtggagccagcgctgcgaccgcctgcagaaggttgactgcgtggtagggggcccagagcaagccgaaggcaagcacgatggcgctcaccagccggcccacccgcgccccgtgccgcccggagccccagcgggcgccccgcagccgtgccagcgtcacgctgtagcagccgagcatcagcccgaaaggaagcacgaaagcggtcagagtctccaggctcaggtgggcggcggcgtggaccggcgacgggtggcacagctggcatacgcggtccctccacaggtggcggtagacggcggccgggacggcgagcaacagggcggccagccagaccgccagcagcaggcggcgggccagggccgggctgcgcagccgaggcgccaggaaggggcgggtgactgcgaggcagcgctgcaggctgagcaggccggtgagcagcacgctggcgtacatgctgagcgcgcacacgtagtacaccgccttgcagcccgcctggcccagcggccaggcctgccgggtcaggaaggccacaaagagcggcgtgagcagcagcaccgcgccgtcggccagcgccaggtgcagcacaagcgtggccgccagcggtcgcccccgtgcaggccgccagcccgccaagctccacaccacgaagccgttgccaggcagccccagcagcgccgccagcagcaggaaggctgtgcctgtggcccgcgaagtcttccagctcagcagtgtctcgttccctgggggacggtagcagaccgacatccttctgggcctacaggtgggtggaaggcgccacagagggcgttcaggggtggggcaaaaccccacctgtgatgcccgatgagaaggtgccatgcctcctccttacttccctgcagcctgcctcttttctgcctgggagtcctgacttccacgaggacccagaccccacctcaaacacaactccttcttggaacccagatcccctgctcccagtcagttgacctgccccactcctggcctccttcccagagctcagtggtaaacaggcataaagtcatcaccccaggctgtcactatctctaccaccactcctctagtctggcccctccttctttgtccagccccattctagcacatctgggcaaaactggatggtggggtgtaaagggacgtgcacagatctacttaccaagctgggagcaagcaggattgggggcctggagaagctgaaaggttaagcagcagtaggcgaggtgcctactcctgtcctgtgcctatcacatttgcagagggtaagacaagaatggggagggacaagatgaggctcatcctgggcctctcctggggcccctccctcaccctgctccttcccatcaccaacgcacccaggcgtccaggcatgtgagagcctgccttgccaggaaacagcacaagctgaagtggggcagtaagattccctggtggtggaaggaaataggaggactctgctgaatcctggtcctgcttctgttctcatccctcccccagctctggccccaatcctcccagcccaccttctgcagtgtgtatgttgcctggtctctctggcctgcagaggtgacccaaacaactcagtcccccacctgccttatccttgcctgtttccagtctcctggtccggctgagcccctggcctcctacctcctcccacctcttgcctcaggccctgccccagtcactccaccctcagggctctcaccgggctgtcaatgacagcttttccatgtaaggcatggtgctaggttccaggaggaacaggggatgcatggaggcataatggttagggagtcatgacacacaaccatgaagaggccccattaccaggctgcaccaggatacaagacaagaaaggaaaggatgagtagggacatactaagaagcagccctctcctcttggaaaagtcaagcaaaacttggaaatgaagagatttgaggggggcctggcagatggatagagctgggggaagggaaaagaaaggcctctgctcaagtaacagccagaacttgaggttgcttggggagggcaccaggagcactgtcttagtttgggttcttccaaagcagagcttgagctaagggcttgggtacaggtgatcctgtattcttgagctaagggcttgggtacaggtgatcctgtatttgggaggttaactcaggaagtgagggcataaggtaaaacaagagagaggaaagccattaagagtatgttaagtcccttcagtaggccttgggaacctctgagaaaagtatagattgcccaagacaaaagactggcagggtgatcagtccaaagcatttattaggagaatgtacttaatgagtgggctacagcgtatcctcacaacagacagtgagagagagttgttctacctgggtatatccaaaacaagggggtcagggtatggagtttacgagggttcaaggtatttggttcagggccagggccagtttttttcagtgttttgggcaacaacctgaataccttttcaaggctctggcttgggctcaagcctgcaggggaaatgcaactggccaggtcacagggcaatcaagttactctgtgtttctttgtcaggacacagaaaaaaagtggggaagctgggggaccctacaaggatccttggcaggaaagcagggattgtgttcatttgagggtttcactgtcagtgagagtctcagcttccatgcaactgtccatcacggctgcaactgaaatcagagctgggacacagcgcaccagaagctaaagtcttgatgccatcaaaggacatccctgccccattcacatctctgtcacgtccactaatcggcaaaaggagaaaagtgagagaagatgacctaagtgtgactgcagcaggcagctctggaaaatgaagccagagcagtgagccagcccctcctccgaccaaggaggaaggaaagagcaggtaagcaggaaggccagtgtcccagacaggaccctaatgatcctgaatccatgtatcaggatccatcctctccttacacccttcctggacacagtctcacctctcattttccaaagccctgccatgctgccatcccacttccccacactctgccccgggttcccttttcctaaagctgcagcttatggcttctccagtaggtggcagcacacacagagccactcataaactgcagcttctcagagcctgagagccagaaaccgtccccagaaattccctccatagaaataaaaaaacaccagaagtcacatttcatccttttacatgg

SEQ ID NO: 1241440 - DNA, 4001 bp, Homo sapiens
aatcctgctgaaatatgagaagagcgctccagccaaggaaaacagagcgccaaggaaaacagagcgccaaggctgcgaagtgcaaggtccttggagtaggactcggggtacaagtgtctttcatgctgttccccaggactaaacccaactggcaaatcgggcccaggcaaagagaggctgccaaagcccttcccagacttcccgatggtgcccccacccagcccctcactgcccagggctcagtgccctccattccagaggcacctgccatacccaggcaaggcggagcgtgcccgcagccatgatgatccgattggggatggggattactggggcatcttctcactctgcgacggcgcccgcggtgggcagggggtggtgcccagggggagcaaaaaagtaaattgcagggttgtgcggtggcttagccctgcaacgcgcccaagtcacgcttacacctagatgcacaagagcacactgatccaattctccacgcgcccactgtgtcgcagcctcatcaggacacgcttcccgcccaaagtacccagagctcacgcccacgcccgcatccagccctcagcgtgcgcaggccgacccacgccccacgacacttgtcccgacgcaccagcttcgctgccggctcccctcctggagacgcatctaccttctctccatggggcccccgacacctccgccaacccgcgctctgagccagctcaacctcccctgggcgtcaagagcctggagcgcccaccctcctgccctctccccgctgcctctcagatcccggcagcgctgcaagagtctacaagagctcgttagttgcaggcaggaggaacgcgggcgagtggagaggcgccttgcgaaaggatttaacgtcggggctccgggagagttggtaagaaaggatgaggatgatgatctatctgccttcaactcttcgaaagcggatcaaatcttccaatcccgattttggaacctcggggctgtttcccgaagtactaaagacagagggacgagggtatgagagcggcgccctctcctctcgcctgcacgcccctccacaaatgagccctggctcccctctgtaccctccaaacttccctctcccatgctcaccccgtgagccgccctcgcggcggggttgggggcgcagccccagaccgctgtggggtccccaggcgtgggagagccggcgcggcccgggtccggggtgctggttgctgctggcccaggggagtgcttctccgggtctgcgcaggtggctggacacgccgcgactgctgcgcgcgggacggcctcctggcctccgcctcggtgggcctcctggggctcccccagcccggctgggcccgctccacgggctgcaagcccgcgacaggcgcgtcctgctcccggaacagactgtacaccttggctgcagccgctgccgggtagctgcccccagggcgccgcagtcgattcgcgtctccaccagccggctcgtatctccctacggggtccctttgggcatgacccgcgcccacgaagagagccagggtgagcggcaggaagcctctccaggggttccgcagggcgcgccccgggctgcgggctttggtccgcggcctcatggcgcggggcggctggagagtggtgcgcgcgggcaccgcgaagagctttgtggtcggcacgctggacgcccgcgggctgttctcccggccccgcccggcggccagcttctctgagtctagggggccctgaagcggccgactgggggcccggctctcggcggaacgagggctgcgcgccccgagcctcgagtccgcgctcctactccagctgggctcgcacggctgctgcaccttcgcgcctcctccctgtgcctgcagccgtctgaaggggacccggacggttttatttttggaaacctcccccggctttttcgtctcttttatccacaccaggccccctcctcggagggacagctcagccccctcattaccggagagggagcgaggaattccagcaacacccactttggcaccgggaagccagcgggcggcgagcgggcggcgagggggattaacccgtgcggagcagggggcggcgcggggctgacccaggcgctggtcgggcagatggcgcctgccacgaccgggacactgggccgcctttctcctgctctgggcaagttcgaactgcagacctgccccgaatcgttctcccgcccctcgcctcagggaccgtctttggatcgggggacccaggctgcagccttgcaggtctgaaggaagccgggaggggcgccgaggcccgcgtaggggaacagggccgccgccccctccgcttgcgccctggccgctgggggcgccctccgcagggccggccggagcgggggtggcgcggggcggggcgcggcgcgcggagcgcagggaggtcccgggcgcgccccctggcggagctggcggccctggcgctccgtggctgcaatgccctggcgccgccgccttcgctctggatctcaatccccttccactggcgtgagggtcacgcctgagcctggcgcggtgatggctgccggtagaagaggggtcctctttttctttttctttttcttttctttctttctttctttcttttttttgagacggagtttcgctcttgttgcccaggctggagtgcaatggtgcgatctcagctccccgcaacctccgcctcccgggttcaagcgattcccctgcctcagcctccctagtagctgggattacaggcatgcgccaccaagtctgactaattttgtatattattttattttttagtacagacggggtttctccatgttggtcaggctggtctcgaactcccaacctcaggtgatccgcccgcctcggcctcccaaagtgctgggattaaaggcgtgagccaccacgcccggccaaggggtcctctttttcaccgaggcaaagacacggagcctcttgagtaagtcactcaaggagatagcgcatgtgaaagaggggagtggaatctaggcctcccgcctctggctgaatccattcccgggatcccacccagcccttcactctctcgggaatttcccagagggggattcggtgaccccgattgacccagtgtgtgcattcacatcttgtgttagcagggaggcgggcaggggtgtgggaatgctgactgccgctgtctgcgtgtccccagtaatcagcacaccattctcacccatgctccctccctacagcctaaaggcttggatcaacagggctgcccctggcacatttgtacagcctatttcccagagaggcagagtgaaggagctggcatgtgggcaccagttcacaacctcccacaccacacaaaagacaagcccaggtaatatctactgttgaaataaagcctcgacccctggccttggcctacaaaccctagctggctgcccccgctctgatttcatctggcctcttgctctcccttacccaccacactgtgctgccttggccctctctctgctccttgaacaagccaagtgaatgcccccttccctctactggaaggttcctctccaggatgttagagggtagttcctcatcactgctcctctcagattaaatatcagctcctggagtagccatccctgacctccaatctagagcagccctccctcaccccagtcatgactctaacacaccaccctgtttcatcttcataaaacagttgacatcatcttgttattgatttgtttgctcgtgtaactgaattttttaatgggctgaacctaaagagggactatccagaaactgctccactactaccttcaaccatattatggtaaatttccctttcccacccttaatgacatctcaggcagagtccttggcttgagaggtcatccctaccagacacgagaactattctattaatataattaagacccattttcagacacaaaaagtctgctcctgtccagatcaaaatctcatccaagttaatcaatatcacatcccatt

SEQ ID NO: 1241441 - DNA, 4001 bp, Homo sapiens
gatattatgtgctagtttttaaaaaacatctaaagataggccagacacggtggctcacgcctgtaatccaacactttggaaggccgaggcgtgcggatcacttgaggtcaggagttcgagaccagtttggccaatatggtgaacctcatctctactaaaaatgcaaaaattagccaggcatggtggcgggcgcctgtaatcccagctactcaggaggctgaggcaggagaattgcttgaacccgggaggcagaggttgcagtgagctgagattgcaccactgaactccaacctgggagacaacgagactgtctcaaaaaaacaaaaaaactcaagattaaagtaacacaattgctggggtaaaaaataacttacagagccaaaaacgtaactgttacaaaggaaatcttaatatttaaatatttaaagttggtccttgctaatgacgttttaaaaaatcaactaagatgaaagtatacaaaataaggaataaacagtaattaatacatattaacaatacctttttaacagataagagattatggaaactctcaaatacaaaatagtgtaaactgcactaaagagatatttacatgtttttttctgaaataaactagtatgattaagggattgtgatggcaatttaactcccttgaaaaaaaaagaagatttcattatagggtatgaaatatggggctcctggaaaattgacggaaaccaggacactgggagaaaggccctgggagggacccctgagcatggtccccctgagatttgaccagttccaaagataggcaaggatctagaatgagaagaaagaagaaaatgtatttcccaaacagcctcactgtcaaaggactgggattcagccactgtaccttgcaatcctgatctcccatgggggaacgacatactttttcctctctaatcatcacttgtctcacccccactctcaacacacacatccctcttagcacattaatcagtgagactcctaaaggtacaacttctgagatataagaaataggatccaagaaatcaacccgacattttacaggcaactgagccttgagttcacacatgcttccgggacttgtgagccagctcagccctgcggagacacccccatctctttgaaagcaaatgcctttaggaggcggggacaggcgttagaagaggtggtggcaaggtccctgatttggggactaaggctaggacactaaccaccatcttgccataaacacttccagattgggaatggggggcggcgggggggtgggtaagagaagggactgggaaactggcaaattctcagactgggacttcaggatgtggaaatcgggagccactgctgaggtggccaactgaaggtgaagaagcccaagcgtctgaagtgcgggcagggcctgaggcgtctcgagcttatccagcaagcaaagcccgggcagcctaagcgcgcgccacccacacccaggtcaatcgtcctccccaccccccgccctcatcccagccctcgcgcagtgctccccccttccccgaccgccccccaggcctccgtcattccccctccccgcccggccccgccttcgccttacactgaatgggcgggtagcaactggggtcctcgccgccgggctggcagcggctggagaaggcgctgcgcggggtcacgtagttgctggggaagatgcccacccgctggttcagctgcccggtccaccagccctcgtcgccggacacctgcgagtccttggacagcacctccaccacgtcgcccagccgcagggtcagctcgtcctcgcccgccgcctcgtactcgaacacggccgtccagtagggcagcggcgcgtcgcagcccagctccccggggcccaccgccgccgccgcctcctcctcctcctcctcctcctcctcggccccggcccctgctccatcctcccccggcggggcggcagcggcggcgctcgctaggcagccgagaagcgctctggagggctccatggagcggccgatccatagggtgcggggccgccgccgcccgcaggagccgccgccgcctattgttcatgcgcctccgcagagctgggaggacccccccccaacgacggcggccgcaggtagggcccgggctggcagggctgggagagccggctcgccggcgctgttaccgcggtacgagaagagcgccgagcgcgagctcttcgcgcagcctaggggcgcagcgggccgagtccccgcctgcccgctcgcccccccgggggcggcctcgtcacctctgccgccggtacctgctcgcgcagccggtgcccgccgctgccagccggccgccgctctcctctccgcgccgtgccgtgccccgccccccgcaccgccagctcgccgggaccacctgacgcgggcctggctccgccccagccctgcggaccccagggggctccgccccacgcccgccccgccccgcgcccgctgccttcccattggctgcggccgcccagtccccggttcctccgccgtggttggggcagcctagctggccgtctcgcaggtccctctcaccccctgcgccgccgtcgcaccgtgccctcccccattgcgggctctgtcattctcaaacccaggtcgacccactcttcccgcccactggcccgccgcagctccctccattggctcgcggcacctgtccgtttcctgggagagttcagcacctcccggcaggaagaggctccggcctcattgggtgcgtgagaagggaagggtggatcctaaaaggtaatactgagccttcattcaaactaaaaggctggaagggaggcagctgcctttgtttgccatggatgggtaggggctgcactgagcagcaccggtgttcttcatccggctgcacccccaacagagctctttcttccccagatcccttttacagttggattctccctcttggatctggctctgccttagtccgacctagagggatcagcttcgcccacgcccactctcacccggaacctttcatctcttattgaagccttttaggcccattgggatgttcattagaactctgaaaactacagttctcccctttatgaggactgcaccacagctcgccctctcctgggttccggtaagaagagattccaataccactcttttttcagaattcagaaaggcaagagaccaccttactgagcttcaaactggggctgggaacgctgccatgaattgggcttggtctgtctgaagggagccaccttttcgacaatccttagacttcttttgcctgttggaattacaccttggatcgtggcgaagtctatagaggtcagattaagaagaaccaaagcagaataaacgtagaacccgatgctgagttcacgagtgaggacgacctcttcctatatgctttgctataccctgcgttttgaacattaaggacgagataggaggcccataatgtttcttcttgctttaatcctgtcgtggcaacgttgacttccagtaagaaaggttctctgatctttttttctcttttcttttcttttcttttcttttcctttcttttcttttcttttcttccagggtctcagtttgttgtccaggccagagtgcagtggcgcaatctcggctcactgcagcctcaacatcctaggctcaagccatcctcccacctcaccctcccgagtagctggaagtacaggctcgtcttgaactctgggctgaagtcatccacctgcctcggcctcccaaagtgctaggattacaggccttagccacctcacctagtcctctgaaatttctaaataagccagtgctgaaggatctagcccaacttctaccaaactttgttaccttttccccttcagtggtaggaatagacatgatttatttagcaagggtgagtgcttttgttgaattttagtttggggtttattattacacaaactaaagacagcggggcaatttggaaagataactaggcagctgcatgacttcaggcaggtgtcc

SEQ ID NO: 1241442 - DNA, 4001 bp, Homo sapiens
aatgagctctttccaaattcctgacccaagtctccatgagcttaataaaatgttcttgtttggggtcgtttgttctgaagaaatagtaatggaaacagtaggtgatacactgtgagtctagtctcatatctgctgctgctcttgaattttttaaaaaggaaaaactaccttttactgagcatttactttgtgccaggcattatgctaagggtttacacacataacttcatttaatcctcattataatgccatgagtaaatactagaattatccccattttacagaggaggaaatgggctcagggtcgaggactttgcccaaagccaggtctgcctgattcagagcccacaactgtaccagcccacaactgtaccagcccaggttctctggccacttagaaagaggagctgtttcacatggaagactcaacttcttgggagcatggctttcctagtcaacattccaggtctgggaattgcctaaagaacccaggtgatgggacatggcatcagtgaacacttggctctgtctgagctggggcaggccgccttccctgggaggtcatagctatggcctacctgccctattaccaactcttgaatcctaccccttctttgaggcctaattgttccatcaaggcctcccagggaattctgccttctccagaccccatctcatgtatcttgacacgctgccccctactacatcacactgttctggttgtttaggatgtgtttacatagcacaactcctaaggatggaaagaatgcagtggaagtgacctctatgttatgtatataataaattgaccgtatttcttacagcatgtatgcaatagcaggcacgtcaatttcttatgaggacatttgggtaataaaattacccacatcggttgagaatcatgatctatacaaaaagaaaacattccaggctctgtgacctgcacttcaccccaggcattgcagaggagaaaggatttgagggcagaggaggaagcggtacaagccaccacagataccaccttcatcccatcaccttgcaggcaaggaagtcccaaccacaaaggctcgaaacactgggagttgccattgtgaaccacaagtccttaatagccctggaaagctatgaaacaccaattaaagtttcctatgaatcacttttcaacctctccatgtaagagcagggaggaaccaacctcaagtacctcctcaggccaagactagctttgctctgactcactgtctttcagtctatgatatggatgcttttctaattccttcctcccacctccatgtccattgcatggggaagatgagacttcctagcatcttcctagtctacctctgaatattactctacaaatcctgttccccatgagacagagttgaggatctcaccatggtagggaaaattcaaaactatacaaattctctagatgttacacctcagtttccaggtgaaagccagtcctttccttccttccctgctacctggaaggtgggcataacaggcatacccagaaactgctgggaaaacgctcaaatgccgtgttctctgccttcagtgaatgcccatgtaaggaaaagtcttagaatatcttatttttcctcagtggggtcacttttactcttcctggaaggtcattatcccagtctctccaccaatatactacacatcaaatcaagcatcaaaatgcttgtaagaaacctaaaattggccagattcatggtccatgcaactagagtcaagcatataaagccacagactcacatgttagaagcccaggacagtactgtgtccaaacaacggtaaggtgggaaggaagacggcatcctaaagtaaattcaaattagtctgactcttatttttcttgagcatccaaaggtttcatatgatccacagcaacgcttcctcaaatacccctttttaattccatccactgtccttatagaaagaagctccctcatttcctgctcaaaattcctcccaaaagagctcctgaaggattcactctttgtcccctcccctttcctcccatcacaaagctctaaagttccaggagcagcaaaatccaaattctctttgtgaggtgggcgaaggaaatagccgggaggcttcactcattgatagtccaggtgttattccaccagcaatcaatccaaattggagcttcaaggaatgaacagtgaagtcaaatttgtctttcatagtattcatctaaaagtgttaagtgggcaccacaaagcatgctcagcgctcctccaggaggaatggaactgctctcttgctcacgcatggtccatttggccataaattcagctgcaaagaaacaccccagaaaggcccgctcacctcccagactacacagagctgaaagacgtggcatctgaataaccacacagggctctgcaattaacagacgtgtccaaaccctttttgaatgtttatattacttttctggttaaaattttttaaattccataaacaatcatctgtgaatgtatctgaaatctatatatacttcttttgtttaaacaaaaacaaaccacggccaggcgcagtggctcacgcctgtaatcccagcactttgggaggccgaggcaggcagatagcctgaagtcaggagttcgagaccagcttgaccaacatggtgaaattgcacctctactaaaaatacaaaactagctgggcatggtggtgcatgcctgtaatcccagctacttgagaggctgaggcaggagaatcgcttgaacccgggaggtggaggctgcagcaagctgagatcgcgccactgcactccagcctgggaaacaagagcaaaactccgtctcaaaacaaaaaaaaatactaaaataaataaaataaaataaaaaacaaaaccacaacacaaacacaagtaagtacaagagcccaataacatggaagcttctgcgatggcccaacttctggacagctgtatgcaagcacaattttggttcaggacaaacactaacaagaagcaaagctgaagccgggcacagtggctcatgcctgtaatcccacaactttgggaggccgaggtgggcagatcacttgaggacaggagttcaagaccagcctggccaatatgttgaaaccccatctctactgaaaatacaaaaattagccaggtgtggtggcaggcgtcagtaatcccagctactcaggaggctgatgcaggagaactgctcgaacccgggaagtggaggccactgtactccagcctgggagacagagtgagtgagatggaagaagaagcaaacctgaggctacagaaggatggctgaggttcaaattgtgcttttggaggggccctggggaaaagagaaatgagaaactagctctcaggtcttgtgcattttaggaccatcaggtctggaggtaccagaggtcctgggttggagaaataaaggatcccctatctgtagttcgaaatgtggggatgatctaccccacaaagtccccaagaccaggtttaatgtccaggtctagccctgttgcacccagactctggtgagtcacagggtccgtcctgcagaacaaggtgctagagaaggatctcctattgcagtctgtttccaacaagcagagcagaaagaaaaccatgcaagcactcaagagcctggtatttgagtccaggccctatcattctctagctatgtgttcttgggcagggcattgttaaacctccctgagcctcagcttcctctgttataaaatggggatactaccacctcttcctggagtacctcaggtagatactgtttcaaataaaattctaaaggaccaaatacaaagcatgattacaggagtccctccttatcttcaggggacacattccaggatccccagtggatgccccaatccatggatagaaccctgtatatactgttttttcctatacattcatacctatgataaagtttaatttataaattaggcacagtaagagattaacactaacaataaaatagaacaactat

SEQ ID NO: 1241443 - DNA, 4001 bp, Homo sapiens
acactttgagttcaaaggtattcacaaggtaagagccagaaccttgctcacaattcatcacctcagtacctctaccagtgcctggtacagaagactcaaatgcttgtttaagcaataaaaagcctatccattacagtttatctcagtagaatcaaacagtgctagggctgtttgataataccactaccttgaaatgctaatattaattaggaggaaattaaaagtaagtagaaagaggggaaccacctgtgcaaaacaacaacctaaccccagaggaatctactggttaattacccaaatgacacaaaaccacttcagcgatatgcagaagtgttgtttggcacaatgcgatatatatcatgatcaaatccaataaacaacgccgttgcaaaaagcaaaggaatttgcccttaatattcataggctgcactaatgctccctttttggaacacacaacaaaaagcataaggcaatctcaatctctttcctctgaaccattcaagaactcagcggatttggggaattgggtttgcttctctacaatgttttttaaaatcctaaattaggtgtaacttactctcatcgtttgtcttaagtaatacaaaacagcacaatacaaagacagcggctcatatccactcttggttataggatgttataaatccctgaaaggaaccgctaaagtaaaacaaaacccagcaagttaatatcacatttttatcgccaaccaaaaacaaacgatcaaacttccaccaggaaaagcatctttttatatgggataatgcttgcataaatgtcaccaatattagtttgcttacagttaaagctcagagacagggtttcatatggcttttttagtcaaactcatccattgaaacaaatttttttaaaaaaatgcaaatgtctgaatgtcaatattctttcctgtctatcttccatgaagcatttttccatgctaacactagagcatccttcggtgtaattccacaagcagattcaaattcccttcaataccataaataagccctattaaaaagcctttaaaccacaaaaaaagtgcaacagcggtttgcaactgtgtggttagttctgcctgttggtagcgattagaacaagccatgagtcgagggtgctcagaaccgagtaaaagggaccccggccgctttctccccaagaggcaacaataaaagcatcctcctctcgccccaatacttcgcaggaaagtggccccattcccgggacccagtcgaccgcaggaaaaaagcacggccagcctcacttaccttatagacgtccccgtaggtgccgctgccgaccctctggacgagttcgtagtcctgctgcgggttccgcctcaggatgtccgcggcaggccgcagcggggcctccatcttcacttagggcccggcccccgccagctcaccccgcggctcccggattcccgctaacaagcacgaacggcgccgcttcccaacatggagcctccgcccgcagctccgtctgcacgagggacgagcaaaggctggttggcgtcgcaggctacgacccccagcggcccgcgccctcgcggcccggccccttcccttccgtcccgccaggggccgtggaagagaaaggggcctggaagggcccccggcgccccgtatccccgttcggtctgcggcccttccccctccccggccgcccgcgaactgcccgacgaggcctccccgccagccggggcccagggccggctccgtacctaatgggggcggccccgtctttgttgagcgcggagcccgggacctacttcctagaccgcacccgcgtcctcctcccgcgcgccggccggcagctccgggtttgccgtcgccgccgccgccactcagccgctgcacggcgcgtcctctcgggggcggcggaggcgcgtacagtcgccgccgccgccgccgccgcaccacgttccccacccggggctgcgtcaccgggagacacgttcccagccagcatgggtcggcgcccagcggcccgcccgagcactccggccgcagaaccagagtgccgccctgaggcctgctgagaacacaacaccctcccgaccgcgccaccgcgcccccctagccgggcgcgtccttgcagggcctgggctgtctccctcccactctcagaaataaggcacacgcctgggcattcgtgggccaacgggccttggctaaaccgtccccacatttgtcaggtaggcctgtagggtgacgggtagaggaagaagggcgatgggaacgtagccctccaagttaaacacggaaaaggtacgttaagggcaccgggccagaagtaacctggcagcggggcgccggggaaggaggtgggggagtgccaggttaactaagtcccggcacaccctactgcaccttcctgttttgcaaaccgatcccggtggtaccagtttgaggctgcactgcacacctgcacaacctgccttctacttagttcttctgagacatttctgaaagtctgaattcctaggactgctcaatgacctttgtccctgttgggcacacgcagtgtctcatcgctggtattgcacctttaatgagaccaggagttccgcaaaagtaaaacaaaggggtcacagactggttctggttctaccacttcctcagtatgtgctctgggacaaaacagcatatttggcaacatctcggtgtccttatctgcagcttgaagagggtaagattttgcatctgacacccaggaaagtgtttataaagcgttttacaggatagtaaggggggttatcgaatataagaggtcttaaaatacttaacaatgcacagcatatatggaacaggagttcggggaagtaatttggctgatatttcacaagctgttttgcagtttcagttccagtcttgctctgaaggtagaaattaagttgccagtgttacattatactggctaagttatttctagagcctcatagagaatttgaacagaaaagccagataacactcagccactgcatttagtgactgaaacatcataaaagagcaagttggagatgttggcttgtggctttgaacatccaatttttaattctgctcttgagaattaaaatactccttattgttgataattgtataatgtataataaggagtaattgacaatactccttattgttgataattgtataatgtagaaattaaattcgcaccttaacaggacagggcatatatgtattttcttgtgctccacacacaaagggcacttatttggggaacataagtaagcccagacttacatgctccatggacaaagcctatgtgtttgctgcattgaaaaaattgttgaagaacagttccttctttcaaagattcttggcacttgttttggtgggcacatacttttggcttcgatgactcaaaatctcttcaaatgttctattggtatcttagcacttgtttactgtcatagattcatttgagatttttttcctctggccatataagcactgatcctttatctagtctgaaatatatttattcttacatgtttacacttgcgttactccagggaatttcaggcagcacacagaaaacacttactataaaacaagataaaaataagtgggcaaactagtatgacgttaaagagaaggaaaatacgaaaccagaacagtgtgacaaatcggccaaccagaggattttatagtgtttttgagatcaagagtaaccaattgatcaagaagaggcatatattttcctaatgcaaagacttccaaaaattttatttaatgagccttcttcataaagtagaaactgaatgcccagtttgagacgaggacaaatatcctgacaatcctttaagcatgttattcttgaaatacagcatttaaaatgaattaggcagtgaaatgtttgaggtcataggcttcaacaagaccctggagtgcggatattttatgttgccagtaatggcagatccatatgctttgaccatcaacctagaggcagatagcatg

SEQ ID NO: 1241444 - DNA, 4001 bp, Homo sapiens
aagggttgtattaaagtcttagcagagtgaccttagacgagggtttgaattatttcactaaaagtcggctcatctgaatgaacccgaactataaagaacaggccatactatttgtaaaaagcacgcagtttaaaaaacaaaacaaataaaaaccaggccagtaatgttgcgaggaactaaatgggactctgtccaatcaagtgcctaaaaaaatagtgcttgggtggaaaacaaataccaaattctcttttctttgtatgtggacatctagcttataggtaaaaaagtaaacgttaaagtatgattatctagctataactgcagctcttcactggttggttcggccagagttgacaagtccaactctccaaacttgaggcaaaggaagatcggaatcgtacccacatcatagatttgctgtaaaacttttaataaacaaatctcttagtcgctgcctggaatatagcaaaacctcaacaaatattagcttttatgatgcctacttttaggtccataaatctttatctgccctagtttggcacaaaacttacatggtggcaaaatgtgacctgaagctatttatagtttctattcgcccccacttagaatgaatgttcacatctattgctgcaaatattaatgttggattatggggtgccccactctgctgggggtgttatctctcgtctaacatgactttctaaaaagatgaagataaaatccaagtatttttgaattcaaaacacactagcttcaaaagtttcagttaagagactggggatggattttacccattccgcctggagtgaggaaaagaacattccaatatttgcaattcactccaagtttctgaagcaaactcgctttgcattgtgggctcagagatgccagcatgaaaaatttctattcttcccccaaagaacaccagtgaacaaagaacttatgaaatgtttctgaaggctacctttgcctgtaatgagggttccttttcgaaacagacctttacaacccccaggtgtgtatttctctagtagtaaaactaaaaaaaattcttgcggtcgagtgagcctggcttcatgctttaacactggaatctttacctattaaaagctgtactcttgcttttcaaggtaaagaggaaaacggtccagctatgcatacgctatcgcaggtatgtgctcctcagtcctaaaaaaggagatcactgaattctgcccttctcgtggtttgccctgggtattcatctaatgtatccgtgagcaattcctctagtaagtcataaccagaacgttgtcacactgcggattaacaagcgcccgagactcttgtaagaatcttttcaggcctttccctttttattaaaaattaatgaatgagtgtaatagggtgggggtagaggggaaatcggggccaaggggcgcgaggccggcagccgtttagggacgcacgaacaaagggagtccgggatcaaccggagcgaaccggcctcctagcgggtcgcgcccgccgggaaggggtgggggaggggccggcccgcgcccgccccgccccgcagccagacctgacgtcaggcgcccagaaacccgtcgggcgcgacgtcagcggcctccgacaccttctccctggggggcgatccccaggcagcccgcagcgtggaggaaggcgaccgatagaaacgcttagtcctggtgccaggcaggcgaccacggcccgagcactggacgtgactcgatgcacctcggtcaccgcgcccgcttcccgcttggccgcgcccgcgggctccgcaaccccagctccccgattccccttcacgactcccactagtaccgaagcagcctcacccggcaatatccgagaccgcagtagggtctagaagcggcgatgggtccgagggactgggccctgaagacgcgggcgcagcctgactgacggcagctagagcagcggcggcaacagcaccagcagcgcgcggctcctcctggcgccggaacaggaagcgccgagcgcaccgcctccgcccgttctccccctcccctcaggccgcgccgcgtgcgcctcccgcaggcccctggcggtactgcggcccgccaggcctagggggatgggctccacctggcgccggctccgggccgctttcccctggtgggcgggctaaaagctcccagagtttccggagttccgaggactcggaggaaacgccagtggctgccgatgttcacggcttcccggcggaaattgctaacttgtcttgagttgcttgagggctgattctggattccttttgctcagcggtttttacagctaggcctcgaaggaggctgggtatggacgcggtctgatttcggcctgacccgaggactcagatcctcgggccaaaagtggggagagggaaaatattaatacaggaaagggaagacgtttgcaaatagcttgacaaattgatatttgctttctttgtagatttttcctcatcaatgcctcttctcccatgttcttttttgttgtttttgagacagggcctctgtcacacacgctggagtgcagtggcgcgatctcggctcactgcaacctctgcctgctggtctcaagcaatcctcccatcttagcctccgagtagctgagactgcaggcatgtgccaccacatccggcttatttttgtgtttttgatagagatggggtctcaccctgctagcctcaagcgatctgcccgcttcggcctcccaaagagctggtattacaggtgtgagccaccgtgcccagccgccatcttcatttctgaataaacattacctcctgtgtcaggcacagatgacatgaccccagtcaaggaacctactaactagcaataaagatgtcgtgataattatatggtgtgcaaaatatatacatatatgcaatatactttttttttttttttgagacggagtcttgctctgtcgccaggctggagtgcagtggcgcggtgcgatctcggctcactgcaacctccgcctcccgggttcaagcgattctcctgcctcagcctcccaagtagccggaactacaggcgcgcgctaccttgcccagctaatttttgtatttagagacgaggtttcaccacgttggccaggatggtctcgatctcttgatcttgtgatccgccctcctcggcaaagtgctgggattacaggcgtgagccactgtgcccggccaatatacattttttaagatataaaaatatcctaaaagtatgtggtacacttgcatcttgctttgtgtaaggcattagtgagtgagtgggtggccatttaaccatgaacttgtttaaaggaagacatccctggatgttttccacagcacacacaattctcacactgaaaaaggggcaacagaggaacttcaaatacctaagccgagagtcttatttttgggtaagggcacacaggcctatggaaaattacacgactggtgtggacctagcctgttctcactggtgacagtgaatcagcagtgccttgagccatgctgaaacctgaagcaacaagaaatcagtaatctggtcaggtttgatttgaaatttggtatcttgctcatcataggcttttttgcatcaattcagatattacaatattgtaccaaaacattgtcttccttagtcgtatagtcaaatatttgtccctaagtgcctcaccataccctagtcctggcgctgtgtaccagtaatggatagcctccaacttttccttgcctgcaatcagccagtagctgagcacgttggaggggtctagatctaggccattcctgtccctgtgggcttctctacaggcaacctttgcttgggaaccaagtcctcatctagcagtctcaagatgcactgaagtccgaagctcccctacccaatccttccttctaggtgtcagactttctgtgtggtatgaagaattccccaccttctgctcccttctctatctttctaggtgtttcactccaaataaatctcttgcacctctaatcacatttt

SEQ ID NO: 1241445 - DNA, 4001 bp, Homo sapiens
agaaaggtacatcactgttctacttactcagggccacagagcattaaatattgtatactaatatgctacagggatgctttaggctatggtttacgtttacggattaaattatcaaacagctatccagcaaacaagcggcatttttgaagatcaaaatgaaagcattaactccactaggccacaacatctcaggacattactgaaagcatgaaaacactcaaagcaaggaagcattccctaagagaagacatttcgtgccagcaattacctcataacacttttaatgaaaggccagtgaagtttctttacaaattatttactagatgttttacagaatatagtcaacaactagattgaaacacttttgaacccagtgttagaggagaacagagttagaaaacgaacagagtcaaacgtttcttcaatggaatttctactacaagttctcattctctagcaatgctgttcctggcattttgtagtttcacatgaacaaaatcaaaggttccttttataaaaccatagcctgtgagcgctgaaagggacctaagagctcatctaagccaatctctttttaggaaggaggacagcgaagcccccagcgggtgtccctcagctaggcagtgagtggcagagcagagcttcactatacatctgcttttcaaaatgtttaaccaactccttcaaaaaagatttgtatggaaaggaaactgccttaataaaggctgcgcgctagtgttttggaattcctaaggggaccgcaaagatccctcagtggacacttagtgactgtgattaaatttagttccagaccatcttaaagaacgagaccgcccacttgacccaatcgattactcttaatcagcaccggtaacatatgttattaatgtgacagtctctcaagaactgcctgaccaagttaaaagcagagttcggctaaaataagcactgaccactgcagtgatctgacacacacgtttgcacaatccattgcgcggcaacctggcctctcaaagcaccgatccgtaacgctgcaactcctgggctttattaaccgactagactgccggcataatcgatgtacttcgcagacccgcccgcgaacagcgggacacggcagacttctggaggaaacggtccgacctggctgcctcctgggtgactacggcctgccctctatttccagagcgttcggctggggggaacacccgactgcaaggcactgcccgaggagcacgaatgccaccccgaaggtccgccaactacaacgcccaggttacttacgttttcagtgtctcgttcattcaccgttggcaatggggtcctagtggacattttactgcactttaattctgcacaatgcgagggtcaaaacaaaacagcacagccctaggaggccggcgaccagcgtcctcgagtccacggcagttccgaaaaggcgccgtggggagggcggctcccttccccctacggccgtctagatcccgggcctggcccgggccgtcccccggcgggtcccggggctcattctctccctgcctcggcggccgaggcgaggagaccgggagggcggcagtggcggagccgagcctgcgggcggcgggctgcgcttcggcccgccggcgtccccttgcctcagggcgccccgcgatcctgggccccctcacctccttctccactccctcccgtcgcaccgcgaatttcagctcgcgggcctccacacagcgccgccggcggcgcctgaaaacgaggaggcggaggaggatgtgaaggaagtggagcgcaagacaggccgccgcgggctgtgggcgccgaccatggagcgggctgcggaggaggcgcctgcgcccgactgcttctccctctctagcgagcttgctgcctcagcctccgccctgctggccgccgctgccgccgccgcaccccggcacctcagagcctcacggagccaagatggccgcccctcggcttcctctgctgcctccggctgccggaagtgacgacaggccgccacccggagtcccgccaatcagcatggcctgagaaagccggcccggctgttgttgctaggggcgacttggtccagacctcgccgcgggggcggtgcagagggctggatagtgctggtcgggtctccgctgactcccgcgggctgcgggttcctcctgtcccgagcgcgccggcaaccgcgaaagagccgagaaacggctctgggcgacagccagagccctcccgctgagttggcatttacacactacaggcctgggttggctggattacagatcgagagcctattgtgcgcaaaagttgcggttgcatccctgggactgcgctgcaccgaatggagccccagcattaattaatgacagggccggggctacgggaaggcgccgggctcttgcatccttaactgtgacccgggagtcaggttctcgccaacaaaccttcccgtctccggatctgagcagctgcgggctgggcgcggaccctgagggcagcaggcgcctcttgccctcaaggagctggtggtcagacgggtgacagacccggacccagctaaatgccatccggatggaagagtgcaataacgagggtggcacaaaggggatgggtttgggggcgaaatgaatctgtagaggaccccagggaccagcttccaaatgcctgtagggggtttataagcaggcttttcttacagtcagtgcgttgctgctggaagactggaagcatctctgggtgccagcctcgggccaggctcggtagatgcctgcaggctggaacactggaaatgctacctgacctggaagccttccttgcccattcacctcttcacgtgctcggtgcctctactcagctcctggccagcggtggatggaatccatgggtgcagggtccgaagagggagagtagtgtgagatgggggtgacacgaactgttaccgagagtcgagtctaccttgtgggttcatgacatttgttacctcatttagcctcagggtaaccctatgagatgggcagacacacatgcgatccgaagtctagacaggtacagtgacttggctaaagtacacaggttggttagcgacagagctgggattctaacctagctcccaaagcttggataataggtaagcccttgtagtggggggctatgtcatgcttgctttccctttggtccgttggcatcccaactctcttgctatgtttgagacatttcttgctccacgaaatatatgtttgttgttgttgttgttgttgttgttgttttgggacggagtttcgctctgtcgcccaggctggagtgcagtggcgcgatctccactcactgcaagctccacctcccgggttcacgccattctcctgcctcagcctcccgagtagctgggactgcaggtgcccaccaccatgcctggctaattttttttgtatttttagtagagatgcggtttcaccgtcttagccaggatggtctcgatctcctgaccttgtgatctgcccgtctcggcctcccaaagtgctgggattacaggcgtgagccactgcgctcggccaaatatatgtatctttaaacgccagattcactcccagagaggccagaggctcccaatgttaaaacacctgaggactaaggtaacactcagggctcccatctaaccctcagagaggagtggtcagggggccaagagtggttctatttaaaatgtgaataggggccgggcgcggtggttcacgcctgtaatcctaacactttgggaggccgaggtgggcggattgcctgagctcaggagtttcagaccagcctggccaacatggtgaaaccccatctctgctaaaatacaaaaaattaaccaagcacggtggtgtgtgcctgtagtcccagctactaaggaggctgaggtgagagaatctcttgaacctgggaggcagagttgaagtgagcgaagatcagcccactgcactccagcctgagcaacagagcaagactgcgtctcaaaaaacaaa

SEQ ID NO: 1241446 - DNA, 4001 bp, Homo sapiens
ctttttagaagaggcactgctctccagtacccaagccctcacctcttccttctttattctttatggccctcatgggcatttgaactttttacccccattctatacatttcttactgctcccaactatcaaatattagacactctgatatacttatttctcttcccctcgctgattctgatttattctgtgtgtattcttttttccctcaaatctattcatgaaacatccatattactgtctcagactccaaagacatggaattagtgcttatctaaatccacagaaccatctactgagaacattaatatcaaaaccctaagaaattattgataacactctatggtctcatccatcacctttcagcaaagctgtctctgcaatgccacttttcttcagctattttttaattttctttataccttttcttcaaatacagagaatcagaccataataactttatgtgacactttgatgatgtaacgtttggctcctctacatttccaatttttgcattagaataccatgttgtgctagattctacgggtctatagcagtcacatgacttggttaaaggcgattaccgcatgtggcttcagcttcacacaattatacagatatggtttaaaacctacttgttcctaaataaatcttctgaccactttgccctgaaataatactaccagaccagaatgctgcatttctcatttccacttacatagtggcatctggatcccctatctgaaaactacagaacaattcaattctttgcatacagctcctcttactcacctagaatcactgaacttatcacctgagaatctagaataatgggatttgcaacccccccaccctccagaaccaggccccacctcaccttagtggttaacattagagtttactacaatattaaaagtaatagtacgatctctttttctctctgaccccaaaaaggaatagaactgaacggaaataaaaatgaaatggagagtaggagacgtaccgcagattgaaacctcggttgctcttcctggaataagagagaaaaaaaaaaatagaaaatatagaagttatttttacacttaacattcaataataagaaagaaaatgccggcggcagaggaagcggagggtggggagtcagcccgacaccccttcctccctccccaccccttgcccccacccttccaccctcggcgggatccggtagcagggtagaggggtcccgagcgccgcccctccttccgggatccgacctgggccagaggggtcccgagcactgtctcctccctgcagacccagctcgggcatctaggcacccccaacccctctccgcccttccccggcccccaggatccgcgggtcacgggaggagaggatcgcagtccgaaggggcaggtcctgaacgccgtccccttcccctggatccggacaatgggatcccgggcgccccccatccttgtcccccggatcctgagccggggaaggtgggagcgggaggccgcagcaccctcccgcaagggaggaggtgggggtcccagaagccgcgtgtcttcccccaacctccagtcccaggaggccgctccggccaggagccggaggggagcgaaccgggaacgcgacggaggcactcctggccccgaggggaaggggaaggaggcggcggcagcccggccccctcccgccgtcgccccgctaagagccccggccgctgtccccgcctgacaacccgcacgggaaggaagaagccccaggactcacgtcgctctccacctcgatgtcatcgttatcgctcatttcctacggcccagggagcggccactgcagcggcggcggggaggggaaggggtgaaggggagggggaagtcaccgacaacaacaagccgagtcccccccacacacacactcactcactcactcactcgctctctcactcacacacacacacaacacgggcaagaaccacctcctcactgcagcaccggatcaacggcggcacgcacgcccggtcggcccccgccacgtgaccaggctcgcagcgctggggcagccgagacttgtagttcttgtccctctaacagacggcccgggtagctccagaaaaactacaaatcccggaagaaaccgcatccaggcgacgccagcccggcttgttgacggagcccaaggcgcctgcgcgtcccggggaggggggggggggcgggggggggcggggagagccgcggcgcggcgcctcctgggagtcgtagtccgcagaccgcgagttgtcaggagattttcctcccgaggcggcagaggaggctgctgggaagacaggacacgtggagggagctggaactcctggagccgggcaccgtctgcgcgctggacgccgggcccaggggactgggtggagtctctgggggagtagccggctgtctaaataatgctgcctctctttggtgtgactggttatactttgtcttcttcatacggagtggttccgttttgcgcctaggggcgtaacccgcccgggagggaatctggctgcggcggaccagggggcgcggctcgggatgcctgcgcgaaccctcgggggctggtggggaggtgtcagtggcaggtgtttcgtggtgctaccggacaggcagaatgaccgacctcgccgggcgaccgctcccagccgcgagaatcctgtattcgtttatctgggagtgaccatcctcgctactcagctactcacgtgaggctccagcgttcacacaacgcgaaccctcaaccactatggacgtggaagtaaaagccccttcagagtttgttgtagcccagacagtttaggcaatatcccagctcagagtaccataattaagattgcaaaaaggatcaatatgggaaacttttgcagttccctgtccagttaaaatcatatttatatactgtggcatgaagtgtaatcacatgcattccaccgatatttattgaacacctaacttgccacaaggggatgccataacggataagaccaaaaccatccctgccttcatgcagctcacagctgtgcaagcaagcgtgccggtcctgccgccattgtaagagtgtgcaacaagtcccatgggaaggaagaaaaccataacagacactttccaccctgagacaaagtacccatactactcctttacatctggtctccaaagtgaatgacatcttgagcttttcccatgagttactgattcccggatgaataccatattatccctgacttttgaatgtggaaatttggggatatgtcacacacaattcttgtgacacacattcctcaacgtgagcatgtcatctatgctgaaaagacaaatgtaaatgtggtaatttttcctttacattttttcctttaatatctattgtatttctttctctctctctttttttttttttttttttttgagacggagtcttactttgtcgcccaggctagagtgcagtggcgcaatcttggctcactgcaacctccctctcccggattcaagcgattctcctgcctcagcctcccgagtagctggggcaggcgcccgccaccgcgcccagctaatctttgtatttttagtagagacagggtttcaccaacttggccaggctggtctcgaaactcctgacctcgtgatacacccgcctcggcctcccaaagtgctcacgtgctcacgcctatagcgtgagccaccgctcgcggtctaatatctgttgtatttcttattcagtgatccagtcctactaagtctgcacatctttgcaagtgaacttaccttttctacatgcttttgtctcatagtgttcctttcctgctgagttggggagacagatataagcagaccattatgtgataagagctgatgggctattggggagacagacggccacttttgagtgagttaattaactggatactagaagttaaagctaattgatgattacaacagacagttcttgggtgcctgctatgaacagagcactctagggcaaccccggctac

SEQ ID NO: 1241447 - DNA, 4001 bp, Homo sapiens
aattttgtgatcttaagtaaaaaattatttttaacattcagttttatgtttcctactgaggagatctaataatacaacgatacttagggatgacacaggatgaagttaggcatgttacaacatacattctaaatatcctttaaagtggttgcaaaagaaaatactgatttctctgggggcaattttataagtatggaactctaattttcactcttaacacttctcaaaatatagagtattatgaaaacagtttgtatttaattgatgaaacaatcatatttttgacacttgtataggaggtcccttcactgtgtcatggtaaagtaaccaaatatttactgtgaacatttttgacaggtgacataagtaaattgtaatcacttctttacttgtacagtacttgaatgtttaaaattttctaatgagtttgaaaaattcagtatgcaaaatatttcaaaagaaatgtttaaatcattgctcagtattttttaaaaatattccatcttctgttaacaggtgagaataaacttttttcatcttgacattataaaataaataaacttaagttccaacgtcgccataaaaagttctctaacttttaaaccatttaaacgtcttgggtcttaagaatggaatgttaataacaaaacaccccaagtctttaaaaaatgtttttggtaagtacttggcaaacaactgaatttaaaagttatatctttaagcagactccattaataactgcgtcatttcataaaaccgtttaacttacagtaatgttctttgtaagacacaacatactacgatttttaaaaatagtaacttcttaaaagactgattctccatctactcaaggctttaaaaataattttcacaaatcagacaaatgttctattttcataggaatttaccattatctttgacacaaatgcctgctttgtccacttgcgctagtaccagccccaaaacaaacttttacggctagaaaatggtctatgtaagatagaaaatatttccttttaaaaggcaggtaaacaagcatacttttaaattgtttctcatttaaaacttgaattttacaccatgaaacgaaacagtgacttgatcgaagaagcccatttcaatttaaaaccaattttactatgacatttctgcaaaagcgatttatcagccagttaaactagttaatagttaaataacgacagttctaacgccaacagcattttacgctagaagtattttaaatgaattccttttacttttctccccatttgaaaggattatagatgcgcaaaacagcccgaaggaaaaaagaaataaacaaaaccaagtaactcataagaacaaattactccctcccccaccaaaaaaagctaataagcgcgcgcttttctataaatctcaggcctactgaccaaccaattcccataaagagtaagttggaggaaaaaggaccctgaacgctaagcgcctcctaaactcgcagtgaagcttttccacattcattctctccaagcctgcctctctcggagccgggttttcacttaggccaacctcacccactcttggggaggacagctgcaaggtaaacgactctgcaaccggtaccgccgtcctcctcactccgaccgaggaggctgggcccgggctccttccacacctcggcttcgggaccgcatcccacacctctgcaggcctagctgcccccggcctctgctagagaaaaagaatggcgaggagggaccggatggtttccatattcccagtccctcaggccacctctcacctgtccaaccagggtgtgtagggagcgaaagatttcgtagagcacctctcgggagaggttgggtctgcatcttcgctccaggttcctgtcaccgctgctcgggcgattaagctccgtggcagcagccatgatatcttctcaggccgccccaccaccaccaccaccaagatttgctcacaaccccgccccctcccttccagctttagtcgcttggcgatgacgtaagacacggagtctggtttagatcgggctttgaggccccaccctctctatgtgaatgacaagcacgttacaccaatcagttgcagctgtgacattgcgccgaggctctgaagtgggtaattgcagaccacagctaggctggaatgctgtgtttggggtggtcattagagtcgtggtctctttagcgttatgaagcctaccttgactcctaggtgttcattgtgaatcttggtaagaggagacatagttaaattttgtagtttgagtccaaaaagtaaaagttgacattttaacatggcggtgtggagtgggtctggaggaagcttgctggtcagggatggagtggtgcccacacgtgtttctaaacattggaaaactcacacggaattatcatgattggatagaacattttcatctcttcaagtttgttgttgttgttttggagacagagtctcactctgtcgcccagactggagtgcagtggcactacctcggctcactgcaacctccgcctcccaggttcaagcggttctcctgcctcagcctcctgagtaactgggactacagttgatattctctgttttaactgtagagacgcttaaccctaaaattgtttcaaagaaatgaaacactgtcaatataattccaacaggaatttaacctggataaataatatcatgcaaccacaatctttgaaattaggacataaaaccgaattcaaattttacaaagtattatttatcataatagctttattataacgatgtttgtggggttttgtaatcttttagtcagactccgatatttttaaaaagtgttatccaattaaagtattacaataatttttagtgttaagctttattcaaaaacactttaagaaatcaacatcagcttagagataaggaaggtgggatttaaaactcgtaattctgttaatagtctaatgcatttacagtagagaaagcaaaggtggaaacttgcacaatgtgtattctttagttttagggtagactaaattaaagggaaggactaatgcatcaaggaactaagataaggacgatggggataaaaactcctttgacctgtccctagggagtctcttaattaggctttcatttccaaagacaaatgggatcaccaggcttgacagaatcttgggaaatcttttctgttcccttgttggcagcaagatatacaactgacattccagcctatttctacaggcagaaaaatacttcacaatgtccagtctcaaattgagcaaccttcttattcaagcatggtaatggggtaactgtaagtttttgttttgtaccaaattagcaatcagtttcagatcatttgttttcattgaggtgtttcatattttttcaaatatggagaacactgatatgcaacacatttgggaatatgctttgtatatttaaaaaatgttgtctttaacaaggtgctgctattcctttctttgccatcattgattttgaattttcaagttttacttgttcttttgagcctctaatacagaattaactgatggccatttgatctgtgtattgcttctccatgtaattctgtgatttgatatccagacctgcacttgtatcttagtattctttacttaggtacaggttgagcattcctaatctgaaaattcaaaatccaaaatgatccaaaatttgaaactttttgagtgccagtaccacaagtggaaaatttcacacctgatccgacataacaggtcacagttaaaatgtagtcaaaactttgtttcatgcacagaattatttaaaacattatataaaattaccttcaagttatgtgtataaagtatacatgaaacataaatgaattttgtgtttagatttgggtcccatccccaagatagcttattatatatatgcaaatattccaaaatctaaaaaaaatccgaaatctgagacacttctggtcccaagtagttcagataagggatactcaaccagtagtacttaaaatt

SEQ ID NO: 1241448 - DNA, 4001 bp, Homo sapiens
gtccccccattaccacaaccatcaccaccacgagacaagttgtctttcacttgggaaggaggggttgggagaggggacattctgatccttagagtcgggagaaagtgaaggtttcttgggagccaagaagggagctagaaacacaggaaaggggaggagcagatggagtgcagtgggtaccagagctcacctcagcactgttcagccctggacagaacacagtggacacagtaaaggctgggtctgtagcattcatccccaaacacccacccactgtgcactccgttcccagagagtttgaggactcaggattcactggcacctgtgtccactctgcagtcagttccagggtctgcagggaaagctctgacacttccacaaatattcattcctttttgccctgggtcagccattgacttagtcctgcagcaccggagtccaaacccctgagtgaaaccaagggcaagtgggctggattttcagcacacattctgtggacactgactcaggggcgaggggtgggaccggctgtgggcgggtcttggcttgatgtcccctcaaggggtgcacctctaacctcccaccagacctcaaaaacacagaagttattttttgggcaccacctgcttgtcccaagagaagacatacattttagtccactattaactatgacctggatgtgtgtgtgtgtgtgtgtgtgtgtgtgtgtgtgtgtgcttccatcctgaaagctaagggtgccaactgctgacaggcaaaaaaacctgtatttgcttttgaggacttcaaaacctcctaattaacaagcttgcccttctctagttcctaaacctaaatctgggttttccagaggggagatgagattgtgttcccgctgcagcgagctagtgtcctgccctggaacccagacgcgcggacttagcagtccgttcattcatgcacttgctcatccattcacacaaacatgtcccttaattgtgtctggcaccgagaatcttgcctgctattttcccctcccgaagtcagtgctcatggcaaccgctggtgcagaacgcaactcaactgtcaccccacttcctgagccggaaaatcaaggcatgtaggcattcacagaaaaaggaaaaggtggagaggaggaggcggcgggggcggagaggggtggggagactcacggggtcacactggaagcttccctggggggtggggggaaaccgtgacaccgacaccgtggcatgcaaggagccaaaccattattaaatcaaagactgctggagctcggattccccgcggggataaatcaagtgcaaagccgctcgttcgcacgagtgcgttgctgccggctaaacccaactccgagccagagcccaggcgccggggaagcggctcgcagcccaatccgcagcgcgctcgctgcctctttatcgctcccaataacgtgatgaagtgtaaatcaaatgccacgccgggaggggccccggaacggcgcgagtcgtgcattttcgctcaccagcctatcttgcctaagaatcacaaggtcacgatagcgtcgcgattccactcaccgtacactccttggccagagatcccctccaggaggactgtcagcagccacacgagaccgtacagtaaatccatcttcacgtgaacatgaacatatccagcccagggggtacgcaacgggaccttcaggaggccggcggccagccaggcgcgctccactcgcgcccgggccaagccgaggtgcccgggaaccgctcgccgaaggaggaagcgccgtccgtctgtccttccccggcggcggcggcgagcggagcgcaggagccccgcactccacacactcatgcacacacacactcacacacactcacacactctcccacaacacaataccctgacacacactcacacgcacgccgcactcacaccgggtgcctgggaaaatcgcagacgccggggaggagcagggggcggtgatgggaaggggagctgcgaggcgaagtgttcttcagggaagcgggctcgagtctccgcagctgcggcggcggcggcggcgcgctgggccggcggcgggcgcgggcagggggccgggggtgccgcgcggtaggagcctggcttggacagccgaggagcaggaagtggcctctgacccaggacaccgagcagggctctcttgcctggattcgcctttacaaagtaactcgcgaaggtccccggaggggcgtcaagcggcgacagcggcccgcccgcccgcagtccgaagcccccagccctgctgtcttgccttcccccattccatcagttgccattgcaacgccaatcctgttacacgatacagactcgcatcgccgaacggggagaggaggaagaggaggaggaggaagaggaggaggaggaagaggaggagtggggctaggggaacgggggtggggaagagggaagggaggagggggaagaaggaggaggaaagggtccaacagggagcggagtgtgcgtctggagctcgcttgggcacaccagcccagccgccaccgccaccgctctccaaaatagcctttagcgcccggccagcgtagaggtgctctggccggccgcaccaattcccggagccgaaagcagagtccaggcaccgccacttgcaagagagggagaatgccaggcaaatacccgatccgcacacacgtctacgcgtgcccaccggcactgcgcgcgtcctcttcgcttccgcgccgcccccgccaggtggagggggtggggacggtcgggacaggcgggagtttagaggagggagccgcagaaggggttccccgcttgagctaacgtagtggtggcatccagaggtgaacgcgggagcggccgcctgcggagggcacccggctgcgtggcgtccgctcgggccgctgctgcggcagaggtgccctggttgggcggctgggcgcctggggttcgacgccggccgggatccctgggtgtgcgcggagatgcgcgccgcggaggcgaatggagggaggaggagaaggagaaagaggagaaagaggagaaggaggaggaggaggaggagggcgaagcggcaagcgcggggcgcaggcggaccggcggccgggctgctgggctgctgggctgccggggaggaaggctgtgtgtggtcacgttgtgcgctacgtgctgagagcgcgagctgctagccgcagccgggcgacgtcaaagccgggtgcgcggctctgccgcctgcctccgcgcctcctctgcccctcctttgctctgccttcctgtgtcagccgagctcatcagtatggacaacgccgaaaggctccgcgaggccggcggcatctggcctccaacctcccccgccaaagcgctccctcgcctctcggggagctccgcggtggcgaatgcccgttatgtatttctgatgccgccgtctgcgtttgcacgctgaagggccagctaccaccttagacccagggtaattacatgacacgctatctcctctccgccgcccaaggtcttccaggatccgttatgcttggctagagggcagaacaggccacagcatttggaagtggcaacgtttcttctctatttctgtcttctttaaaggaaatatggtcatcacagtagatgaaggcactgggggaagaaacactaggagttcagagattagtttattttatatgcaatgtctcctactaaagttaactgcttggaaaatcttttccttgtgtgaaagacaggctcttttgttggggcagaggtagctctaatgtttcaggggctttaaaaacttataggtacaaaaggattagaaaatctaaagcatctttaatttacattgcaacaagtgtggaaatacttcgctaaaaattaatagggaacatctgggaatatagtagtgtttttttcctgtaaccgagataataatgtttcctgtacgcagtccactttgttgaatatatgcttcactattcaaacagcatatgggtaggaagtgattggtttaaaac

SEQ ID NO: 1241449 - DNA, 4001 bp, Homo sapiens
tttcttaagaaaatgcaagtgaaattaataatattcgccataagaaaatccaaggattctgggcttcctgatgcaatggtatgtggccaaataagctgattttacacatgtcatagagtgaagtgactaaatctggattactcttttcaacactgatgacgataaagtgtaaaatgaaaactatttaaagtgtaagaaatatctgctctttggtacgtaatttcttaatttggagtaaattctaagtccaggttttgttctttaatgcaaaaataaaacaaatacactcagttgttcaagaaaatctgaaaataggaagttacttcaatgcaaataatattttctttgataatacatatttgactaagacaaatccattttaaaatttaaaaatgatctctgtaagtttttatgttccttggaagaaaagtgttatgtgttttcctttccctagaagtaattgaaatatttttgtgcagttatctgtgttattttggcggcagctatttgcaaaagacagagggctgaagtggagaaaacagcagcatggtattgtgggagagggtgtgcctagaacctgaacctggcttctttctttgtcttttatttcaagacagactctcgctctgtggcctaggctggagtgcagtggtctgattttagctcactgaaacctctgacctcccgggttcaggcaattctcctgcctcagcctcccaagtagctgggattacaggccagcaccaccaggcccggataatttttgtatttttagtagagacaggtagtagagacaggtgcaccatattggccaggctgttctcaaactcctgacctcaagggatccgcctgcctcatcctcccaaagtgttggggttacaggcgtgagccactgcgcctggcctggcttatttccattcataagctaggcctatgagttcctacatcgggattttatttatttaaacttgctaacagttactgaaaatttatgtccagcacaaaatgtttatatatatatatatatatatatataaaatatgttatatatataaatatgtgtgtatatatatttatataacatatataaatatgtgtgtatatatatcttctacaatttctatatgaaatgaacaataattattcccactctacagatgagaaaacagaggttcatagctagtgaatggtggaactgagattcaaacgttagtatctcttatttcacaacccacgttcttatattctttactaccttccacttaaaaacctagaactaggaaaatatactcctttcagaatattgttttcttatatctgtggaagcagtagctagttttctgtgataggagtagaaaatgcagctatatattttactaagaagaattccagcacagcatagaaataatgcgtagtcttgtgaagatgttgacccggaaaaacggagaaatgtttttcaggtaggcctacagtctggagaatgggtgctcaattgaggatattcttagaggagataaattgtcctagatttaggcagataaaacacttacaaaagtagcagcaaattcttctccatgttgtacttctattaaacaaagaaaacttccttaaacacttaaaggctaggttccgtgtgggggaaaaaagaggaaaggaactcatttcatacttgggataaattagggaaaaccataccttctgaagtcacagtagtaggaggaaggaaaggcagctttgcctggcagaatgctacctcaggggagtcagccacagagtgggagaagcaggcagcactaccgtgagtcctgcggcagatcccaagggattcatacttgaacatggaagcctcaccttgaataaccagatgctcgaggcacacaataatgaaacagctgaggttactttgaggactaatttccacttatcattctggtacaggctcaagctattaaaaggaatggtgattttttttgtttgtttgtttttttcaggaacgattatcgaattccgggcattgtattacatcaggaaggcaatgttaactaagttctaagtagtaatgagacgctgtgagtctattatgaactgaatactcccacagctcaaaggaggacagaaagtggtgtgaaaagcctaactttgaaccaaacataaatatatgtttgtgttctttgtatcatgtcactacatttcacttatcagtctcatgtataggcagccattccatttttccattcattttgtcatttttcccttaatggttttcacgatggcttctttttagctttatcttcagttgatatagcataattaactgccacagagtaaaaatattttctctaacaaaaaggaagacccaaaggaacaaagatgccattttcattaattatctaaataaaatgacataaagatacaaaggaaagttatttatctccttaaaaagttttcatttagttaattataatttcatattgctctgttaattgatttcttaaagctttccctagtgctctaggccttttttttcttctgtattcaaacattcacaattatatgagctctatcattttaaaatgcattaaaaaaagaaaacagttaaggtaatatgcattaattcagaataaaatagccatatgtccctgaaaaccaacaaagctattcactattcaattcaacaacggaatctactactttaaggctcactgatttatcctgactcttggaaaagagtgtatacctccgcgcatctagaaataactgaactgtcattcttgcccctctgagtgcaaacagctgatcactgtttaccacacaatcactctcaactactcagttgtttccctcattttctttacaatttccttctgccttctttattcttggcatttatcaaaaacatttcttttgagggtgaagagatttatttatttatttcctaaagaggaaagaatctttagttttggcatgtgcataagtcaaatatttttcacaatgctgtattgtcaggacaaatgttttgcctctcatcctgttgttaaagactggccagggtggggcctactgacattcctttgtattaaaacctcccttccataattcacaaacaaacagttttgatgtaatattttgccaggcaaaccagagccaattattaaaatagttgattcttcccttaaacactagtttgctgtcccagaatgattattattaaagaatgtgagcttctcaaattttttacaagatgtatgatggctaataacaataagctgtaaatagagtttggtatttgggtaggttctaaataaacagaaatataacaaatctctgttgttattttctttgtttttgtttgtttgtttgttttgattttggtatactggtcccttggctccatgagagaagacattcattaattaatatctgtggatagaatattaatatttattaacctatataaaaatattttgtttgtttcttttttcgcatgtaaatgatgatgagttacatgcaaaaaaaaatactttcccaagagctggcgaaatagtataatttaacaattttattacattatcataaaattgcaacttaatatgtgactacagacaggggtgtctctgtgtgtgtatgagagtgtgtgtgtgtgtgtttatgacatacacaaaatcaatgaattggtaatcattatttaataacaacttctaaaaaaacttacaggagagacatagaaatgaaagtagaaatgtctgggcatatttgatgttaatatttcaaccaaatgttttgtgaatgaaaatgaaaaataaatgtctacattttttttctcacatttctctccttagggaatatacaacctctgccagaagagttcaaaaccaataaaaaaaggaagcaaaccccatttaatatatatttttagctaggacttggcaaactcagatgccaggagtagttctacagttctgaatactaaatgttcaacagatggctctccttcgatttta

SEQ ID NO: 1241450 - DNA, 4001 bp, Homo sapiens
tttgggccttcgcaaatgtctctaacccttgacttagagtttgaagattcattccattctggatgtgaatgcaggtaacacctagaaagataagaagtcacatttcattaagctttcagggttctccattattactctgacctttgtgagtgccacctatagggcaaactatccaacctgtatgtatctacctaatccctcctagggaccccaaatggctgttcctcatcactcagtacccagtttgctgacgtctacaatattccgcctctcatcatcaaagaagatcatctgggagaaaggaattccagtcttctgctgcaacctattcaagacagggcaggagtaaccaagctagtatcttggtttcccaggcctctctgatactttctcaccctgctcctcccttatctccgcatacctctcaaagtgtgtgatcttgctgcctggatagatttcccgatgaacaaagtacctgaagaggtcaaagagctccagtagctggttggccccttctatctcacttgtcctgcaaaacggtgtaaaagatgggattagcaaagtgaagggccagggctacgttaacttattaagcaaagttagtaagtataaccagggaaatcaacttgctgtttttccgggatggacaggcatcctcagcctctgtttaactccattgccttcctatttgacacaattggtgctgggccaatgttttagcttttgttttgagacagggtctagctctgttgcccagactggagtgcagcgacccaatcacggctcactgtggtcacgacctcctgggctcaagtgatcctcccacctcagcctcccaagtagctgggactacaggtgcacgccactacaattttttttttttttttggtagagatagggtctccctctattgcctaggctggtctcaaattcctgggctcaagtgatcctcccacctaggcctcccaaaatgctaagattacaggtgtgagtcactgtgtctggccccacttttttttttttttttttttttgagacattgtctcactctgtcacccaggctgaagtgcagtggctccatctcagctcactgcaacctccgcctcccgggttcaagcgattctcctgcctcagcctcccgagtagctaggattacaggtgcgtgccaccacgccctgctaatttttgtatttttagtagagacggggtttcaccatgttgatcaggctggtcttgaactcccgatctcgtgatccacccgcctcggcctcccaaagtgctgggattacagacgtgagccaccgcgcccgcctgctggccccactttttaatagttaaaaggcacaggagagcgttcaagggaaaaaatatgtaaatacttggaaacttgcaccgcccctatttttgtagaccaggggtttcactgtctcttgcatgcacccttcagcattacactgtcagttgtcagtcgctcttcttaccttgaagcagccgcaccgggcaccccaaggctctgcaatcgttttaggacctcaggcacctctgggtacagtcggacgtcttggccccgcctatctcgtacagttccatcactggagagggcaagagtgcgctcagccctggctgggtcctatctcgcccccagtcttccctgtccctacctcacctgctcttatggaacggagggtctacgtgcgtgtcgacccagaaaggccagagagtgtaatctgcgagaggaaggagagggaaggttcagcctggggcgggagatgcagggattcgggagctgctgttagggatgtggaaaaggagagcaccttacgaaattctccccttcccgtccctcacccaaatcaaagactgccagcttcggtagccgcgccatgacccgcaccgcaggctgcgcgcagcagaggtggggcttcacccggggccttagagagtgcggaacctccggcagctaaggcagccaccctgcctgccatagacaaatggcgactagagcgtcgccactcggggcgtcatcagcctggagatggcgcaagagtgccatctgatgctgggcggggaagaggattgcagcgaggtaccaacacgaccacacatgcaaccacagcagtcaagtctttctaaggcattggccacgggcatcctccctacttctccactccacccagccttgcccgattctattatactaagaagccagggaagaaggaaagccttttcttctagcacctgcctcttcttgagacccaagtgatacatcacagcttgtcactcaatctttctgcattatcaacctcctgacagtgtagaacccaaagtcctcagtaatattccagccatagagtacagtgtcagccaaacccttgaaggcgttctccaaccaggcctaaatgtccagtacagccacagtcaagagagaattcactctccgaaggtttcaccatccatgtcagcactacactggtagatgtataacaaccagtttgtggggaggaactgatctgtagtgtttgctagtttctgtaaataatcctaccatggccaatttcaagctaccaacatgaagtcacttaatagagttggaaaaaggtgccaataattggctctcattagccactaggaactggttccaacacaccactaagtaggttttcctagagtctgataatccccgtaagagcaccattccttccactgtccgattccttcagcctgctataactgagtgagcattaggtccatttttatttcagtcaacttgtgcaacagaagaaagattccaggaggccaggaaatattttattgacaaccagggacacagtcataagagagggaagcacacaggactgcaaactaacacccagtagccagcaagggccctctgggccaggaatactgaatcctgggatcctcacagtctcccaccagtagacatacattactgggcatccaggggagggggcagtggctatggtgtcccagagagtgagaggatatatgatgcctcattatgagcgacagggtaaagaggtaaaatggagggtccatcactgcctaagaccacctcctcctctcagagccaacaccaggtgaaggactgaaccacctaaaatcttgtaatcagctgctgtcttctcatcattcctgcaggaaaaggaagccagaaaaaaaagaaaaagaagacttaggagttttttgttgttgttgttgttgttgttgttgttgtttttgacagagtctcgctctgtcatctaggctggagtacagtggcacgatctcagctcactgcaacttccacctcctgggttcaagcaattctcctgcttcagcctcctgagtagctgggattacaagcgcccaccaccacgcccagctaatttttgtatttttagtaaagatggggtttcaccatgttggccaggctggtctcgaactcctgacctcaggtgatccacccccttcagcctcccaaagtgctgggattacaggcgtgagccactgcgcccggccagaacaggagttcttgagtttcctggatctctttgggggtctgtgaacttgaatgagaaaaaaaatcccatctttatttttactaacccccaactgaaatttaacatttcttctaactttaaacatagcccaaaaaccacagtagtattagcaatataggtaacttgttaacaatagcaattaactattttctatcatgatcatttataggtatcttgaaaatatttcaaaattatggtcatattagacctaccattagatcttatgcattaataaaaaagtacatatattactatatcacaaatttgttttagtattttaataactatttcaatataattagttttcctttaattctatatattttgttttatgcctgaaaaaatcttattctgagaaggggcttagaggcttcaccagattgccaaagagtcttaggcaccaaaaacaagaggcacccctgatccacctcagtacgtgcc

SEQ ID NO: 1241451 - DNA, 4001 bp, Homo sapiens
tcattaggtgaagaagtgataagatttaaaatttagaaaggacttttttttttattggaaatccttaatgctggcaaggaattcaaaattttcaaataacatgtatgcccaagagaacacatctatagctaccagtttgagatctctcaattagggatagagaagttaggaagctattattgtagatgagatgataatgatgtaaaagctaagggataaacaggaagtagagttcccttaactacagccacacggtttcatatttagcgtagaattaaatcatagcttttaaaaagacatgatagagctagatacttttaataaatgagcttgtattggctattggctttcatgatgcttcataccactgactgtactgaacaccactaggtgtaaatcatgaacatcaaaatgcctatacaatactggttgaaaaacttcaatctctcttatactgtcattacctcaggcatcttcaaagaagtcagacctaattcaaggtgacaggcagttttgagccaagtgactcaaccgagaaaaattatataaaggtaaaatgtactttgtgtgctataaaataaaggaggagacagatgaagtgcgttaataaccaaataattagtatagaccatttagatagttcatcataactggatcatgcaataaccaaatacacaacaggccaggaaataacattttcagaaatggcctcctaactggttttcctaattctacccttgccctcctacactgttcccagcagccaatgtagtcctaaaaaaaagtcagatcacatcattcctctgatggaaacccctccaatggctctgcgttttactcagaggaaaagccaaagaccttatcatagctttcaacacctttctgacttcatctccttcccacatcctctctcactaccctccagccacactgacctccttgctgttcctttaacacaccaaacacactcttattttagagtctttgccatgatcctaacaatctgaattataagtaaaacattttataaactaaatatttctcttttttattctgtagcaaggcaacatgttgacatagcccaagcattctaacagcattctaaccatcagcaagtgatgaaataaataatgaaagacacgtatgtaaaatcatgatccagaagtgctgcagatcgccagataagtataaatgagaatatttgtaataaatgtgttagaccccaatccagttaatattaaaaaaaggcatctcaaacatctccctttaaaaatcaagtactatatacacaaaaacaactctacatgctccccaagatcaagcagcagttaaggggtgacatctccatacatttattcactgactgattcaatatttgagtacttctgcagttcagctgtgaaaaaaatacgacccctgcccataataattgctggacgttcgatgtaaagtattatcgactcaaaaaaaaagaaaatatctgggattcatgctcagggacccgtgtggcgcggtctaaagaattaggcagccaccatgccaagtcccaagagatgaatcaaatcaagttggcttattaccccattcccttctctgcctaaacgccattccttcactccaatagaatagccctaatgttgttgcagagatacgtgtgtagaacaaaactccagctctgaaagctcaaaacccagagcttcttccaaccccttctctccgacgcttccaagagacgctccaagaactcagaaaaaaaaaaaaactcgtcaacgtttcgctagatcacagccttgggttgtccacaaaaaccactcaaaaaagcttgagacttcacacaaaggaacctaaaccttgaaaccgcgagctataacatcccaaactggtccacagacaatcaagagacaaaatatagcaatacagtatacctcggatatccaccgccgccataattccgagagcgtttacaggttctctttccggcgcaaagtaaacgtaagcctaggccgccggaagcagcgggttgaagagagtgcgcatgggtgaggagggacgtagagcggaagagggggcggggcgggcaggagagaggcagggggtggaggtgcgggtgggaggggaggagacgcgagggggcggaaagcgggagaggcgcgggaggcgggaaacgtggggtggggtggggtggggtggggtaggggaatgggaggggacgggacgcagaaagattggtgcaggggagcagggaaagactagaagagggatgggccaaagaaggagaacgggagggcggattactgggaaaaaaattagaagacttagaggacagaaagaccgagtggagtcccgccccacgcccaccactgatggaagaattctgccttgatcgtctgtgatcgtcaagaaaacaaattctgatgctgtagagttgtgcttgggagtgtctcttaattttaaaagctccccgggtgtatccactgagctatcagatttaggaacgatggtcatttatatttttctccctgcctcaggtattgggatgggacaggacttaagaatttgggagtcattggcttttatgtgactaaatccattaaaaatctaaaccaattaaagaagcctctgagaaaaatttcacaacacaggaaatgcttctgaagtgaaatattaataagattaagagaaagggaatacccctgggtcccagagtaatgagcaaatgtctgcattccaagtagtctggagtaggtagcaaggctccaaagagggaatgattctgtgtacggggaagctacagaaagcctcagattctcaagcttcagtgtggctctgtaaaagcaaaacgatacagaaatatgcaaacaacacacagatactaggaagaggatgccaaaatctgaaggagggatgagggcgggtgcctacatcttctccaaaacttaggtactgtgaagactccccaagaatttaaccacaacccaggagcaagaggggaagaccagaaatttaattgggattttcaacctcatagacaaggaattaaaaatttgttaactccgtagaataaaagtacgttgcctgtacatttcagtttgggaattttctgcctgagatggtatgtataaaataggtgtcccaacagaagtatgtgcatgcacagagtaaagttttgagagagaatttttcaggagggcctggttgggagcctagtgggaggacattgcaaaaaggaagagtatcgtgtccaataaaaagtgtgatccataaagctttttgttttgtttttctagttttttgtttccttgtgttttgattaggctagaaggagattaggaagaatagtgacagaatgcagatctgtagataataaaacatatggtatgcatggtaaataagacctggaagctcaacctttattttgtaggcaatgggagaaatgtgatcaagcttccattttagaaagataacttgaggaagacagggcaaggtggctcacgcctgtaatcccagcactttgggaggccaagatgggaggattgcttgagcccaggagctggagaccagcctggtcaagatagcgagatcccatctctatttcttttatattaattgtttcagttaataaagaaatataaattaaaaagtgtggtaacaaaaacaagagaagacaagatagggaggaagccactttgggtaggacagtcaggacaggcctctctgaggaagtgatacctgagatgagacctggaagatgaaagcaaatcactcatgtgaagagctggggcacaagcatatcagacagaggggaccatggaccctacagtgggaaaggggttggtctgagaaccacagaaaggccagtgtaagccgggttgtatgagtgaaggatgaatgatgggaaaagagactgggaatgaaggcaggggccagatgatagagagcctggtcaataatttattttttattcaaagaacataggaagctattaaaagatttgaatgagt

SEQ ID NO: 1241452 - DNA, 4001 bp, Homo sapiens
ctgtaagctcagcactttgggaggctgaggcaggcggatcacgaggtcaggagtttgagaacagcctgaccaacatggtgaaaacctttctctacgaaaaatacaaaaattagccaggcgtggtggcgtgcacctgtattcccagctacttgggaagctgaggcaggagaatcacttgaaaccgggaggcagaggttgtggtgagctgagatcgcaccactgcactatagcctgggcaacagagcaagactctgtctcaaaaaaaaaaaattttttttaaagggtaggccaaggacattattttttggatttcttcacttctccaaaatttaaggttttgatgatctccactattcctatggagaggaaagaaatctgaaaatctacgtctcatgactgttcagttcagtactatttagcaagtatctactgaactactgtgagccaggtactgtgaggtgtgcagggaatgcaagatgaataaatggtagtgtcaaggagctcacaatcatgaaactaacttgatgaattatatttaccctcttatcccagaagagggtttcagtactgggcagggaccatccagggactttattttacctgaataaaaacttagaaggtcctaatccagtggacttgcagaaaaaaataaatatctagattttaacagtatattggtagccaggcgcggtggttcatgcctgtaatcctagcactttgggaggccaaggtgggcggatcacctgaggtcagaagttcgagactagcctggccaccatgatgaaaccccgtctctactaaaaatacaagtagccgggtgtggtggtgcacgcctgtaatcccagctactgaagaggctgaggcaggaaaatcacttaaacccgggaggcggaggttgcagtgagccgagatcgagcattacacttcagcctgggtgacagagcaagactctgtctcaaagcaaaaacaaaacaacaaaacaaacaaacaaacaaaaaacagtatactgggacattctgacctttacctaagcaatctctaaaataatctaccttcttttagtaaggcatcattgtaacaactgctgctctggttagaaagtcaaataagagacttcagtatctgagagattgtagaattatttcttactcttcatttctaaccgatatttcaatctcgcccactttttaattattcttaagtcctacctgggttttccaggaattttttctcaagatgcctagcccgtctttgcaactcctctggctctacaggcaaatgtctgctccagagataactggtcagtgtttgcacctgattctccatagtgggcccagcgctccctatgggccaaagacgaaaagcggaatcacttgcatgtaggtccagtcccgtttcttctcgctttcccgccgttactcaccaagtagcaataactgggcaccgttagccagtgcctgtggcagccgcacgtgcggcagctttaggatgccagggtgctggcgatgaggcctcttctgcaggaaaccggacttgttatctacctgggtcactccgggtactaaggcggcgagcgcctgcaggcagagaaaggtaggttgatttcctggcagaaaggaaagttgctggcaatcgctagggcgggggctgccaggagcgctcctcctctgcgcggagatgtctctgcagatccagagtctctccgacagcagggaatgtaggcactcacccgggcctggggagccactccaaggccggggcaccatcttcctaatgtcagtagacacttcagtgccgccgccatggctccggaggcgaaccggaaacggaaatacaggtgcctgtgaccctcagtcccaacgccgcaaggagcagccttcgcagaacttctcccgacagtttcagccaacgagaagagcgagtgtttgccagcagccaataagcaatggttatataaataatccttgaggcagaaaccgtgtttgggccgacttgaaggctgcgttgggcctggtcaccggccccagaaatcaagagggtggggtggggcggggcgggacgggacgggggcgggatggggttgggtgtgagcgcgccagcaaagactgtttctgggagtactgacttcctgtgttctttgcattcctccgcggagaactctgagtcttgggttgtttccctgtgtgaaaaagggagactgcagtaacggaaagaagagaaaaatcagatttaagcgactgaagaaaacagaaattaatagttaaatgattattgaatagttaatagtttgataaatattaaacctagttaataggtttatttatttttttacatttgttaatttctcttcaaatgagaccagtcttcttagtaagctaacataacacttactgagaacacctatgtgctaggtacttcagggaaaaggactgatccccacttcacagaaaacatggttctgacggggaccctcctgtgtctgctgctacgtcagagtgtttcccccaggcccaggacttagacagtagccgtctgattacctgaggtgcagaatctcaggtgggtccagccactattgtgacgtgataatatagcataggggaatggtctccagagtctgcaagctcatcaacaccttcattcactagagcatcagaaggataaatggcatatgcaaggcgatatctactttcgggacctgacagtggacaactgctacctcagtctccgaacacttgagctcacccagtgtgtgatttctgtgggctcctggccccctaatttccgttacaggtttaggatgttctcccagcacatccacttgacctgtgtgtggaaccagccagttcatctggagggctagactcctgagtcatcaggctagggcctgatgatctcaggccccagcgccctaattggactttccttctgtggttctctaccttattcgacttcttccccaaatctgcagacctcaccgactgcagcctgccagctctctcagggctcctcatctcggggtgaggtggggtgaggagacatgggtggacagggggagaagggccgctctgcctcttccaggcggaaccgcccttcctgtagatgaatgcatggcccactgacacatcctaggctgacacttgcctcttttccagcttttcctcagtcctccttttacctgggaatctttcctgggtgctcaaaagggtcaccacagtgacctctacccctccagtgagaatgctcacgttcagagtcgtgattctgtgtgtgccctgggctgaggactctgccctagagatatctgaggaatggaaccattaaattaaattgatacctgttgatatctctccagactattaagtccacaacccaggccgtctcaaaggttcttactcctgaagccatccctcattttttgtgcgagtcttgcccaaatgccagggtgctggcgatggggcctattcttgcccaaatgcacagataattctgaagattgggccatactagatgtgtgtgttggaagatctgccaagattctactgtcagctagtcagagctcttgagtaaatccctcagcatcttgtccttataattctattcatatagctgagatcatgtcacggctccaaaagccaccatccaaattatgggcattttctgtccataaaactttgtgaaatgattccttgtaggaaatttatccaagggaatcaccagatctcaagtaccttcatagtagttcaactccaacgcataagccaccgcgcctatgtaggggctccacacaatgtttgcactccacacaatgtttgcgctccaggataagagaaggagagaagggagaaagggatgcaactttcacctcaatgggagtgaatgaatggcctcttcaaacatgacctgtctgggattctgagtcattctagttcccctgcaacagtaggagccatcttgactttatctctgaatctcagtgtctgtcttattctgtgcttggg

SEQ ID NO: 1241453 - DNA, 4001 bp, Homo sapiens
ggtgacagagggagaccctgtctctaactaactaactaaataattttgcagatcactttgttgaaacaaacaactacctgatcctcaggtccccttttgcaactgccattgctgaatgggaaaagactccacaggaaaattaaataggctggatatggtggctctcacctgtaattcaaacactttgggaggcttaggcaagaggacagcttgatgccaggtgttcaagacaaatttgggcaacataatgagaccatatctctattaaaaagttaaaaattagccaggcatggtggcatgcacctgtagtcctagctactcaggaggatgagccgggaggactgctacactccagcctgggcaacggtgagagacgctatctcaaaaacaaaagcaaaaaaagtcgttggcatcatttatgcacatttttaaaaagtttcaaaacaggaaaccaaagaataggggaaaaaacataacaaaacaaaaaattgtatctataaataaatcaatgaagtttctagagcaagggaaaaaaaattctccctcttaggtaattcaggaactactctgagacttgactactaattattgcctgaccatatgacttgcacttcttactccactatcctcccctcttacctctttaattatctaggtcctatatagccataaaggccaaattcaagtgccaattccactatgatggttttgatggcttcactacctacaccagctcttgttacttctcttcattgtacagactgtagattcattcatttggtttcgtacatatatcttatcatattcctcactttttgtaagcgtctccccttgaatcctatgctttttaaacttcttgaggacaggggcaatttcttccttatttttgtctaattagacccatgaacactgtagatactcaagaaaggtaattaattaggtgggaggatcctgccagtgcatcttctatttctaggggccagaatacgagcacatgaacctaacatgatctagacaagatttagagatgcagttgaagatactgacaaatattggaacaatctaccacaaaggtgatactgagtcactatttttgcagagctttgttactagtttgccttaaataattcagagtttgtcctgagggtagggagtggataacagtgaatttaatcttttaaatttccttcaagttttatgatcgtgacacgggggcaacaggagaagagaaaaagtttggaaaccaaacacaaatgttttcagattcctgctaggtatgtaaatggctaagtcaatgccggtaggggtactcattcagaaacacccagtgccactctgtacgggccactaaattgggcactgcggatataaaggttcattcctcgcttactgtacccacagctgccaagaaatgaccactacaaaacagtcgttataactgagggaacaaagcgccaaagcagcaacaaaaaggggttcttgctgcttcgcgggatagggggctgagcagcctcacaaaggcgacgtcctcgcagtctgaagaggagtgggcaaggcggacgagggtggggctcaagcgtccgtccggtaaaagtgagctggaagaaccgaggcccagcgtgaggaggaaccgcgaactacttgcagaagggcgaacgtctgctgctgaaggtggagagggagtaccaatgtacgaggctttatagaaatggccgtttggtaaagggcagtgactctggagctttttctctagggatcccgcccgtcctccccggttgagcctcggccccaacagcccagtgcctcacccaagtgccccgagtcctgcttccgcctccgctgcagcctctcccgcagagagtccagctgcttcttgtgggcctggatagagctccacgtgtccgacatcctagtctcccagccctgacacctctcgaataaggcgcggcggactagcacctcccagcactcgctccaggatatagccaattctcacgcggacaccccgaaggctaaccggaaaatgacccctggagctgagcaagacagaaaagtcatttccggtgtcgcgctttcttggaagctataaagagccacgttaggtgttggcagagcggccggtatagtcctcatacccgctctctcatgcttccggacacagtgaggctgtggttgccatgttggtgactggcagagcggccatgttgcttatagacgcgcatgcggccatgttgaatattcggagaggagtcctgagagttgacttgtgttaaagtagcactcgtagagagcaacaccatatagtacagttttgggggtttttttcttttttttttttttgagacggagtttcactctgtcgccctggctggagtgcaatggcgcgatctcggctcacagcaacctccacctcccgggttcaagtgattatcctgccgcagcctcccgagtagctggtattacaggcgcccgccaccacgcccggcagattttttgtatttttagtagagacggggtttcactgtgttggccaggccagtctcgaactcctcacctcgtgatccgccctccttggcctcccaaagtgctaggattacaggcgtgagccaccacacccggccatagtacagatttttaagatgaaggatcactagttccttttgacagtttggtactaacataccttttccactgaaggtggtgttggtttgtttccatgcgttcatttacaaaaaaataaaaaacacaacggtggtccccaatctgaggtgaggagggggcggtggtgggtgcgggcatgcttctttgtgttgacgaggcgtggggaagtggggagggctgatgaaggaaaaatccgagaggtcttcaaatacgtgatctctctcttaggctaaatttacaaagtacgtgtaatctattaaaatcgggttccgacactaagagggctttgaggtcctggttgcgttgtgttttttgttatgagagctacctgcatgagtgtgttcagtttgtgaaatgtaattgagctgaacattttggtgtgcacttttctgtatgtgtagtaaacttaaatacaaggttggtggtggtggtttttcctacaatcctttctttctttctttttttgacacattttcttttttttttttttttgagatggagtctcactcactctgtcacccaggctggagtgcaatggcgtggtctcagctcactgcaacctccgcctcctgggttcaagcgattctcctgcctcagcctcccgaatagctgggattacaggcgcgtgccaccacacctggctaattttttttatttttagtagagacagggtttcactatgttggccaggctggtctcgaactcctgacctcgtgatctgcccctacgatctgcccccctgcctcagcctcccaaagtgctgggattacaggcgtgagccaccgagcctggcctgacacagagtttcattcttactgcccaggctggtgtgcagtggtgtgatctcagctcactgcaacctccacctcctggattctagctgcctcagcctacctagtagcaggtattacagggacctgccaccatgcccagttaattttgtatttttaatagagatggggtttcaccatgttggccaggctggtcttgaactcctgaccttagctcatcagcctgccttggctttccaacgtgctggggttacaggcatgagccaccggcttggccttttgtttgtttgtttgttttgtttttttaatggagctccctgaatggaaacatttcgggaatcactgacttatccaatgtctacatgatgccatacgctgttgtccaaaaaatacaaaaaatagtttgactggcatggctcctgttttcaaagagtttataatctggtcaaggagctgtgagccagtttattaatactgaaccatcttcacagcatgaggtagcatgggcatagactttttaaaaaacaaaaacaaaacaaaacaaaaaaa

SEQ ID NO: 1241454 - DNA, 4001 bp, Homo sapiens
gacataactggaaaagattactatgtatttggacaccttttacaagattttgtttttgtattaaagcagaaaccagttcctaaactcttttattcaattgtatgtcctgtttggacaaatatcaaaaatagaagactgtcgcttttgtaactgtgattttcactgcagtcttctataacttttacagagttcatggtccctaatatctccccaccctccattttttctaggtggggaaatggctaccacagtaaacttttcactgatagttagagtttctggaaacatgtattgtttgttattatttaagagtgactcaatttgggcactctgagtggatggtctacaggttttcttgtgatgcataccacagtctccagcatgaaagatcctaggaatttgaggaaccagcactttccagaattttggaagacaagatacagtcaagtattgaagagtccagtcccagttataatcatcataagtacagaaagtgtctgtgcactcgatcagcttctgataggcattccgggtcaaggctagacccatattgtgctctgtggatttccaagttttcacatctaccttgtcagccatgccatagaaactgcgactggcactataggtccccagggagagaacatcacattcagggcactcttgctgcttcagtttccacatctttttgaagacatggtaaaagtctggggctaagtagtgatcctcttctaggaaaagtataaggccagcataatctcgaagaattttcactctttcccacacaaaatgcagcttccaccaccagtgatgtttggtctgggagaatttggcctctctataatggccgaaggagtcgggatactcagcattgatgcaccccaatttcaaagcggcattcttcggcaggtctctgggacaatctctagggtcactacctggaaactcgttagggtacaactgaatgctgaaaggaaagaacacctgcagaaccggacagaaattcaccccggcgatcagctgattgatctcggtcgaccagaagtcatggctaaagatgacgaggacgttgtcaattccctgggcttttcgaagtgagtccagcagcagtctgaggtattcgggccggttatgcacctggaccaccagcaccagctcccggggggcccaggtgccagccttatctacattcctcagggtctgatcaaagttcagctggtacaccagggaccggtaccgcagcgtcaggttgtccgcctcgggctgggggaccgccgggaccagggaagccgccgacacgttggagaccctgcggatgcccacagccacagaggggtggtccccaccgcggccgccggcaccccgcgcgggttcggcgtccagcaacggtggggcgagggcctcgttcttcctttgtcgcccattgctgctccagaggacgaagccgcaggcggccaccacgagcgtcaggattagcaccttccgtttgtagatgcggaacctcatggtctccagggccgggagcgcaggcgggcgggcgcggaaaggagcagctgcttctgcacggaaggggcgggcgggcggcggccgtcgccttggcctgtcacggtcggaactggcccccgcggctgccctcgctaactcatcccgggccccgggggtcctggggcccgagacctctcatttaccccgcgccgcctgcgctccacacatcctcgcctggcagctacagctcgagcatcggcgccgccgctaggagccgcggctcggcttcgtctccgtcctctccattcagcaccacgggtcccggaaaaagctcagccgcggtcccaaccgcaccctagcttcgttacctgcgcctccagcggccctgcgtcctctgcgctctcatccttacaggggccctagacggccagaactgagcgacgcggcctcgcctcactccggcggggaccgttatgacaacccgcaactgccccgcggcacaccgcggccctccggcccacacccctccggcccgccccttagaccgttggttggtgctttccagacgcgaccgaaggcgcctgaccgccgtggccggctgcctattggtttgcagtactgtcgctcaggtgcagttcccacttccgcctgtttcttccctttcctgttaggcgagagctgcgaaaggcgagagctgcgaagggccaggtgtcgggcgctgtttctcggtaagctaagaacgaggctgtagcggctccaataggagcctcccttgctcagaatcctgggtaggactaggccttcttaggaaagggaaggcgagacctatggccctcgccggccttagttcgagagcaggcttctcccttcaggaaaaaggtctcaggcatggcggctatagaatcgcggggcgcgccggcttgataaggacacgtcagccctcgaggctgctgacgggtgactgtgcttcggaggggaaaagtgatactacgctgatgtggttctcgtagaaggaacggggcgggtcgtaaccgtagctacaacgtcgcgcgctgccccagccattctctagagctggaaaatggaggaggtgggtggggggaagggggtcaaagaaactctggtccttaacttccttttcggaagaaaattagatgaaccgcacttttcttttggagcagtcacaataaattaaactcatttcgtacggaaaacggactgtattgggcctcctaaagctgctgctgtcggttttcgtgagtcttgttctatatgagaaaagaagaatggctcggagcattgttaattatttgagatgtgcaaaatttgccgggcccagagagacagcagtatgggacttcagacacctccccacttaatgcctggcattttattcctgactagctgcttcacccattatgtccgcgttcctggaatttgtcatgaaaagaatgatgtatagccaatcaatcgcttgtgttattttaatgtaaattcttggtagacaatttaggaactgccattttttcctctaaaaacccacttgcaactgctgctactcagggcattttgaatctgtgctctgggttgcaatcctcaaacttgccccaaataaacattctacttatatgaattgtgcctcagttcttttttttttttgagacgtaattccgctgttgttgcccaggctggagtgcaatggtgcgatctcggctcacggcaacctccgcccctccccaccccgcccaagcgattctccttacaggtatgcaccaccaccacgccaggctaattttgtatttttagtagagacggggtttctccatgttggtcaggctggtctcgaactccggacctcaggtgatccgcccttctcggcctcccaaagtgctgggattacaagcatgagccaccgtgctcggccttgcctcagttctttaggtcgacaaattagtcctccagtaatttaaacgaagtgtttcaaaaaggtatgtacttgtatgtgcgtttattcatatggaaaaagagtacgtggtggatttatatattactcatttatgtgtacggttttcctgtatatacttgtatagcactttcacttttcggaatgtttaacgtctgctatcttattttaaatattttactacagttttcatcatatagacaaaacagccctgctgcaaagatggtcaacgtacctaaaacccgaagaaccttctgtaagaagtgtggcaagcatcagcctcacaaagtgacacagtataagaagggcaaggattctttgtatgcccagggaaggaggcgctatgatcggaagcagagtggctatggtgggcagacaaagccaattttccggaagaaggctaagaccacaaagaagattgtgctaaggctggaatgtgttgagcctaactgcagatccaagaggatgctggccattaagagatgcaagcattttgaactgggaggagataagaagagaaagggccaagtgatccagttctaaactttgggatatt

SEQ ID NO: 1241455 - DNA, 4001 bp, Homo sapiens
aattaaagttaaaataacattataaatttctataaatttgaatgttcccttttcatgttctatatctggccctaaggaaactaaaatgaagttgtaatataaagagggaaagaaaaatttttttttctttatatatatttttttgaggcagggtcttgttctgttgcccaggctacagtgcagtggcataatgatagctgactgcagcctccacctcccaagtttaagccatcctcccacctcagcctccctagtagctgggactatagcttgtgccaccatgcccagctaacttttttgattttttgtagagatgaggtctcactatgttgcccaggctggtctcaaacttctggactcaagtgatcctcccacctcagtctctcaaagtgctgggattacaggtgcaagccaccacacccagcaaaagattattatgataataaaacatctagtaaacttctctatatattacattatatgtccaaaaagttaaggaagaatgtttactcataattattacttataaattatttatgtttatactaataacatttttcatttttcattttcatgttgcaaattagaagtaattctcacagctgggcatggtggcttatgcctgtaatcttagcactttgggaggctgaggcaggtggattccctgagctcaggctgggcaacacagtgaaatcccatctctactaaaatacaaaaaattaaccaggtgtggtggcgtgcgcctataatcccagcaacttgggaggctgagacaggagaatcgcttgaacctgggaggcagaagttgcagtgagccgagatcgtgccattgcactccagcctgggtgacagagcaagactccatctcagaaaaaaaaaaaaccaaaaaggtagaatttatttaaagcaatttttgattctgctgagagagaaaaaatatgtatttattataaaataaaaacaaaaggaaaaataacttatttaaagcaactctaatatattgggatgtaatttattttgcaccataaaactaataacagaaataagttctttaacaatagaatggaaattaatttccatttacagtaaagaaagctttatattcaatgatataaataaaaaatttatattctagtcctgatttcagtatttttacataataaataacacagaaatgattaacatttagtaaagtttagaagaataaatcatgatggtttgaaataaaaacactttttaggaacgtcatgagaatcagaaagttctgagtgtgaaacagaaactaaaaagtaaaaggccttcataaataaaggcctatcaaattagcctgatgtctttttttatatgaatcaattagatttatcttttttttttaatgggcagccttctgagccagaataggctcagagactcctagattaatctttaaaaatagtaaaaggactgactagttttttaacttctgatatatttctatagcagactgatttttgctatttgtatatttgtattaaatactaccacaaaatgctttgcttccaacatttcttttttataccaagctgtacttcataatccaaatatttctcaatggtatcaatactcatttttatcatgcgtgaccacaataagattttatgtcattgcagagcctcaatttaggaggagaagaagcgggggaagcaaacttaccttcacattccaagtcaccacattttttaaggtctgccagcagttttgtactctccagacactttgtcagagaaatagccagaagaaggattctgtgaacgccaaattttgccatgctaaaacaagcaaccgggaatcccaagtgaagtttaagccaattgttcaggttgtagagatgtcagccaaaactggagatattctactctcttcactaactataagagaaaaagggttgaagttttaaaaatctcttgataactacctttttctatcggcttgttggtttaacttgagagacaaacactgtctgttttcaatctgcagtgtcaggtattcctgtaatacctaagggtttaataattaacaaggatttttagttggactaatgtgttataaaggaagcccatgtaaaactgtctcacttaaaggtaccttgtgttcaacaggatagtttttaagtaggcctccgcaaaagggtagttacctgcaaatactaatttcagtggataacgtatatagctgtgtgcaaaaagagtaataatttatgttaaaagaatggctttgaaatatggtgaaaagtatttttaaaaagattccacttttctatttaaaaaccccttattgttactatgaagttaaaacttatttagttaagaacaatagttgaaatgtagtaagtacttactatgttccaggtactgtcttaagtaagtacttaaatatatgatctgatataaccttcacaccaactctctgaggtaggtaatattatcgtccccacttttgtgtataaggaaactgaggcacagagagatgggttaaatcacttactcaatggcacatatgagtggaaaagaaatgttaacctaggcacaatgagaccccatacttataaccaaccacttgctttaccaccaagaatcaagtcatctgccattgaaagaggtcactctgtctacaacaatactactccagaaacagcaggtagagtattactccatgctttaaaaactgtatgcatatttctttaagtggacagagaatgaaagagagatatctgaataagtgcccccccacatggtagaagtatacagtgtgatttccgttggtatttattttcttctttgtagtttcctatattgtttggctttcttttttaaaaaagaaagcatatgtcttttttagttttgttttgtttttgagacagagtcttactctagcccaggcgggcctcccaggcttgagcaatccttccacctccccttcctgagtagctgaaccacaggcatgcgggacacagctggctaatattttatttttagtagagatgaggtctcactgtgttggccaggctgatcttgaactcctggactcaagtaatcctcctgcttcagcctcccaaagtgctgggattacaagcatgagtcaccacacctggcccgtatattattttaaaataaatcagctgggcgcggtggctcacatctgtaatcccagcactttggaaggccgaggtgggtggatcatgaagtcaggagatcgagaccatcctggctaacacagtgaaaccccgtctctactaaaaaatacaaaaaattagccaggagtggtgtcgggcgcctgtattcccagctactcggaaggctgaggcaggagaatggcctgaacctgggaggcggagcttgcagtgagccaagatcttgccactgcactctagcctgggcgacagagcgagaccccgtctcaaaaaaataaataaataaaattaaaaaataaaaataaaaaaataaatcagccgggcccggtggctcatacctgtaatcccagcactttggaaagccaaggcaggaggatcacctgaggtcaggagttcaagaccagcctggccaatatggtaaaaccccatctctactaaaaatacaaaaatcagccaggtgttgtggcaggcacttgtaatcccagctacttgggaggctgaggtaggaaaatcgcttgagcccaggaggcaaaggttacagtgagctgagattgcgccactgcactccagcctgggcaacagagagagagtccatctcaaaaaaataacaataatgaaaaaataaataaataaatactaaaataaagctatgaaaatccagtcatttgaaggttaccgtcactcaaaaaggatcaaaatcccacattggaaatttttgggtaaaactgtaggtctcagtcgattttcagaaaccatggttgtcctatttcattcttgggaaaatatttgtctaagccctcctttgctgtactttttcactgtatttgggcat

SEQ ID NO: 1241456 - DNA, 4001 bp, Homo sapiens
ttcagtagtgtataccacaaacacacatctgcctatcctgtaacacagtaattttctagtaggcatatacgcaataaaaatgtacatatggccaggcgcgatggttcacacctgtaatcccagcactctgggatgctgaggcaggtggatcagctgaggtcaggagtttgagaccagcctgaccaacaaggtgaaaccccgtctttactaaaaatacaaaacttagccaggcgtggtggtaggcacctgtagtcccagctactcgggaggctgagacaggagaattgcttgatcccgggaggcggaggttgcagtaagccgagatcgcgccactgcactccagccttggcggcagagcgagactccatctcaaaaaaaagaagaaaaaaaaaagtatacataatttcatcaaaatatttctaaaaatctttatagcagccctattggtaatagccaaaaactagaaatactatacatacagcatgagaataacaaactgctacataacttgaataaatctcacaaataaaatattgagcaaaaatcagaaactaaggactaaataccatattactccatttatataaagtaaataataggtgaaattcattgataatgttggaagtccagataatgattacctttggaaccatgaagtggggcttccgggatgcaataatgctctttcctgatctagatactggatacatgggtatttacactttgtgaaaattcaccgagctgtacacttacgattcatgcacttttctgtatgtctttatactttaaatattaacgcaataaaaatatctctataaactctactcctttgaaggaaaattgtatacatctcccattcattttgctgattgccatcattacctcccatcaatgacatgtcttgattcctattcctcacattaaaaattaaactgttttaattaattttattggcatacgattgcatagaatgattatgtaattgtcattttagatgaactccataccagatcacaaggaaaaactttgaaacgccaataatttgtgatagtatattcaagttatctggggaagaaaagaacacctccttgaaatgtagttttgtttggccctttgttttggcttatttctatctactaccactgtgatttaacctgcataaaatgctcaaaggagcttttccaaacgcgtgtgtttgtggaaagttgttcctttctaccatccttgtctaataatgcggctgtcttgttccctccatccatagagcttaaaatgcttcccaaacgttgcaccaggtccagggacattgtgaatcaaaaaagaaaaaaaaaaattctaacagtatctttttacagcatggcttagcgcgcttaaagaagcccctcattcttcgcccacacttccacgtgtgagaaatgaaatataaaacgactctctcatgggcacagagtcgatcagaggttgagcgaggactggaaccttctgactaaccgcgacttaaggggaaaaaaacaaaaaaaatacacccttgaataaatgctcagctgctcaggtccagtattaggaaactggagacaataccaaaaccatacccagaaagagctgtctgccacctgaggaccccacgacactgaccttcgagagagccccatcactcccggccacgcggggtcagcattcactaagtacagattccgcggggccccttctccttctccaaggaaaagtctgcggccgaaaactccagggctgatctgtgcccaccactatcattctccgtcgcccaaacctccctgcccaaccgtttacctgagatgcgcctggcatagaccggggagtcgacactgcgcgcttgccgagtttctcaggccgagtgcgcagccaccgcgtcagccaatcgccactggctcagagcctcctggctcgagactcacccacagacgatccggcggaggagcggggcggcgcgtggggcctacggggcggcggcgcgccgcaggggagagcgcaagcggcgagcaccgggcatgcgcgtgccgcgctgccgggccgcgaggcggggcctccaggagaaagagagagcttgggaagaaggcccgggaggagtttggagagaaagtagtcgaacttagtctgctgcggtggttgccctaacgggatgcttatggttgtcgaatccaagacgacgagcgcagaacgctctttctcttctgaaagagcaaaacgttgtctggacaaaacctaataggattagaagagggagaacgcggaactaaaaacggtgtcttgtggcctcatacttggcctcgtcgagttttcccaagacctgtcgaaattgtgctttccttctttgtgtgtggtttgggatgagaggtgggagggacgtgtttcgaagcggcggtcaagtgaaaatggcaccagatcgggctccggttgagtgagcaaaagtactatctagatcctggccaaagaacgtttcacactaaaaccttggagctggtgacttttttttttttttttttttttgactgaagtgctggatgagattacgatatgtgaatcctctaagaaaaaatgttaaaccttacagaatttaaaaatgtccaaagttttcaattggcctacctccgtgaactaagaatggtataattaactgctagtaatttaaatttgggttttttgttccatagttcagaattggttttataaatgtcactttaactcctgttactcatgattccttcagacaccaaatacttagtgaccacataccatgtgccaggtactcttctgggtgctgagtaataagcaataatattttttaatacaccccagagaataggcataatatgaggtgctgacgggttcctaaatttgtggttaaagttaatgaaaggaacttatcctttagtaagtgtacaaaagagagtttaaaaaactgaaaaaggccgggcgcggtggcttacgcctgtagtcccaacactttggaaggctgaggcagtgggatcgcttgagcccaggagttcgagaccagcctggacaacatggcgagaccttgactttattaaaaatcaaaaaaattagctgggcatgatggtgcatacccgtagtcccagctactagggaggatgaggtgggagaatcgcttgagccccagaggtggagactgaaataagctacgatggctggcgccactgcaccccagcctgggggacagagcatgacgctgtgaaaactaacaaaatggaaaagttggacgtagattaacttggaacaacagaggttataatattcaccaaattttcgttatgtatgctgtaatgaacagtgttctcaagaagtttgttacagattcagctttgaaatgcttttttcttttttgctttacttcagtcaggatttgaatcatatttatgaacataaagtaccataaaaatctatgagacaaaaacaaagagtgtacagtttatcagagcaaatactccaatcaggaagtatatagcttgtgcaaaggcttagggccaaatcaaattatgtgtaaaacaaaggaaaaagttgattttcctggctaggaaataataaataaaacaggatagtgactaccacaatgagaacattcaaaccatgtaatgaattagtagaataaatttagagaaaaattataatatttttcattgagtaaagttcatttcctcctttttttaaagcccattatctgggtgcttacagtctctggcataaagagaaacctcatattttctttccttttagtaagctgattttctctctctctctctctgttttatgcagtgagttcaaacattaggactaattctccctattctttttcctttttccctaacatacctgaagtaactcattaatgttctttccctaaacttttgataccacaacaggtaagttttcccctactcccctccaccaccaccataaccaacatatccatttcttcattttctattgttctaacagttgcctgt

SEQ ID NO: 1241457 - DNA, 4001 bp, Homo sapiens
ataaatacagaactgaagctaaacaattatgtatatgatcctgaatgtaactactcctcctcctcctcccaaaaaacatggaaagttcttgtaagaatttactgtagtggtagtagtaataactattactatggaatgggtcaaaaatcccagagcacactaaccaaaactgggacatagaattagggggaaaatagaattttaagttaacaggcaaatgatacacttgaaaaaaatactcagcacatatgacaaagggctaatttaaataacattcaaagagacctaataaatcaactttaaaaaatatacaaaacagaaaatggtcatgggacatgaaaggtgattaatagaatacaaaaggccaataaacgagttgtgacacctgattttactaataaatggagatgcaaactaaaacagtgagatttctttttcatatcacattggtaaatattaatttcaaaatgcaagtatgcatactattgacacggaaattccacttctaacttgttttttcctatagaaacatctgcgtaagaatgcaaatatatatgtaccataattgccgatatttactgaatatttacatgccagccactatataatctaacagcaactctaaagagttaagtactgttattactcccaatttgaaaaaagagaaattaaggtataaggtggttaagtaagctgcccaaggtcacttgacaataagtgagaaagaggaaccgattctacccgactccatagcttcagttatttaccaacaggcaacagtctacacacccactacacagggaagttcactgcagcataaaatgaaatgaaacaacccagatgtctaccaataaaggacaaaataaatcccgccacatccatacaatttactctatgtattcaataaaaagatatatatgtacttatatggaaaagtatccaagaaacattaaattgaaaaagaaagtaacaacatagaattgcatttgtttaaaaaaatttttaagtaaataaataaaacacatacaggcatagagaaaaactctggaagcggtgaaccaaattgtaaacagtgtttatctttgaaggccaggatgaagtggcctaccattttcttgaactcctgagctcaaaagatccacccgcctcggcctcccaaagtgtgggatcacaggcgtgtgccaccgcgcccgaccattttctaaataattttattaacatctaaagatgtttgcaacaagcatgcaatttaaccagaagaaaacataagctgaatgatcaactgcttctatagccctgtgggtcctggggtcccaaggggaagagttgggtactgaggaatacaattttcccacttggtattctaaaaaaaaaaaaaaaaaatttattttagaacaaagacctagaacgctcaccatcgaaataaatttgagcaatcgtgttctactctcttaagtacagtagacacgcaacaagtaaacatcgagtgcgaagtataaaatccgtaccaaagccagaaatctacaaaaaaaataaataaaaccgcgtgagccgagatgcttaaagggcagacgcccaccatctgcggggacccgcggtaggaggttagcggagggcgcggggaggacgtaccttggatgaagagcctggcagggagagactgccgcagttccggctcggctccgcgcggagagagggccgcacgccgccgggctcgcgcctcaggcccacggtgtatcctgcccgcggcggccaggcgccaagcgacgcttacctcctccgcgacgttctctaacacacaaaacacttccgcaattcaaatttgaagagcccgccctccagccagcccgggattggcacgctcgggaattgcgccaccgtgcgtctcacagggacgcaagaaaactgcaggcggcctctgcactccgtggacggcagtgtgtccacaaaaagtaggcgaccctaagctgtcacaggcagggggcgagctcctctagttgtcttcaaagttcgtttcgtcttcgtagggcacgcgcccaccctgaatcccgcctttcctctcgtgaagctctgccgggacaaggctgacgtgggacgacgtgggacgccgtgggccgcgagcacgccccggcactactgcggctaagtttggcctttcctggttgccgtcctcccctacaggctgtgcgccgtagcggctgttatccttcttttccgtctcaggaaaacagcgtgcttggtgggtttgagagaacttctgtttttctgtcctccatgtttgaggcggagaaagaacattttgttcttgaggtgatgatggattgaatgtaaagttacgcacaaagtgggatgtttagttggaactgttccctcaggaaatacgattttttgggcgtgggggacagggtttcgctctgtcgcctaggcctgagtgcagtggcgcaataacggctcactgcagtctggaactccaagggatcttcccacctcagcctccgagtagctggaactacaggcgcgcgcgaccatgcttggcttatttttattttgtagagaggaggtctcaccatgttgcccagcctagtctggaactcctgggttcaagcgatcctccatctcggcctcccaaagtgccaggattacaggcaaccgcaccgagccaggaagtgattaatttttttttaagtcacttcacattccagaaacattaatctcgacaactctaggttgctgtaagcagcttgtgacggtggcccccagactgcgtcccgctttagactgcacccagtgaatctccactctaaccaccgcggagtgaccgggtgtattcttcgccttgtatagggcacattggttcagtcttgaaagtagagaaggggaagccagggtagtaaggtgtgttctcagccctgaaccctgtccaactccagtcctgcatgaagtctgtcctcttccccccatccgcatttgtgacaacagagcttctttttattttatacttccatctaagaaaattagtcaacttctagtcacataccacatttccccattaagaggctttactgaaaaggtggtaatttttttttaaagtgacttttgcagtcccttctaaatcctgcatgtactaaattttgtacacactgaataatcaaaatccaaaatataaatttaaaacatccacgtgaatgcaaataaggaaaaacagttggaggtagggggaaaggaagcaaacttacctggataaaatgaagtttctttcttgtacaccataatgagaaaatggttggacatggatttgcactacttttttgggaaaaacccaccttaaaacaggttaaatggcatgtatgaaatatactttgatagaggaagtttgaagggatggtcattcagattttaaagcacctgaaattgaggtataggacgtttctgtgcctgatgaagatggccgtggctcacacatttagacaaaataggaaccctgaagtattaacagcaggcactcagaaatgcacactttttttaaattagccacttctcatgtaagaaggaagtagtatgtagtatgtcccaatgtgaatggccacaggaatttacataagatgactagtaattttccaagcaaaattggattaaacagtttgtggataagaaagtgtgatgagaaagcctagaggccaagggacagtacctctgtcccttaaatggcaacatgctgtaaccgcccaaggggttcaccttgcgtgctgcctagacagagctgattgatcaatacaagtaaattgcaatggagaaagagtaattgacgcagagccggctgtgcgggagactagtgttttattataactcaaatcagtcttccctgagcttttggggatcagagtttttgagaataatttggtgcggggaacccagtgaactagagtgctgattggtcagggatgaaatcatagggagtagaagctgtcttcttgcgctgagtgtttctggtttggggagtc

SEQ ID NO: 1241458 - DNA, 4001 bp, Homo sapiens
cacacattttgcttcagcatcaatactgttgagggcaagttcctcaacacattggcccaaggagcttatggccaaaccagaacgcaatttggcttgtacttcaactgacaagcacttgatcatggtaggtagaaagatggtgagaatgccaggcactggtttccttctctgactggaaataattgcctattggagaaaaaaaccacacacgcacataatcaaagctttagcattacacagcattatgaagaaatagcacttgaggtaaatgaaatcactcttattaaaccaaattgtgaaacaaagcaaaacaaagttataccgctgatctctaggcacagctcatgcttggtgcaatggattaacatccaaaaaaaattcataatttcataattttcaatgctcctttctaaatcccacatgtcctaaagtgaaatcataattacacttgaagttgaccagtaaacacagtattcgaaattctaaccacttcaccaaaaacagatgcctaaattaaatacagctaaggaacattagctagaaattattcatgacaaaaatgtccaagctagtttcataacatttatacattacacaataaccatgacttttagaaaaatacttataatgaattgctaagacattgtaataaggtgaagcaataggaagaaattttaagaatcaaattgtatcaaagagagattgggggcattaagaggttattattattatggttaagtatagtcacctcagggaaagaggctgggaatgggaaaagataaagcaggaaaattccttttcatataaacctttctttgccatttgattgttaaatcctgttcatgtattactctgatgtttttagaaagtcgttattattcttttttgaaacagtctcactctgtcacccaggctggagtgcaatgacacaatctcggctcactgcagcctgcacctcccgggctcaagcaatcctccagccttagcctcccgagtagctgggattacaggcgctcgccaccatgcctggctaatttttgtctcttatgtagagatggggtttcaccatgttaaccagcctggtctcgaactcctgaactcaagtgatcctcccgccttggcctcccaaagtgctgggattacaggtgtgaaccaccgcgcccggccagaaggtcattattaatattcttttggtctttacagatgggcataaactaccttggtaataataatgatggcatggggctgcctgaacttgattttaagttttcctgcaagtgaaaacacaaaaacaaaaaacaaaacaaaaaaaaccaaaccctaagattccagtgccattaaaggtctccccttcttctccatcagtgagagccacgtgggtgggcccctgcaggcggtggggccggttttccaaactcgggacaaatcagggctcttaactgcagaatttctgctgctttctaagctaatgcactaagcagccggcagcaactgacgggtaaacgtttaacaagtattccgattaatgtaaacccaatgatttcctgatgacgcctcccagcgcctgggactgacgggacgcacgggcctggatccagggcacgggggcctgggagggccgcgcgggccgagtccggggcagcgctgccttcccgccaggcccagcccctccctggccagccccgtccttgtccccaaactgggcccgcccggccgccaggccgccgggcctccggggccctcgcgcatccggctccgaaagctgcgcgcagccatcatcagggcccttctggtgttagaagagaccccggcatcatcttttcgtcgcgtgcttcccccagagtcacctggagtcccgcttaacaaattctccgacaccaaccgcctcggacgccgacgcgcgcaccttggatcttgaggctcgtgcgtgcccacgagcatgcgcttcggagggggcgcgccaggccgcgagacaccagtgcgcatgcgcaccagttgttccagccaaggatccgcatcccagggttcagtgaaccggtacctacagtctcaatccttattcccttttggcatggtgttaaagactatgtcgtagcttttacttttgtttttatttttttttcccgtgttttccctttccttttttttctcattttcacctttgctcttaactaccgtttaattcaatatatattttatgtgtttacttattgtcttctctccctagaatgtaagctatgtgaaggtaaggagtttatatattttgtttactgctgtatcccagttaccaagaacagtgcctggcctatggtaggcaccgaatgaatgaataattccagagcctgccatcttagaattatggcatttggagctggaaaaggctgagaaactgtctaactcaactctttttttttttttttttttttttgagacggagtttagctcttgttgcccaggctggaattcagtggtgcgatctcagcttactgcaacctccgcctccagggttcaagtgattctcctgcctcagcctcccgagtagctaggattacaggcatgcgccaccacactcggctaattttgtatttttagtagagacgggggtttctccatgttggtcaggctggtctcgaactccggacctcaggtgatctgcccgcctcggcctcccaaagtgttgggattacaggcgtgagccaccgcacccggcctttgctcaactcttaatttacagatgacaacaccaagactctcttcactgacttgaatctccccagtgccaccacagcttttagttataaaaataactaaaggagagcagaactctgagaatgctgtgagaataaagtgttttggaattgttaaccagtccttagtttttgctttctatctcattttcattgagaatttaaagtggaatttataacgaatttgtcagacctggtaagcatttgatatatgctagtttagtgactaaccaaacccaaccaaccagtcttctagggctgattaagcaaaatcctgataactgtttatgattattactatacctagggctgccataacaaaatacctcagactgagtagcttaagcagcagaagtctatttcctctcagttctagagactggaagtctgagatcaaggtgttggcagcaacgatttctcctgaggcctctctccttggcttgtagatggccattttcacagggtctttgatttttgcacacgtgtctatagccaatatgttctcttataagaacaccagtcagattggattagggcccaccctcacagcctcatttaatcttaatcacctctttaaaggccctatgtccaaatacagtcactttctgaggtactggggactgagactttaacatatgaatttggtgggacacagttcagcccataacataactttatgtgaattccttacccagagaaaagaaacaacagcagaagtaattcatccaaacataaggtgaacagagctaacaaattgaacttgtggtatttgttcttattaggcatggaatttcttgaagaacatttcatagaaaccatttaaagaaatgactcagactttttttctttcagacctctttaaattacctcaaaatcctcttcctacaaatgtttactgaataaagacctctcatttcgcccaaaaggaagttcactgaagattttttaaaagtactctaagcagaaggttctaacgtttttattgattagatttgtgtacagtggtaatccttccatcatacaggtaatatataataacattcaaaaatctgacattaaaataacttattgactaatgctaatattaacacacaatagttctatctctattaataataaaaaccaaaccactgagtttatcttagaaaacttaaattcaggccattattttacaatttggaagtctgagtaatccaacttcaagatgactttttcattgttgaagtttgctttgtcgatgtgtgatttaggact

SEQ ID NO: 1241459 - DNA, 4001 bp, Homo sapiens
aacacctcccaccttggcttaggggtccaggggagggtggggggacctccagctctgcagtaggccctggatcctagcctctggggctgctcctccctcccttcctgggcccagaagcaaatggtggttctggcactgggaccgcccatgacccaattaaaacggagccagggcagccgcccctcccctgggggacccagcaaagcaggggagggaaaaaaggtaaggcagtgaagttggcggtcggcagctccccagatgctcaggctcgttttgttaggggcgctccctttcaggtctcagaggactctaggcctgggaagaggacgactcctcccggacagtcaggctcagcctccagcaccagggcaggtttttactctccctggtctctgagcactccacgtttcgtcttccaccccgattcctggggccatacttttccagtcggccccagaccctttcagggacgcagagagaagacagtattctttccaaagagttttctccggggtgggaccaaggaggagaagccaaacccatatcccatcccccttctagggcccttcctggcccctcccaaccgcacccaggcccttgccaggctgagtgggttgagatggcccaaaataagaagctcattaaatccgtctcccaccttcaccccaaaataagagagagagaggaaaaacctcctcagacaactcccacgcagcttcctctggggcccggtgggccaccgtctgggccggggtgagggtggggggcgcccgagccagccccgacgtgagggcaccccggaccagaccctctccccattccccaagcgacgcccccaggctccctgcaattaacacagaaaaactattaacaacaaaaagggcctgaaggcgccgacgcgggtggggatagggggaggcagcgacccggccgatcgcccggctcacaaggagagctttgtgtgtacggaaacgcggccagcgcgccggcgctgcgaccctcgacgccagggatgcgggtagggacacagcggggtcctctcggggagacgggggctgtggccctggacgctcggccgtccaccctcgacccccacctggccgcagactcgtccgctgaaggcctgggccacccggggaggccgaagcgcccatcggagggcgcgccggcgggagagcgctggagagctgggaagtcgaagaaacaacaaactctcgcgcatgacgaggagccgggacagcgcggggtttgagcggagtccaaatgtttatcaggcggttccagagctgagagcagagcccaagggaatcggggaagggggagttcgccccagttgtaaagttcttccaaggactgggaaaaaagaaggaatgggaaggagagtcggcggcgcagggggtgggggcagctggttggaagcgggcaaaagttggatcgatctggaagtttggagacgaagaggaaaaagaaagggagggggaatcctgcaggcctgagcagcggagatcccaaaagccctcctctccgaatagaggctgtcccctaggagacccccgggctcgcctcccggcgggcgcgactccgggaagggccgggaagctcacttacttcggggctgaagctgctgctttgggccgagccgagggaggcgagcgcggtgccgagcgtgagcagggggagcaggagacaacgggggggtcttggggcgggagacatggtccgagaccaccgggtcagccgggcagtgtgggctccgcggccgggcccacgccctggggtcgcaccgccactccctcggggcgcctttgtcttcggtaggcactgaacttgaattcctagaccgctgtcggcttggagttaaaggggattgttcctcaaagtgcctgtttgctcttctcctcttttccggtttttgatctttcttctgcttagtcggcgaactggggtctggttccctctctcgctctctcctctggtccctcccttctcccacagcctctcctccgtccccgccccagtgccctcctttcctggttggggacgtggttgttttagcctgaatccaattacaaccaagaactggaaggaaaaaaaaaaaaaacacctctaagttgcctttttgtggtgcaggctgccatctgcaggggttgaggccgcgatggacagcagggggctgtagggggatccaggggacgggatgtgggagactttgtccctataagcatattctgagtggcttgattcctctggtattcagcatttgtctcacctcagggtgggaattattgggggctatgtggctaggggcaacgaggagctcagagtgtgggatggtggtggggtcttcttccatgcccatgagacctgcagagggagaaggggccagtttactaatagggggttatcttctgggccctgtagacaactgtctatgtccctccctctgctgctaaaaaatccaaactataacccaactaccaacaacaaaccccacaaccataccggatctgtggctccaacctttgtagaaagacaaaggtgattcctttattgtcatttgtaatgtggctgcacctttaattggaactcgctgggaggaaaagggtacaaggccgtgggatctgggggaaagcaaatcaagttgggtgaaattattgtaaaagaagggattgggagttgggactctggggtttagttccacctctacactgaaaaaggaggcaattcttaaagagttataatctcctttagggacttactggactcagaacaaaaggtggaggtatgtagggaagggagagggcaggataaagctgaccgtgagaaagggagacagatgagttgggaactagacaggtctggaaaagaagcacaacagaagcaggaaaagtgtgggagacagaaaactagactatcagcgaaatctaagatccaagaattgcatttggccagtgagagaggacagaggtagtgcgaggaggaagggagaagaaagcaaaggaaggaatagaggagggtggacagaaattaggtcaggtaggaagctccagaaatcctagggatgcacttctgtggcagaagaatagaagtctagtgctcagtattgtaatgaaaacaaaggtcttttgccctcagattcatgatcaataaaatgaaaagcttttcaggtcctgtggagcctccaggtttgtgggaggtatatggtgtgtgttattaaacagctacctaccccacagtgactgagggctgagcccttatgtagggctttcctacacaagctggggttgggaggtacaggcccctcttcaaccaatctctggaatgcattcagaaccatggagacctcaggaccccactctcggcagaacacgcaacacccaggtatgattcttcccacatcagccttcccagtgggggtaacctcctggaccacatatctgaatcttaggaagactgacaccagatgcttgccaaaaaagggaccttggctagaaaatctttttcatgaaaacatttattagatgccagctgtacatggcctaaactgtgcatgagctgttaaaggcttgactgcctggccaaaactgggaaaactgctgtccccttttcacgttcacagaacagctatttctcatagttgggctagtcctatggcctgcaaaggaggtaaatttttttttttttttgagacggagtctcgccctgtcgcccaggttggagtgcaatggtgtgaccttggctcactgcaacctctacctcccgagtttaagcgattctcctgcctcagcctcctgagtagctgggattacaagcgcaccccaccacgcccggctaattgtttgtatctttagtagggacagggtttcaccatgttgaccaggctgggttggccaggctggtctcgaactcctgatcttgtgatctgcccgcctcagcctcccaaagtgctgggattacaggcgtgagccaccgcacccagctaggaggtaaaaattttaaag

SEQ ID NO: 1241460 - DNA, 4001 bp, Homo sapiens
acggctaacaaagagttagtcatttccctaaggccacagagccggtaagagtaaagaatgtgaaatcagacaggctcattccaaagcttgttctctcagccaatacgctacagcttttcactcattttgttcacatttcaagtcaaaaaaggactgtaaaatgtagcctgttatctaacaggttagcaaattaaccacattaaatgcaacaccagaatgaattagacaaaagtcttaactcttagatcttaacaaaaagggctgaggatacaacaaaagcaatttcaattaaaataaatattttatacttgcccaattaaaatgccatttatgttactgaaatcgtataatcttccctgaatggctaagtgctgctaggccagaaaattacatttagcatccttctggtaaattacatttagttagtatccttcccaaaaaaaaaaacaaactctctttcctgttccaccataacaaacctgataaagaaaaatggagagaaattgaacgaaatctctctaaaaacagtctatctacagtgtttttccatgtagaattcccttttccatgcattcttcttgattacttttaccttacttctaatcttaaatcattcaatcacagctctactatacttctttgcagagtaaagcaaaggaaaataaagatcaattagaaaagttaagtaagctaataaattccatataataattatagctacagctaatcatgcaatttatgcttacctaaagaccctgtcattgctctacatttttgtcagcacttggggggttgggaggagaccttgtctacacactgtagattatccattattttttgcctccaataaacctgaaagaaactacaggaatatatgctcgccattacatggcacctttttatctcaaagtgctttctagaaccaccttcactaaaccacatctgacaagaaatctggcaagaaacactttgaccaatccctgtttcaaaatacacaaactcaacctccctccttctgcccccttcccctgaaaatgggcgttctaaagtcagacttcctgggttccaattctctcaaggcccacttaataagggaccttgagcagtctcgatttccttccctgtgaaatggaaataccagtatctacttcatgggactgttgtaggaatgaactgagataattcatggtaaggcgcttagaacactgtctggcacaaaatgtgcactcaaatgccagccattattatatcttcaaaattaactacctacagtccgggttttcttcattttagtgatgggagtctaaccgaactccatcaggacaagtgggcatacacacagggttttttaattaactcatacaataaatagcagcagtatatactcaagcaaattttaagttttcatagcactttcgcactttttcaataaaaacatttcatatgaaataaacactccaatcccccacgcttttaatcagcgatgtccagagcccagtaaacaacacaaagcctggaaatacagtcgggatactcattggctatggaagggggaacctgacaaactgctggatgccacactgagaacccgcagttcaaagcaggccagagccgctcggggctagcggctacagtctatttaaagtcacaacgccttcttttcccattttcctccccagtgttgaaactaacaacgccctttgctcccaagacgaggcctagcatctcccggtcctctcctcccacccagcgcgtctctcccccagggaatccactgccgcccaactcacagagtgtgtccgcacacattcaccatcagcttcaaggaggggttccgatatttggtggtcttacaccgagggcaaccctgatcgtccatggcggtttccctcctacagactctcgcaggcgcctgtttcagccagagccacctacaagccccctcagacgcgaccaagcaggttcctaccaacaggcgcttggcagagacggtcccttcgcgaaagagcaccggcaaggggcgaggcgctgcaacacaaacgttccggcagtcagttcccccggtcttgcatctagggcttggtcttagccttccataaagcaacttaataccttgaatttgacaggggaacttttaaaatggcaaattatacaaagccttatctccacgcacccagttgcatttttcaaggtactgtgtcacaattaggaagataaattccatcttgttctgtctggaaacattcccatgatttcaaagatttatgagcggtgtacttactttcttttggaccatttaatagcctgtgctttatacttctttataattgcatagtcatgtcagctcagctgataatatgcattcgcagatacaaaatatgaaaaagctatctactccatcagacagtatttatttccccaaatacctaggaaaaaatcatataagaatacatacagaaaaatttagttctgcaattccaagatctgatagcctgaatatctttgtaaattgtaaaccatgttcatcacatttatcaagaaggcaaattgaagtctgtaaacagctctattaaataataagctttcccactgtaaaggacacatcttattcatctccaaaataaagatttgttgattcttaatgagtaagtagactaagtgaagaattaatgaatgactatcaaacaatagtgtaatgtgaaaatttttagtgtcaaacattttttgtaaccaccttcatctgacccaaactccatcagaagggaacatgcaaactagatttttcaaataatctgatacaatgagtataagctataaacatttatagtaattttaactcatcatagaacttgtgttcttttcaataaaaagtaatattcaattcacatttttaaacagtgaacctggtagggaacccaaaacccaaaaatacagttgggatttccatgggtatagagagggatgctgacaaacagctggataccacacccaggaaccagcagatcaaagcaggctgtgacagagctttacattagtatgaagacatcaaggattcatctaataaataaaccatatcatctctttgatcataatattgttcctcaacaggagttaaccaaacataaacttactaaaataggtaacaccaaatactatgctactatgctgacccggaggcttattatgctgctgctattgtcttattgaaagaccacatccagaccagttacatgattcagagtgaagctcttcaagaacaaaggcaactctagtactttatattttggaccatttaatagcctgtgctttatacttctttataactgcatagtcatgtaagctcagctgataacatacaagaaacttctggtgaaagaatgaatatgtcatatgtgcaaataaaatttttagccaatactacattgaggtcatccactcagatggcattatagtttattgccactaggacaatttttgtgtgtttgtttgtttgttttgaaacaggatctccttctgttgcccaggctagagtgcagtggcccgatcacaattcattgcagccttgaactcctgggctcaagtcatcctcccacctcagccttctaagtagctgggacctcaggcactagccaccagtcccagctaattttttattttatttttttaagaaatgggatctcactatgttgcccaggctggtcttgaattcctgggctcaagcagtcctcctacctcaggctcccaaagtgctgggattacaggcatgagcctgtaatgatgcccagctatccaggacagttttaattacgtctttgaagatgagaccccaaccacgttgcgaagtgaattgcttttcctttctcccaaaacttaagattaaggcaaagaaagcactaaagattgtgagaagcagcaatgctacaagctttatccttttcctaggtgggaaactactaacttggaagcatggtagcaacagctgacttggaaatctgtcagat

SEQ ID NO: 1241461 - DNA, 4001 bp, Homo sapiens
gggtgacagagcgagactctgtctcaacaacaacaacaaagatattcacaaggatgaatttaaataggtaaatggcagtgtagaactacatccttcctagtcaattacacctttaggagactttaaataggcacagaaacgacaaagggcttatactgagaattgcacaaaaatgagttacttggcagcacaaggtagggattgtatgtgtcacaagagtatatagactgttctaccttcatgctctactcattgccatatcccttcgtggttccctgagactcaggtgaaattaccttccaatattgcctggagaagggcctcctcctcctcagctgcctcataatcctttattagtaccaataactgcaagaaaccaggggctgggccatcctctggcagattaagctctctgcgaattgttttgtggactgccccagcaatgacttggtctaggcgggcctgattcacagcatctctctcaattgctcctctctgtaccagcttctgtaacaaaggctccagccttagtacataagccgacaacttttcctcatccttctggtaagtggttagatatttgacctgcaactccctaggattatctgtaaccccaaatacctcctcaagagcctgcagacattcatcgacagtaattaaaggattgtttatcttgaggacacgaataacatcaagtgctgggcctcgaaggctctctagcaatcgccttctcttctctacatctggcacctgccacgcctttatcatctgagtagtatgaaacatccagcgtccaaattcttcttctcctggttctggagactccctgcccgagaacactctcagctttttatacttcaagcattgcagggcaggctgaagagcctctaatgcctgtgccaacataggggcccacatttccgggatcatgccctgctctgggtctaaggagccattttcatgtccaagagctctgctcaactcacccactgtcatgccctctcccgctaaaaattcatttaatctgcttaaaaatgtattatctgggtcagggggcttaaagatcactctccagatacccccttttcccggtatctccttagggaccagggcgtgactagtctccgcagtaagccctactaaggctactttcctgttctcatccctcctgaacatccttccaagcagtctgtactcccccaagggagctaaaccagcctgcagagcctcctcgatttctgccacactgcagctctgggagatgccggcaatcaatagcgctttccgagggttcatgtccatccccctgcaccagtcttctaaaagcctcaaagtcatggtgcccgaaataatagacttaagttctaaatatgccagaccacaggcgaccaccgaaattcaaagtaatcctccgcggtaccccagagaaatcttgtcaacgtgccgaggtccagcagcctgcaagacagagcagacaggttagctaaaggtgccaacgtccagggcaagcgtgcaggccccaagccccgcgcgccctgcccccagcggcgacgccagggcagccgcactgcggcgcgcgcccctcacccctcccagccctggtgcctggcggatgtcgggcctgcagggccgcgtcgggcccgcttccactcaccgtgatctagtgctcgtgcccgcgtccgtgcgccggcggccaaggtgcctggccgggccccgacgaggcgcgggagggcaggctcccctaggctctgacggacactcgggggccacagcgaccgatgccggtactccaggtgcctgtggtactgtctgcaacgagaagtgatggggcgatgacagtcgcgagcgggcaccagggggcaaggctgaggagcgctgagtcgccagacccagagagccacccacctggagggacgtgccgccacccgcgccgccggagctccggctccagcccggattccacctgttttggtctcgctcggggaagctgcgcggcgggcgggggcgatctgacgtcatgaggggcgggcctcgggggcggggcgcgcgcgcttccggcccgagccggaagctccgactgcggcggcatccgggacggcgggcgggctggccaccacgggacaggaaggtgagatccgggacctcagctttgcaagcaggctccgccggcgaccgctgacgggcgctgggctcgcggcgctgcaaggcggcgaggcccgggcctggcgccgcctgcgcagccttggtcgcggcgtgccggcgctgcagcgcggcagggggcggggccggccgcccggaggcccaagtggcggggacgcctccctgccgggtcaggttctcagagcgggtctccggcggcggcgacgggggccgggccgcgcgtgacccgccgcagtcacgccgttcttaatcactagtagctggtgctccaggctggcggcgctcacctttctcctagccgggtgacccaggggatttattttatgttggctttctctgaaatgccaaagccacccgattattcagagctgagtgactctttaacgcttgccgtgggaacaggaagattttcgggaccattgtaagtgcttaggagttactgtcttaacttgggggcttgacttgtagcaccccgcgttcacgtctgaagcagtactgttatgccagaaagtgtttcacctgtcaaagtgaaatgtgctgtgagaaactagtttaattccagtttctggagggcgggtattatggacctgtttaagtaggatgcagtgatttattctgagggattcccgttaaaaagcagaactcagtatatactgaaatcaatggttttttgtttttttgtgtgtgttgttttacttgattgtaagtattacacaaaacaacctgtaagttttacatttcttaataggtgtttaatttaattattttaaatcttaagtgtgttagtgggatattttagaattctttttttttttttttaattagacagagtctcgctctgtcgcccaggctggagtgcagtggcgtgatctcggctctctgcaagctctgcctcctgggttcacgccattctcctgcctcagcctcccgagtagctgggactacaggtgcccgccaccacgcccggctattttttttgtatttttagtagagacgggatttcaccatgttagccaggatggtctctatcacctgacctcgtgatccacccgcctcagcctcccaaagtgctgggattacaggcgcgagccaccgcgcccggcctagaattcttggagataaagcaagtacatttggagtagttgccgtgacagcattactagaccctaattgtattttcttttttaatttgaaggcacagagcatggagaatgatgaacttccgtcagcggatgggatggattggagtgggattgtatctgttagccagtgcagcagcattttactatgtttttgaaatcagtgagacttacaacaggctggccttggaacacattcaacagcaccctgaggagccccttgaaggaaccacatggacacactccttgaaagctcaattactctccttgcctttttgggtgtggacagttatttttctggtaccttacttacagatgtttttgttcctatactcttgtacaagagctgatcccaaaacagtgggctactgtatcatccctatatgcttggcagttatttgcaatcgccaccaggcatttgtcaaggcttctaatcagatcagcagactacaactgattgacacgtaaaatcagtcaccgttttttccctacgattacaaaactgccagtcctatatggagtctgatcacaagactgcagtttcttcacagatctcaggaagttgtcgtggggcagaggctttttaaaaacatgtgattagggagctatctttatctgaataataacgaatttttaggtaaaacctgagatagagtactacaaaatcatgttgatgacttcagattttggaagttaaatcat

SEQ ID NO: 1241462 - DNA, 4001 bp, Homo sapiens
aaaccaaatgatcaaatctaacttcagcaaaactgcaacgaactgacatcaggcactctggaagggccacactgacagagacacaacgttgcctctcacatattcctggtaaaaacatttaagctgaagctaatcatgaggcgaaaatcagacaaatccaaattgagcgatattctgcaaaacactgggctggattctttaaaaatgtcatttggcctacagaggacagccaaataaaaatgaaaatatcattgtcatgaaagacacaaaaggcagggacaccatattaaaagagaccaaagagatatgacaacagaatacaattggtgattcttgattggatagaaaaaatataaacaactataacacatgttattgggataaatggaaaaactgaaatatggactgtgtatcagagtattgtatcattgttaaattttctaaatgtgttatttgtactgtgatgatgtaggagaatgtccttgttcttggcagataactgctgaaagaagtggtgaattattagtagtctacaactaactcttgaaaggtccagtgaaaataaatacataaatgggagagagaaaacaccagagcgaaagcgagcacacaaaaataaggcaaaatggtgcagctaagtgaaggacgggtttataaatattcaatgtactgctcttgcaactttcctgtacatctgaaaattttcaaaacaaacagatgggaagaaaaaaatgaatatagtacaaaatatgtgcagtatcatagtctgcactgtaagtaaaagtgtaaagtcttttgtagaccttggattctaactacagctttgtagtgcattaatgaaaaaggtaaacattaaacaatatccaacaaaataaaataaaaataaaaatgccttgtaaagggtgaatgagattaattattttaaatgttatgcaatgtacaccattgacaattaggatacaatgcaaatttaacattataactactcctaacataatattttcacagcaaaggtctgaatttttactgcacctctggttcacaaccataaacaattatatctgtacagtaataataattttaaaaacatcattctagctggttgcacttggattgtcaataatccacaaatcccactaaagaaaattttttacccgttacattttctagaatgactacctcatttcccaactttgaagtaacagcttttaactaaaaggttgcttcaaaactactattaaaaagtggttcctataaaacactactgcttgacccaaaaaataaaataaagcacacagcccagctttcctctcaattggtcactaaaccagtatcatgaaaaggcagggagccacgctgtaagcgctcccccgttttctgccgaatgttcaggaaaagagtgtcaggttcaagccagcatttaaaataaaataaaatgaatcacagtcaactccctaaactccaatgtaagaaccacgcacctgcaccaaaatatgcctgagcgggaactcgagtcggctctccgagaccccaaagttcccaacctagccccaacccctcaagcttcccccaggggcaccggcttctcacagccgagggggattcggggcccacatgcggagcctcccgggcctgtcgagccacggcagaaggcgacgacgcccggccccacaggcccctcaagctcctcaagctcccccagtccctccctcccccgccactcgctctccagtccctgcccctttccccggccccactcactcttcatcttggatgcggaagccggtgacaaccccttgccgacactggacggaaaagaaagaagcaggaaggttgtccccctgctttccacttccctgaggcggggtcccgcactaggatctccgtggtggtccctcgaaggagagcgttagagatcccgccgccatgttgtgtccctgtcaccctagcaaccgtcaggccctgaacgccatgagctgtcgcctgcgcatgcgcaagatgccccgcccatgtacgcgtgcgcagtgcagcccgtcccctcagcccggttgctaagcagcctttcctccgcttccatgtaaatactgtgcaaatccccgcctttgacacaggcgaccttcgctcggctcgctctccctgctggcctgggaacttagcgatttggaacccactacgtggacgatagccttgagctttaattgggcttgggagcttctacaggaatttttttttttttttgagacagagtgtcgctctgttacccaggttggggtgcaatggcgtgatctcggctcactgcaacctccgcctcccggcttcaagcgattctcctgcctcagcctcccaagtagctgggattacaggcacccaccactacacccggctaatgtttttgtatttttagtagagacggggtttcaccatgttaggctggtctcgaactcctgacctcaggtgatccgcctgcctcggcctcccgaagtgctgggattacaggcgtgagccaccacgcccggcccagtttttctttttaattcaacaagcatttgtttttgccccaggaactgtcgcaggtattggggattaaaggacagtgtagacgaggtgactgagttcttgaaactaacattctagtgtaaagatgaatgaatgtacaccggaatgaactatgtgcagacacggtgcctaagcaacacagtggcctagttctctggaccctgacaaaacaataaaataacaagcatactatgtatgggtatagtattttatgaagctcattagattagcctcataattattccatgagatcaaaaccctgttttttcctccattttttttcttttactaaaatacatcgtttatttttaaaacagataagtagccttgccaaaacgaagcctcagaaaattggtttaagactgaattggccaggtgtggtggctcacacctgtaatcccagcactttggaaggccgaggcaagaggatcgcttgaggccagaaattcaagaccagcctgggcaacatagagaaaccccacttccctcttaaaaaaaaaaaaaaaaaaactccgggcgtggtggctcacgcctgtaatcccagcactttgggaggccaaggcgggcagatcacgaggtcaggaaatcgagaccatcctggctaacacggtgaaaccccatctctactaaaaatacaaaaaaaattagccgggcgtagtggcgggcgctatagttccagctactccgggggctgaggcaggagaatggcgtgaaccctggaggcggagcttgcagtgagccgagattgcaccacctgcactgcagcctgggcgacagagcaagagactcaaaaaaaaaaaaaaaaaaaaaaaaaagccgggcacggtggcacatgcctgtaaacccagctattcaggagaataaggcggaggtatcttgagaccaggagttctaggctcagtgagctatgatagcaccactgcactctagcctgggtgacaaagcaagaccttgtctcgaaagaaagagaaagcggccggtcgcggtggctcacacctgcaatcccagcacgttgggcggccgaggcaggcagatcacttgagtccaggagttcgagaccagcctggccaacatgggggaaaccccgtctctactaaaaaaatacaaaacggctgggcacagtggctgatgcctgtaatcccagcactttgggaggccaaggcgggtggatccccaggtcaggagttcaagactagcctggccaagatggtgaaaccccatctctactgaaaatagaaaaatgagccgggtgtggtggcaggcacctgtaatcccagctactcgggaggctgaggcagagaattgcttgaacccgggaggcggaggttgcagtgagccgagattgcgccactgcactccagcctgggcgacagagtgagactccgtctaaaaaagcaaatacataaataaaatacaaaacaagccaggcgtggtggctcacacct

SEQ ID NO: 1241463 - DNA, 4001 bp, Homo sapiens
agaatcacttgaaccagggaggtggagactgcagtgagccaagatcgcgccactacactccagcctgggcaagagcgagactatgtctcacaaaaaaaaaaagaaaagacaattatattctatataagcacatatgtcaagatactatttttttctagacactctgaaatcagaaaatatcagagaaatagggcatttcagtaaataatatataaaattgatcaaatttcttggaatgggtgataaattttattttttccatgacacagccctcaggagatcctgaaaacacgtgcccctgtgatgagatttttaatcaaaatcataattcaagatcatgtaaaagctaaacccactgtactgacttgggtcaccctcaagtagaacttatatattctctcccgttttaacattctaaaacaaattaatgttaatcaatccaccttaatttgtcaagttcaagtccgtcttgccaaaactaattcaggtacatggtaaaatttaccagatttttaaagataaaataatgaattgcttttcctatttttgcctgttttatctataaatctcttacattataatttaatagctcatcctgccgcaaatagaaagcctataaaacctatccacaatagctatgtccacagggatctagtaaaaaaaaaaaatcgtagttcttaattcaaggaagcttatttaataagtttcattaccaccaatacttcaaagacaccaataaccaacacgtcatttgttcctattgcataatttaacaggttattaacttctggtataatccaaaagcataattagtaaactatcattaaaacatgatattgcttttttaaaaaatcagaaatattaacacctttcactgcgtcagtcaaatcaaaatttcaaaatttttgttcaactgactttccaaatctaaattcttactattctaaacgagtatggagacaaaacacacactccatactacatctaaaaacttcctagccatcagattttaattttagcataaactgccaagaaaaaccttttgaccgaaacctacattccgtacacattactgtatgtcaatcaacagaaggtgagttatgatcattagaaagttacataatttactacaaagatcgtttaaagcaaacttcattaaacgtaggttataacaatttacatgcttcaaagttcaacgtgcaaccttaaagtatcagaaaccatgaacaaaactaggcttttcttttaaagtggtcacaaggaagcaggaactgtttgcgtgtttaagaacgcaatgagcagcagaataccagcagctgagtcaggcagaggaacgctgactacattctgacttctaaaggaaagcgttccctcgccgatttcccagacccggccgggagagtcccgcgcgtcgcgacctcggagagagggcgcagggggcagacgactccccgccgcgccccctgcacctcgggctcggctggctgtggcccgcgccaaggtgcatgcccagccaagcagaaggagcgggcaccgcgcaggcagcgttgctccgagggacaaaggttgggctcacaccctccacggccgcagctcgcgcgcctgaggaagcccgcctggctgccaggggtctcccgctggccggagtttgcgcagcgtgtgggggaaggggagcccggccgcccgcccctcccccgccgcgctcccagggacctgttgattaagatctctacagcccagccgccgccgatccgcctcttacctccacgcctcggctccgcggagcctcccgccccggccgctcctacgcactgcagaagcgacagccctccggcggcccttgaaattccggataaagaatccagaaactcccgactccccacctcagaatccttagtccccgcccccgccccaccgcctgcctcctccgtcgccgccgtcaccgccgcagccgccagcaactccacttctagaccgcgcgagaccggcccctgcggccgccgcgagaccgcgcacgcgcccccgggactctggcgcagtgggcgcgcggatccgagtcccaccccgcccgtgagaggctggcgcggcttgcccaatcccgagccggagcggagagagcgcccgctcattggtcctctccgcagctccagccgggtgcgcgcagtcgcgcgcctctaagtctaaaacgcggactgctccgggctagctggcccggtagagccccttcgggatttggccggcgggctttgtggggacgcgaggcttccctgggtttctacatcccttggctcttgtctctggatgacgtatcctgaagaaaatctgattcctcttgaagagattcctcatgtcctgtcaagttagtcacccaatctaacatttgttttttttaaaaaatgacataaacacctggatgtgtgcagtgtcccgcagaagactgcataaagccagcagctgcactgatttctgaaaaccagaaagcaaggatagcaaggactagaactatttcccagaagtctcccgaagggacagagttacgcagatcagcccgtgctccgggcatggctggcgccctcgggacctggatgtgccacccttggaatggggcaggactcaggcgggtgcgggcggaagtcagagcagattggaggacgttctaaggagaaacaccagcaatgtgtctcgacacttgcaataaaagccctcggatggtctctgtcttgacagtaccttccgagcaagcccattccacatttgaacacttgcaaggtttgttaatcgacctctccttctatgaggccaaactatgcctgtgactccagcccgggggcacagtttcccccaggggcacagtcctccctcaaagccttcgtatatgccatttccatttctctcggttttcctcattttgtcccacggtgtttttccatctcgcaatgtcctcaggtcctgattttcaagctctttcacattcttccccattacgctcctctggacagcctatgggttgtggtgtccctcactaaggacactgtgatggcctgaacgaagcaaaccgttgttcctggtggtgaagatctttggggatgcctacccttcccagatttgttatccttctcaaatctgatcagcattctgtccaagtgtttaataagacagagcggaggacagaactctgctgcatgccactaaagaccttaatgctcctgccatcaaaaatttctcagtaggcttcgaatacaggtggacgacacaaccgaactgtcttcttggcccatattcctccataaagatgccatgagaactggtgaaatgcctaactgaaatccagataaagtctccaggattcctagaaactactagccataccccaaaagaaaaaacggttactgtgtgtgacttacttccttttctaagttcttttgtttttgtttttgtttgagacggagtttcgctcttttgcccaggctggagtaaagtggcgcaatctcggctcactgcaacctccgctccccgggttcaagcgatactcctccctcagcctccccagtatctgggattacaggtgccagccaccacgcccggctaatttttgtattgttagtagagacggggtttcgccacattggccaagctggtcttgaacacctgacctcaggtgatccacctttctcagccttccaaagtgctaggattacaggcgtgagcaaccgtgccccgcctctaagttcttaaatatataacataaataataattcaagaagcttcctccagctcgtcaatgaattcttctttctctagcttataatttctcatccttggcactattgacatttgggctggataattcttgtggggactgtcctgtgcatcataggatgtttagaagcatccccagcctctacccactacgtgccagtagcatcaccctccccaatgtgacaatcaaaaatgtctccagacatcaccaaaggtcatggggaggaatgagcaaaatcatc

SEQ ID NO: 1241464 - DNA, 4001 bp, Homo sapiens
agatgcatggccctgaatactattacttaatttttaaaaagtccatgctttgtcccagttagactttaagttctttgggtcagggactgtgttgctagcttttgctattcacagtatagtgtagacacataagcatgttaataaaaatccataaatacctgctgacttgctgaaaagatgcagtatctaacccaagtagtttactttccgcaaagaaagaaacagagtgaaaactctgcccaaaagtttgaaggcaagacagagaagaggtgttatttaccaggaaggggaaccaatattgtgtatgccacatgctttacattggttgtttcattttatccttaaaagaaccacatgagataggtattcttttacagatatggaaactgagactaagataaaattaagtaatttgtccaagaccacaaacttagcgagaagggaagcctggattaagaataaggtccataggctgggcgtggtggctcatgcctgtaatcccagcactttgggaggctgaagtggatcacttgagctaaggagtacaagaccagcttgggcaacatagcaagagcctgtctctactaaaagttaaaaaaaaaaattagccaggaatggtggtgtgtgcctgtggtcccacctacttggggggctgaggtgggaggactgcttgagcccaggagatcaaggctgcagtgagcgatgatcatgccactgcacttcagcctgggtgacagggcaagaccccatctcaaaaaaaaaaaaaaaaaaaaaaaagcagtcatatgtaattccagagtctttccaatagtccatactactacaaggagatgccaggcttcttacagtaaataacaagtagaaaaaatcttcaccatcttcctcagtcaccaattatccaattaagcaggatcatacccctagagagcaacaatagggtattaaatattcagatctctgtgttgtcaaggaggactggcctatgttctagtcctggatttgctactacctagctgtatgatcatgtgcaattcacttctgtaggcctcaaatttcctacttgtacactggagtctcataaggagaatggggagtagcttcaacttctctaaggttctcccttctagggctaatatttattctccctccctctctcttttgtaagtaaaggtaaaagaattttctgaagggagcctgccatccatagtcttcatccttctacccctctgagacgcttatttctgcagcttttcaaagagctctccctgcatttggtaccaaatactgaaaattcactaaccacagagaaaagtggttcttggttaaaaaaaaatgtccccctttgaaaaacgcagaagtcttgtcacccccttccaccctggcggccccaagtcagaattatcttctgcttatctccacaagccaagatcctgtttagctttaccttccttagtcgaaatgcaatctacaaaataaacaagagggtttctttccccaaattccgttttccaaataaaaagttaaacacttttacacgcccccaccttgatacccccagctccccgtccaggggcgttccctctaggtgaaaatctccccagtggagttaactgccagatcagcgcttacccgcatatgaccagtctgggagctcggtaaggggcccgtagccggaggggttggcagccagtccctgcctgtgtggagaaaaacagatctgtgaggacctagcccagcttctggtcccccaggtgccctcatcccaggactcactgtagtcgccactggccgcccgcccaagcggctacgctgcagtgcagcctccggacacctgctgggagaacagagcagagttgggggagaggccgcgcagccggatcaggggtcctgtgcccgtccccaaagggcccccgagtccacggtccctatctatacccactcactgaagagaacagtccctaaagcagccatgctgagcaggagtagccggggtagccggaagtaggcgtggcctcggtggccacgcgcgacgctatcggggaagcaggaagtcgccatcttgaatctgggttttcaatcacggctccgccatcttgggtcatcgtacggaaggagagacaaaactgcagtacaggtttttgaggtgaaaacgaattgtcgttcagcgcatgcattctcagtggaagtcgtgtcctcccagattaagccgttctgaacagttcccacaacctccctacagcggtctctagttcattgaaattgatattaatagtaactttgatctcaggggtaacatccacgtcattctacagatcctcgcatcactgtaacacagttttcctagactaagaaaagtaatcaaatctagagttaatcggaaattgggccagcctgggcaacatggcgaaactccctctctacaaaaaaatgaaaaattagctgggtgtggtggcgcatgcctgtggtcccagctacttgggaggctgaggtgggaggatggcttgagcctgggaggccgaaggctgcagtaagcagagatcatgccactgcactccagtctgggtaacagagcgagaccttgtctcaaaaaaaattctgtgtgataagtgctgtattaggcgtagattttatggagaacaaaaccagacatcaatatcctgatagagctctcggtataaaagaaacaagacaggccaggtgcagtggctcacacttgtaatcccagcactttgggaggctgaggctggcggatcacctgaggttgggagttcgagaccagcctgaccaacatggagaaaccctgtctctactaaaaatacaaaattagccaggcatggtggcacatgcctgtaatcccagctactcgggaggctgaggcaggagaattgcttgaacccgggaggcagaggttgtggtgatccaagattgcgccattgtactccagtctgggcaagaagagtgaaactccaactaaaaaaaaaaaaacagacaatcaaatgatgacatacatgaatattgtcattgagtgctgggaaaggaaatacatgttgtttgtgagtttatagtgtgaacttgatctacagtagaccatcaaagatgactttcctgagaaaggggtattgtattggagctaagatgtgacattccatttttataagtgctaccaccgcacattgcttaatattatccttgcaacaaccctgtgaggtaggtactagaaagtggcaaaccctgattggcgactcccctccttttatcacttgctattcagtactgtcttggagaagtcatttatccttcattttttaattttaaaaatgcttaatatgttacatttgtgaaaacgatctaaaagtgataatgtgagtgaaagtgctttataaatcctgaaactcctacaaaagagcccattaactgtctgccaggtgtgaagggaaaatatcttggtcctcttcaagctgagaacctgggaaccactcagggcaaatctgcctccaattctatccaaagtcatctgtctactcacagagacagatgcatattctgactacctcttctggaaagacttgtcagaaactcaaaataatgcaaccatctgtctctcacctacatgtgacctgggggcccccagtgagggggccttgctttgagctgtctctgcctttctggacagaactaatgtgacttcttacattttcatgtctccctaaaatgtataaaaccaagctacgcccggaccaccttgggcacatgtcttcaggacttcctgagactgtgtcacaggcacatccccaaccttggcaaaataaactttttaaattaactgagacctgtctcaaattttggggtttcacattttggtaagcacagaggaattctgagtggagatgcccttgaccttaaaaaaaaaatctcctattggctgggcgtggtggctcatgcctgtaatcacagcactttgggaggacaaggcgggtggatcacttgaggtcaggagtttg

SEQ ID NO: 1241465 - DNA, 4001 bp, Homo sapiens
ttcggggagggcggcgcagccccacgaagggctcctcccaagcctgtgtggggcccaggggagctgcacctccgggatgggacaaggcagggtcctggctttcatcagccacagcacagctgccacagggcacaaaaggacggctgagagacgaggtcctcacccacaccatggggaaaccgaggcatgggaaggttggagggggggcagccaggctggcgccaagatcacaggcaggcaggcctgaaggccgagcaatgcagccactaggaaggcatgagttggggtcggggtgtccccagccctagagcccaaagctgccaccactccccacccccaacatgggtgggggcagggagagctcttcttgggaccaatcccaaaaccatgcgcagtgggcccggctggagcccaggcagcaggcatcctctctgccagggtgagaaactgggccctcatgtcaggctggaaggggggtctccaggtggggagaaagaacaggaaggaacaggcccctccctcgagggaccccgcacccaggctgctccctgagcgtggggtgggctcagcgcacctgggtccacacagggacctggcaaagctgtatgaggctgtgggaggggctgccgctggatggggtacaggcccaccgcccctctgagaggacaggggaggcccagagctgctgatgcggactgaccgcccatctcacagacgggatgtagggggctcccaccgtccccaaggtcacaggactggccggccagaccacacggcgtccaaggcagcagaagccacgctcgagagacacagagtgttctgggcactcggggtcaggggcatggggatcaagccagagcgggagtgaccccagctccctccagcagcgcaggctgcaggtgggaaaggtaatgagcacctgcccgagagggtcacaggcagggaggggtctcagagtcctggggagggaggcgctgatggaatgatggaatgcacacgaccccccaccttcctgtgaaagaccccacggagtcccaggcacacgaaggagggcaaggctcaaagctgcaggcccggggggcccgagcaacaggaggctgggcccacggaggaagcccctgcccaggaggccctccggcctctccccaacccttgcaaagcgcctcccgaatgggctgaggtgagcgagaggcagggaaaagtttggggggacttagaggcgtgctcgggatgctcgctccctgctgaagaccccctgagggatccctgctgggggaagccccggggccaggctgcaggagggctctagggaggaacgtggcccctcaccggggctccccatccccagaggggatgcaccggagtcccagcacagggccgcgggccgggggagaccccacagccccaaaactcctgctcccagaccggcagccggcgcctcccaaggccacgtgctcccgctgggggctcccggccccggacccccggatgtcccgcaggccccgcgcccccccgccacccccgcggccgccccctcggccccaacaggtgggccgccccccacccccgggccgccgagccccgcccgcccccgatggggccgacccgcggggccattttgggttggggtgagcacggcggggggcggttcgggaaggagccgggggccgcgagggcgggcggggggcgcggggcctgcggggcagaggggcgggggaggcggcagcggcggcgggtgggggctgcgggcgggtcggggccgggcataaaggcggtgcggccttacctccgaccctgtacatgttggcggccatgtccgggccggcggcggcggaggggcccggggcgggcgcggcgctcggcgcgggcggccgggaaaatggaggcgcgatggcgggggcggggggcgccgcaggcgtttaaaggggccgcgctgctgccgccgccgccgccgccgccgccgccgaggccgccgaggccgcgcagggacgggagggccgcggcgcgggcgggagaggaagaggaggagcggccgcgggcggcggggaggggcctcgggcgccgccgcccaccgcacgggccgttaccgaccccgcgccgcccgcggcccgcgcgccccttcccggacagttcctctcggcgcccccgagtcctccccgcgcgccgcttcccgggtgggcccttccaccagaaccccctggtagatcctcccctggtgccctgggggtagaggggagatcctccacaagggccatttccctggtgatccctccctgtgccccacaggtgagtcctgccgtagctctccaggggttcctcctgatgctggggtcctccggcattcctccctgagccccccaagggccctgaagctcagcggcccagccctggcctcggggtccccaccccacacctcccttccaggcctaacctttgcccccgacaccaggcagggcgtgtccttggccttcgccgcccagcccgcgtggcatctctggacaggtggtcgtgcgcgccttggtgtgggcaggctccgtagccggcaaagcctccctgaaccgtgacctggtgagaaggccgcagaggaggtgcctgtgcccagaggccacctccaaagaccccacctgaggctggaacccagcgcctgctgaccccgccagccccaacagggctggagtccaggagcggccgtgctctttccgcagtgaggcagctgccttctcttcccaccacctgtcaggatgccttcccgtgtgtgcttgtgcacaggtctaaggagaggagagtccagtgagtgacccagacgccccagccaggaagagcatgaggtgcgaagggggcttcccagatggagagaaacagatggtcccagagtggcttggagacaggtgcaacatcagtgttgggggaggtgagcaaaaggagctgtctcggggttccaggctgctgatgtgagcagcaccgtgggtctctgtcctgcctgctcagatgctggagggagctgacatctacttgggacatccctctctgtaggacatggagcggagcgttcagggctatcaggagggagccccgtggccacggtgcaagatctaggcaggcgggacagacatggtcaggatgctggggacacagcatggggaatccagcacacaggacaccatccaggtgggtaggaaacagcatgtgctgggaggaaagccaggtgggggtcccaaggagagcggtggccacaatgtcatggctgcagagcagaccagtaaggaaagccccaccagggttagcacagggccaggaacccgagctgcagggcggtgctgtctctggggagagagggctatgggtcccaggacacatcctgcgggctgggctgcagggaacaggagctggcttgctggtgattgggagggaagagcagccagccagcggccaggtgcaggagaggggcaatgacagacaggcagcgtctctccagaaggaaggtggggctgctggcctcccctgtcctacagccccagcctacctctgtctcctcagcaggaaagcaaagctgcagcctgagatctccttccaccaactcctggcatggccagaaagttagccagaaacaccagaaagtgccaggcagctaggaagcatggggagagccccctgaagctgcgtgtgtagtgcctgcttccgctgccatcccagaaatggacgagcttcaccctgagaacccagccacaccactgggacacatcctgacagtgacatgcacactcttccctggccccagcctggagaggagcctcctgaagacaccagcctttgctccttctcccagtgggagtggagagaactgactgctggagtggagacagtcaaggctgtccttctgagggagcacagcacagggtctggtgtcccagggaggcaatctgaaattcaagccaggcctccccagcggagaggacacacccctcaccatgcagagtgacgtttagtaaactctcaaaaga

SEQ ID NO: 1241466 - DNA, 4001 bp, Homo sapiens
tacatgtatttgcccttatggagttgataaacatatttaatttgctctccaattaacgaaagtatattcagtgagcacctattctcagtactggcccagatgcattattattgtactaaattatctgcactattattatgcactaaattatctcttcacaatcagtctttctaaaaggaagatttttatattaaaacaaaaagccactggaaaaggaagtaagtttgaatacaagcaaacaaaaacagaaagtaaagcagaaatacagtttagcaagccacatgttgaaaagcactaagcagtaagtattgtgatttctttttttttttttcttagacggagtttcgctcttgttgcccaggctggagtgcaatggcgcatctcagctcactgcaacctctgccccccaggttcaagtgattctcctgcctcagcctcccaagtagctgggattacagatgcctgccaccacactcggctaattttttgtatttttagtagagatggggtttcaccattttggataggctggtcttgaactccagacctcaggtgatccacccacctcggcctcccaaagtgctgggattacaggcatgagccactgggcccggacttttcaccaccgatgactttgtaattcactcaaaaacctattacaaagttaggagttacaggacaattacaatttagtaactgctgtggctggcaacagttacttacataacgggtgatgtgaaaggtcccaagagcaaactcagtaaggtcacacagaatatatctttccctccttcatctactagagggaatatatttttccctcttccttctactctcatttttcctcaccagtcacctcccagacaaaaagcagccagtgttacttcctgggagtaaagctggcaacgatacccactaattaagcattcagatgtcccgcaagggtagaacaggcagaggtcaagtggaatgcagaatattctcaggactcaggagccaaattacgtttcaagtaactctaggaccagggcagagagatggctgttagagagaagcacgagattgaagagaaaggaaaaatgtattagatttcacttagcgtatgataagactatggtatagtgggaaaagctatgagctggaaggaccctctgtcattatcagccttgtagtcttgtcaagccttgtcacctcactagtctccatctactcacctccaaattaacgggaattaagtagattggatttctgagttctgactaggggggctccaggaagccgcaactacccactctcccggcagaaagtcaccagcagctgcgcgtttgggagcatagtcggcacaggacttttccccgaagcacaggagccagcggctacagccactaggcagtccacttgcaaacgcaggttgtgcccgggttctctttctttggctgcaggtcttcaggtgttatgggcctaactcttccgctacaagtgtccctcccgcaaaaaatgggtccgggggacctgcacaccctcagagccctcgtccacagccccacactcaacaacaatgtcaggtgcttacgcggagatctccttcccgttcaggatttctgctggcgccatggcctttattagtccgctgcccacgatggacaccaccaatatcgaggttccactccctccgcagccaagcaggacaacccaacccacgtgcttagggactggccaggggatcacactactgcgcctgcgcccctgcccgcttctccccctgcagacgcggtggcgcatgcgcagttcggaaggacccgagtcccttaactaaccgagagctaacaggtcggggactgcgggacggaagagggaggggaagatgaagaaaatcggtgatgaatggctggcggaaatgattggcggaaagaaagagccagttcacagtgcgcctttgtattcggcgggaaacccggccgaagagggagctggaaaggactccggaatccggccgtaattccagccaatcagggagtagagttgcggggcggggttggggcggggcagtctcgcgggagatagtttcgcgggttcgggaggcgagtctccggtttccgcccagtctctggggacgcggtggcggggtctgaatcgcctggcttccagggagttttgggcgggtccccgcacgggagcgtggcaggcgctggactcgacagcagatgtggaactggagagcttggcgcgccctcatactttgtcacacacctacgccaccagactggggtcgggcccctccgcgttctgctctggagggcctgggtctgggcccagcatagcgcttttagaatctcctcagctgaatctgacgctcagccgtaggtgaagcttagcccgctgtttcaggccccgccgatctggaaggagtgtcagagctggagcgcgcgtggcctcatcggtgttggggtcaccccggggttgccagggctcatggagggtcgtagtctggattttgtcacccccacgtccccgccccgcagcaagtctggggttggagaactcacgcggtcttcgtaagctacatgccagttgaccctcgaggagggatgctccctccccttaagcgtccacgctggagaaggagtaagatggacaattgcctggggagcctgacagggcggtggcagctgggatgctggagaggactggccccttgtgttactgagtccaaggaatatgcttgctctgctctaggaaccgcgttcaggttacagtcatcccagtagagtcctgaagatgcgtggttcaggtcacttaggacttgaccagataccgggtttcttttacaagccgtttactactggcagagctcatctaaaactttttttgtttgtttgtttgagacggagtctcattctgtcgcccaggctggagtgcagtggcacgattttggctcactgcaacctccgcttcccgggttcaagcagttctctgcctcagcctcccgagtagctgggattacaggcaccacctaattagcccgccaccacgcccggctaatttttgtatttttagtagagacggggtttcaccatcttggctaggctggtcttgaactcctgacctcgtgatccacccgcctcggcctcccagagtgctgggattacaggcgtgagccaccgcacctggcctaaaactgattttttattaattttggggcttttaatatttttttcttatttctaaattctgaggttatttatagtagccccatatacgggattagataatctcttgtgattttctatttctggtaattatttctaatatatgtttttttgtttttgagacggagtctcgctatgtcgctcagggtggagtgcagtggcatgatctccgctctttgtagcctctgcctcccgggttcaaatgatcctcccacctcagccccccgagtagcttggaccacaggtgcatgccaccacgccggctaatttttctatttttggtagagttggggtttcactatgttgaccagactggtctagatctcaagggattagtctcccttggcctcccaaaatgctgggataatgggcatgagccaccgtgcgtggccttaaagttactattcttaaagtttgcacaagtgatatgttaaaggcacagacttagtaatataatgtcattataataataaccctaaaacacattgtctcatattgtgttgtacctaaacaagtgaaattaagaagaaaattgaaggaaatgtttctggtaaattgcagatagtgaatcttttgtcttatactatcaaataggtattgactattccagctttcttatttgttgaggaagatggcagaaatcccgttttacagagggatagactttgaaggataatacccaaagctgcatagctgtggctggtataggccccaaacctgatgtttcttctctaaatctactgcctttgccatctcaacagcctggtttttgacagttatctatgtatgagt

SEQ ID NO: 1241467 - DNA, 4001 bp, Homo sapiens
gccctgatgtcattagatcctgccagtaggtattccagtgttttttatagtggagaaatccgtggctctaaatgactaaatgatttgcctgcacagtgactagcgggtggcagagctgggatcagagtcaaaagccccaggggattgtggcctgttattctacacttcaatgggttgtaacattcagtcaacgagttcatgaggcacacagccctgagccgcagctggtaaccaggggtgattctcttggctggtgtgagcaaaccagggaccagagcttctgagtgccagtcaaggagagtgctcagctcaaaagtttctgatctttgtgttcatctgggtctaagaattactcttgatttgggtgaacggaatttgagaaagtggactcatggaggaaactgaggcacagggaagagggatacaagtgcaagaagggggcatcatttaatgctgtgtctgtgccctctttatctacaagacccctcttaggcgaacactgaggttcttcttcctcagcatcctctctggcagggggaacatggccctgggtggcacctgttgcaccagctcaggtcaatttgagagggatcagattctgggctcctcaaaggagcatgtcctggcatccccactggccttggcttttctccagccctctcagctccccctgcaagtggctccacctctgcatcttctttcccagacctccttcccttctgccccggcgccatgccctactcaccttcccattctcggtttcagcaatgaccttgcctccctcccgggacaaaatcttggctttgacaaactcttccttgtcatcgggcacgaagcactcagtgcgaatgtcaaagggccgggtctgggcctctagacgctccttctctgacttgcggaggtactgggccgctgccccaaagtcagccatctgggcatcggtcatcttggtgcttcccctgggtcagagacaggagggctatgttactcctgagggagcccaggctccagcgagtggctttgtcctctgcagcccccctccctacccccgctcctctcctccaccctgggagaggcacctgctgttgcaccctcccctactcagggctctgcttctcctgccctctgaggtgatgctgaaggacaatctctgtaaggggtttccctggggtggcattggctggagtatgctaagggttggcgctgagtgcttgggacagcagacccctggtccagcaatccggctcccaggagaagcatgccccagtctctgcagagaaaatgggggcagttctcacctggttatcccttcacggagaatcctgaagaatctggaccgtgggtggagcaaggaacaacagaggtagagccgggcagagagaagaacagatgaggagagtgaagaacaacagaggcaggccacccggggatggaggcagccccagagcgcagacaggcaggacagaccagggagtcagaaagggaaagacgcagaggcagaaaagaaagggcaccgagtcaatatgagtgcgagggacggggtgtggaaacagggttagaagcagagaggcagggaggtgagaacacgtgccaagaaggaaggacaagggagagagacaaagaagcatgattgtgacaagtgtcgatgaagaccaagaggcaagataaaaccaggatcaagggaaggaagccatccaaaggaggaaggaagatggaaagatggagacaacatgtaggagactcagaatgatgcagagaaagaaatggagagtcagagaaggagaaaagaggtttctgggtttcctgtggaacctccttgtgtcagggggaacttccctgggcctggagataggcagttttaatagagcccttaggcctccaactgacctgcaccccactcctggtgaaggaggtccctcacggtgggggctctgtggacgggctgcagggcatcccaccccaaacctcctcttacctgggccgcaggagtctctctatctgtcctcaaagctccagttcctttatatcccgtttcccccaccctctgtctaaatttggagtccttccggagggaccctccctcccacctctctcccctcctggctcctcctcctttgatcctttggctctggaggtgacaggaggacagcagggccccctgatttgcccaagaaaggtctgctgccccagcctctctggctccacggcctttttttagtccttgggcacattcctccccttcaaagggctgatgagcagatagtgggaagacaggaccttctcacaccgcctctcccaccctgccatggcccttacctcagttatttttaacccgaagggtgaactgaaaacatgggtgagggtcaccttctcctgcaggccaaatgcctgtcctccgcctcccaaccatgggctttcctcccctgttccccagcctctccttcccattctgacctccctcacacagtcccaggctgggagcatcttcctgctgttagtactggagcccccagtgctagggactaaaagctgcagtatggtgcccagggaagggatctgttgtccatctccatggctcagttttcttttgtcaggaaattctgtcctggcctcagtctgcataagtgccatgcctggtctccttctgttccccaagtcttcagacaagtgttctcccaaggtcttgaggccaccctggtttggggacacgtctggagtccccaccccttccctaatgctcctgatagagtggccaacatccaacctgctcacgcaatggcagtgattctccctgccgcctcaggcagattttcacacagaaccccagttcagcactctcacatacagacttgaccgtgtctgtgcccatcttcagccacacatgcagatttttcacacttacccactcaagcttgcagatttcttttctactttcttttgtgtacatggatgcacacatttgcacatccgcatttgcacacataggcttttgccctcccctgctaccctctgctcctggggtggggtgggcagaagaagatggtgctaatcctagggcctgagagaggaggggggtgggtgaggggctgtccccttctgcctcaccgggctgccagagggtgcaggtgcctggcaggcctggggatttacaccatctggtccccaggcactgcattccatcggggtggggctctgccacctgccccctccccaggcagaattttgttgcccctttccaagccctccagggcttatactcacattcccttctttgtgggtgtcctcaagcaccctaggccctcaaggccccgctccccatcctccaatgctgccatctctcagaggctgtaggtgtcaggtcttcagcaggctgttcctgttatgactaagtggacattgtgttcaggaaacaaagccagactcccctgctctggccttccccccaccctcacacccaggaacaccctcccagcccccctcccaccagtttactgtcacctctcaatatagctccagggtgtggaggtgggtaggacgacaggggtcagcttctctgggtaggagcactttccattaagatgtggcctctcccctagctccctaggacgctgccaccccattcctgggctcaggaacacacctctctttccagagcatttggaccttttctcaatgtccttggagggaccttagttgaccccacatccccatcttctgcaggtgcttatgccaaatcattacccccaggggatgcaggccacctgtccccagctctaggttactcgaggccccagaattcgagccggggggttagcccatggccagtgcgtcactgcttggttcccatagctctggggacatgataaggagctgagaacgccaggtcagtctgggtcggggtcaggtgacaaagaccaggctttgtcctcagggaaccctgtgctctgagcaggcctcacttggtataggtggtggtggcagggcagcggggagtggaggtg

SEQ ID NO: 1241468 - DNA, 4001 bp, Homo sapiens
ggtagggggcggcagccccaaagactgccatctccgaatctcccatggctgtgcctggagtgagcagaagctggctgccctcccatctgcccattcttcccttccctccctgggctctccccttcagtgggagccccaaaacctagcaccatgctcaagagtcaagaggagttaccagtgagtcccttcctctttgaggttaccccttaaccagaggagcagcctagcaaacctgccagggtaaaaggaacaactaactattgttcaagctggggctctcctaggggaaggaagagcattctgagctccctgtaggagcagaaatctaactatttccatctctgaccctcatctatccctggaccccctggtcacaggtaagtagctcttgatagccaagatattctctccagcacatggcagaaactagagttccataggctggctttggggctctaatgcccagtcttactagattttcaacactctagcttcagcttttcttacctgggctactcaagtgtgtctacagatgaggaaaggggccaaggcctgcaggggacctggagagagggaagaggctgtgtcagggcaggctgtgcccaacctgaccagtcccaccttcctgcttctccctggctctgttcttcagcatccaccctcttccaaaacaaggtggaaagggtggtcagcttctctggtcccatccttcttgtttttcaaaccctattccctttttcctcaagaactagttctaacagcttcctggtgtcaactcaacctgaaccctaatcctcttcactcctgcgagatggtcccacccctgcctgtacccatctagtggtacctttctttgagccatctgagagacaactaatggtcacatttgttcggcactttccagtctaaaagcacttcaatgcactttctcctactcagtcttcaccccatttgacagatgaggaaatcgaggttaaatggcttgcttggccaagagcccatgacaacaagtgggagagccaagacttgaatgcaagtctgatgactctaaagagacttcttttccatcctgtccccattttgttgtcagactttgtggacattctcagagagaagacactgtgggcttcctctcacagacacacccatcacatagccaaacaccctccacaagccctctgatgaacactcatgcctgctgcttgggcatgcctctcacatgaagacaggcttccttcccatacctcaatccgcaccccaaccccagggtgccatatatgcctcaacagcaaatgtgcacatttcaggatgtgtgccacgtaagtagatcacatcactgcgtgttcttcagtacacaaagacctggaacatcctacacccccgtgcctgtgagttccttctgcagagggtacagatactataacagtcatgactcgtggaggcatagacaagaacctctgcatgcatggacaggggtagctacacattccaggcctcacagaatcacatgaaggcatacacacttcctagaatccttctccaccattctttctccctccctgcaaaggaacctcctcgttcacagacgtgatcatacacccacatctcccacttgatatttctgtatcagtcagtgaggtacataccctttctcacattcagactatgcaggcttgtccacacacacacacacacacacacacacacacacaccctgtaatgcatattggtcccatatgctcagatgcagatatcttcccctaggaactcctgtggcacatacgcccatgtttagacctgcacatgtgtgcccagtgactggacctggtactctgcatgaagtcctgcatgaagcttgctattccaagaggaatcccttcctaagcctggagcccccttatcccagagtaaagcctccagctcccgctcctacctgagagcagcagggaaagacacagagcaggacagagctgtggagccagacctggtctcaggggctgtatatatggggcagcagggcacccccacccccaacggcacccagtccctagccggatttagaaagggctgttgtcactagaagcatttcccccaggctcccccccttcccaaacagtgctcccctccccgcctctccagctaggaaacaattggaagtggtcgtcattgttatggcatggactgtgcagggtctgagttccagggggcggggtggctcaaagtgcagcaaaaatatctcccaggccaggcctcacattccacagctggcaggagagggaactgaccacgaccaccaagaccacaggcagccaatgtcctggctctcccgcagggcacttctggccctggacactgctccccctccagtcccctgctgcgaggcccctgatggcctggccgcatttccacagtgtcctccctgctctcctggcccaggtcctgtatccaactggaagctgggaaggggctgagtgtcagcagcagagaagggtaggacagagttgggggcatggccccagggtgaggcagctagactggggcagctggaaggacatttcctagccaggtggcaagaacaataaccatggagcttagagatggggactctggctcaggcactgatttccttggaccagcaggcaatgtgttgaggtcaccaagcctccgagccagacaggcctttagcaatccatccaagcacttcatttaatggagagggacagtgcattctttaaggttatacagctaatcggggcagcaggattcaaggtgggaaacctcagcagatgggagtggagcccggcctgtggagggtagcctggaaaggtgggctgggattccaaagatgtggggaccccctatgcgcagagagcaggacccagctgcattggtcctagtttggagcggtttgcctgactcacgttcctggctctgccccacaggtactaaaggcctgagcccagagacagaccctctcagagctatagataatacaactacttggagctggaaggagacccctaagacagctgttgtctggcccacccagcctcagctttatccagagctggaggcgactagtgttctggcaagtgaggcagagtaacaggacaggaaaaatcttcccctctgcaggcctgaggaacagccacaaaggaggggaggaaagggagctggggcccagcctacgagcacagaacacaaccgatgccatgctcttctagcaacggggcatgcaagcttgactggctccgtgtctaggcaaccactgcacgatttggtgtgaaatctcccccttcttcccaagcacagctcttccgcgcatgcggattagtccatctgattagctgtcagcttggaaggagtgaggcaggcctgggggatgggtgcagcaggtacattttgaaggtggggtgggcatagcagggaagggaaaatccaggaggaggcctctgtgggggttgcttggtaaccaaggcactaaggtacagtctgaggacattgagcagctataaggggggtgcaggcaagtgggggtagaccacgaactgcaagggctgtgtctgacaacaccgcagctctgcagtgctaaggtatacagttgctgaggttatcccagtagtctgtgctactaacatgcccggcagaacagactctggcagtcccccccaggccctgccaggtgctgaggaatcagccccattgacagagacagaccctctcaaagctatagataatacagctgcttggagctggaaggaaacccctaagacagctgttgtctgaggttccctgtaggaacctcaaggattggcgatgaggggcaaaaactcctttcgtccccaccttccagctttccaagctccaaactgccacccctccctgatttcccagggcaattaagatgcacaaagggtgcttgggacgtagttgagccatttcaaagccagtgtcttcaccacaggccagcgtccttccttggctggggacttgggtagtct

SEQ ID NO: 1241469 - DNA, 4001 bp, Homo sapiens
tgccaatactatgttaatttttaaaaaccgtccaaaagtctttcacttacgtgtaatattattgtcaattatactctacacaagccagtgttactagtgtttggccacatctacaaccagtttcttaaattaaaaaaaaaaaaatcagatcggtaacaatttcacacaagttttctacattccacaaaagggtattttgttcaagtttcaggagtctttcagccaccagaagtgttagtagcgctttctggaatggagtaccagaaagcaggctggctacaactgttaattgtccagttgaagtaaagagaaacatctccataattaccgaaaatgcttgtaagatttaattctccaatatgaccacaccaagtttgctgacatccatgttcaccacaacatgtttatgcatacactcttccctgattatggttgtaatcgagagactaataaggcctgtatctgaacagaaccatgttcaaattaaatgactgtaaagtgtttgaggatgcgggcgggtaattaaagacggttaaacacgattataatctaatgtaaacaagacacaagacccccaccccagtgaaacacgccaccatacaggcttgctgcagttacactagtatcacgttaacccgaatcatgaagtcttaccttcaaaacaatttcattaaataactaggaatgtgtacagcacttgacatcatataacgtactatgatacgcagcaggagatatccactgccacattctgggccctcactccctgccccgcacagtctcgatcactgctgggttcaccctctttttattctatccacttaccaagaagcacagctgtggccagttgtggataaaatatctataggtataaatggagtagggttcggacagatctttggtgatcagtctcatgatatcgggcatttgtagctcggattcatatcggacatatcgtatcgtccgatcctccccaggctcaacctccctgcccgaagggcttcttaagctgcagtcggcggtcagggacgaagacagcagccgcacctgctcgtcttcctcctcctcctcctgctcggtgccctcggccagtccattgcgggccgccgcgggatcgctcgccgccgctgcctccaccgggctggggaccgcagttcttgcattactagagagggagtgagggggcctctcgcccgagtgtaccccggctccttttgttgcagtcgctctggggcctccgtcaggggtggctgtggtcgcggccacctctgctacgctcaggaccttgctcttgagggaggcggccgcccggaggtgccgcagttcggggctaatcaatccgttgagctgctgctgctcctgcggcggctgagggcagcggaggcacggatgccccttggccgccaccgtcgccgactctccgcccgccgggctcctgctgccgccgccttcgtgctcttcgtcgtcctcctcgtcctcgctgcagcaggcgagggcggcccccgccgggaagggacagcggggctcgaccgccgccggggccggaggtgctggtggtgggaggaggctgctaggcccaggcggtacctccgccatcctagaagcgacacagaccgagaggggaggccatgaaacccggccgaggagcgcggagaacagggggcgacggatggggggcggccgaggtggggggaacaaaggcagaaaccgtccctcacggagctgccccccaattccccgccacccccccgctcttcagcgccgcccagctgctcagccggccaccgtccccgtccgcccgggcccacccgccagccctgtcactcgcggcccctcctcacggctcaccccgcacgggtccccgccgccgctgccgccactcctcttcctccgccaccgccgccgcctccttcgcagccgcggcagcctccacagccgccaaggttctcactcagccgccgtcgccgtaaagcgcctcagctgttaggccgggtaaagtttcctgggcctggctttacgacacttccctgcctgccggctgcccgggccaagagagaggggcgtggagggaggtgacctgtggaggggcggggacaaaggtgtctcctgcgggctgcggggaaggccgcgtgctagtgggtggggctgtggggccgggaagttgcagagggctttggagtcacaggctcccaaaccctcttcctcggtttgggggcgcctcaacctgcggtgcttgccacgcggggccggggagggatggaccgggcaggcgctccctgcttaaagtctaccgcgcactccgagctgtagcgaatctcgccaattcggggcctgtggaacaagccgtttacaagtcacctaaaaatgcccttttaaagctgcacagcgtttaatgtttgccctgaccaggggcaaggaggatgggggaggagcgattaaaaatggagcaaatcagagaagccgaccgaaaaagaaaggaagatttgagctgtgaaaatatggggatggctgtcgaaacgtggtggtttgcagtgtgaattaagttcagctggcccttgccactttgaggcaagggagtcagccctcttcctctccctccttactctgctcctcgcacccagtaaaattggaggcaaaagtgactgacaggtgttgggcaattgctagcacacctggggaagggttagagagaggtggtgaaagagagtgaccagggctaagaagcacactcctaaacttgtgacacaaataggttaggaagcactggtaaacaggtggcctgatcctcccaggggatctgcctatcgagtgcaaaggggatagaacttgagcttgtggctgggcgccttctgctctagtccacaattgactcccggcaggtctgagctgagacaggtagtgtaactcacccgctcactgaacaaattcggttttgttaaaaacctgatttatagagctggtctggtgtgccgcagatggacgttttcaatatataattctatgacggaacacgtttgcaactttttgccgtaatctaaactctatgtataaagtatttattatgctcgcagattctgtgcctctgaaatccagacagagcacaactgggatggcttttctctactccattatgcgtagagcttcagttggaagactctaaggctgaggagtagaattatttgaaaacttcactttcaccgctgatggttgatgcaggataaaggctggaggcctcagttctagtccatgtagacctctcccggtggtcttttagcattgattggtttgggctttgtcacagcctggtggctgggttccacggcaagtatcgtgcgagaaagtcaatcagaagcatattacccattataacctagccttagaagtcatgtagtctctagccaggtgcggtgcctcacgcctgtaatcctggcattttgggaggcccaggcgggaggatctcttgaggccaggagttcgagaccagcctggccaacacagtgaaacctcatctctgccgaaaaatacaaaaattagccgggcgtggtagctcatgcctgtagtcccagctactcaggaggctgaggagaatcacttgaacccgggaggcggaggttgcagtaagccgagattgcgccactgcactccagcctgggcaacacagggagactccctctcatcaaaaagaaacaaaaaacaagttatgtagtgtcagttctgctgcattgtatctaggcagacacaaaattatatccagttttgacaggaggggaaatagactctactcttggtggagagaggcaaggttctcaaagagcatatgggaccagaaatattgctgtggccattttcagaatgtataacttgctacagatacattgaaaacctcctaaacaccttgatgtgtgggggatataaatgagatgtataagtacagcgtgatcccttttctgtcttttaaaaagcacaaaacaaaaccatgtttccaaatgtgcatacattgt

SEQ ID NO: 1241470 - DNA, 4001 bp, Homo sapiens
aaggtggaggttagcgtccagaggaggtgagagaagagcaagtcaccttggcggcacccccgcctcccctcccgctgttccaacaactgcccagaggctccggcctccgaggaactgcaggcgaggccagacgttttctcatcatcgccctccagctgcaggggcacacgcgttcacgcccctccggggactattcggctttccgatctcctctcctctcccttccgtccaccctttagaagagctcacggagctgcggggcttcccggtgcctgctcagaggccaggcagggcatctccccgccgtgcccgtgcctccccccgggctcctgggagaccccccatctggccttcctttctcattcagacactgtcgggggacgctcggggtttgatgagggagtgaggctagaactttcgtaactagcccaccctgctttgtctcctgcgccagatacccacccattcccatggccacgagccctagcggccctgcgggactctatagccaccccaacagaaggaaggggctggcatccagtaccgaatcctcgaactggaggcctggtgccttccctcttctagccgaatagagaggtagggatgcggaagggaagggccacggaggagagaactcagaaaatgtccggcgaaatgcacgcccctacataagcatcccgatccgggaaccctgcccccttggccaggatgtccgccccctatcccaagccttcgctgctccctaactcccgcacactcccgccttccccaggcaacacagaggagcccattgtcagcccagagattccaggcccgaggagatggagggaaaggagggcgggcaagcccccggggggttggggaatcccctgatttcccggccctccgctctctgctaggcaggcaggggcctgaaggtctcatttgagccctgggtcctgccaaagtctagaaaccgttgagagaagaggatcccgggcgagttagagcggggaggctttccagccgcaggaagaccccagttctgggaaggggcggcccaagggaattcacgcacgccccagcctttggagcatcccttgccgaggctaaactgatcccgcggggagcgaggccgtggcgggaaaagaggggcatcctcggctgggcgggcctccgagggtcagggtcgaggttacccgctggagggcggggcggagaagaaagaaggttgccggtgaacgggacggataggctggggacgcccggggaacggcagagatctcggcgcgggagacagagtcccggcaaggggtcccgcgcggaggcgggggcgggcgctgaagggcggggcggggaggggcggccgtctcggccctccctggcggggccccgcggcctggaagccggagcgggccgagccgccaccgcggccggagctgtcccttagccagacccggcgagacacgagcggcgggagggaggcggtggcgcgcccggccccgcccgcccgaccaagcgtcggacgcggcccggcgccgagccatggtgagtccagcgtcgcagccccctgggtcccctcggccttcgcgcagcccgctccgggcccccaagtcctcagcctggtgcctcccgagcctgcctcggactgttcggcccctctgggactctcctccctcccatccccccttcttcgatttgtctgtctgcccgactgtttagctctgtccccaccgggtattgccctcaccctttcttcctcctctcctccgcctcctcccccatcctcccttgggtctctcccctaatccacacacctccccgctccccgccctcctctgtcctgacctgtgccttcctttcctggagcttccctccccctcctggtccgagctccttacccgcgggagacccctgcgggttggtcctgcagcgaccctggaagaggcccggcccctcgggtcatgagaactgacctgcatggaaccaccattttccatccctgtccccaacccggtgaggcaggcccacccatccggccctaggggactggccacagctgtggctgggccgggtcccggggcatggccaaagagggaaattcccgcagagaaaaagagctgcctcaggatagttgggggtgcttgggggggagctcacagtaccagggggcgtgacactgccagagccgaccagagtttgcggaggaggaaagtgccccagagctcttgctgcagggaactgaagggctgcctcagggcactcctgctacagaggggagggaacacgagccggagctccctgcagggactaggggaccctggcagcagcaacttggggcgctggacgctggagggtacgctaaggagaagcccacaccaacaggagtgaacactgccctgggaactttcactgcagagtactctgaagcaccgctgcgagagtgggcactgccagagagagcgcccactgcaaagagggcgggggcatggccaaggggccgctcgctgcagagtggaggagggggagaggccttgccagggggagctcaccgcagggagtggaggaggggcaggggcactactggggccgcccctctacggagggaagggcaccctctggcagggaggctggaggaaaaagaaagaggaactgggccagggagagctgactcagtctctctggtctcctctctggtccccgccggcaggaggctgggtctccgtgctcccgcccgccgcctccctccccagacccctcctcccctcctgccgcggccgtttcctgtggctgagactctcgctcagccatgagctcaccgcccctaatgggttgcagctgcctcgctgctcaagccctagctccgcactccctgccttggagcagacggccccactctgcctcacccccgcccatctccaccttccccccacccacgcgcactgcgtccgcctggtcccgggaacactgggggtctgtctgctcgcccacacaccttggggccgggtctgcgcgctgacgcactgaatgtcccgtctctggagtggttgccctaacttcccagacggtcaagacaaacgggcaactctggatggagctcagagaaaaataagctattttgttttatggcaaaggcaaggtatgggggtagggaaggtagagaccaaggtaaaggctgcattgagtatccccttccccatttacagcaaaaaagaaaaaaaaattccagtaaaagggacttcaaagactgtcttgaaaaagaagtttgcaaaggaatagcccaaggggtggttgtttaggttaggagttggagaaagacgtctcattgactcacttagggaggggagtctggatgaagcagggctgagtctttttgagactcctagtggaggttggcagagagaggtcccactggaatcagaaaagatcagctcgaatgcgcaccatcaaggcctcctcctcccttcccacaagttcctcttgtgacttttttctctttcaactgcccccacccgattctttgtaatccaatcccacatgctctaagattgggtgattgcttcagagccactgtgggagaaggaagagggatgctagaaagacccaagacagtcacagacagtctttccatcctcctctttccaccaaatgaccatctctagcatataaatgagcatctctctttcaccaaatgatcatctctgggacataattgtgggtgatggcacctccacctaagatggggagccctggatggtgggtcttatgggaagggatttgcaggatggctgtgtggaaatctccctcatcccctcgagttctcagccataagctcagtcccctgatagcccagaagcctgtcttttctctcctgggaaagatctatgcaatcaccccaactcacgagcacccggaacagccctgatcaggggcattcacaacaaattctccctggatctccaaagccaaggtctcagagcgggagtgttgagcgccctgccaggtttgtgcactctggccca

SEQ ID NO: 1241471 - DNA, 4001 bp, Homo sapiens
tctcgggctatatttaggggccaccccacactctcaggtagggagtgaaacttgtagctcagtgactgagtattctaaaggacagggtaccaaaagacgggactgtgagagttcacaattgaccatgaccttcaattaaagccccaaagtcggcagctcaaagggggctaaaaatgaccaaagcaacatgaccaatgggggaggtggggaaaacaacataaaagggacatctgtccaaccaacccaatgcctcccttcctcccaagacccttcctcccaactctgaataaactccgcaagttcaacattagtgggtgaggagcagagcacctggacagacctgcacaggaaggagcctgcagcctgcggggtggggtcacttactgggctcctattggctggatgcagtgggattaggggtcagggttctcactccttctgactctggggtctgagaaaacacagcaacgaggtgaatgacatgggagacagacctggggtctttcagggacggaaagcctcagccaagacccagactcccagggtcatcaacctcctcgggtcactaaccctccccagtgtctgtctacccctaagtccagagaacacgtcctctctaggctcgagccggaatcaatataggctacaagggcatcagttcaggctgcgcggaggagagaaggaagtgctgatgtggaggtaagagggtggccctgtcagaacctccggattcgaatcccggctctgccactcccagtgtgaccttgccccagttagttactacatttggcctcaattttctatctgcagggggactaaacgcgggggaataggggatccccaaaatttttgacagctctccagtaagaggagggtagcagagcatggctgtttccctccacaatttaaaaacaaacacaaagattggtgccgtcgcttctctcctctactcagtctccgtgtaggtcccacgagtggagaaagggagaggagagcggtcccacaatcttctcccgttctcccccgacggcccgcgaaggcaagcgccatcgggaagggatgggtaggacagaggagaccggccgggcccagcacccggaacccgtccctacgagtccctacgcagcccgtccgcgtggagactgacacccttgcgtggccggtgccaagcgccccggaccttgcacacaacctcgcgcgcaccccaaacacgccctgcagctcttggagcctcagcctttgtgcgcagcaaccgagcgcccgctccgtgctggccctttcccccgagcctccagctccaggggacgcggatcaatcacaccgcccgccggcccggctggcgccttccaggccctacggcccctcgcctgcccctccccctacctgctgccgccgcggccgcttccaccttcacttgcctttgactcgggcccgccccggctcgggcttcccgcagacccgcccccggcccgccccagcccgcccacgggcgctaggctccccgcagacccgccccagacccccagtaaacacgccccccctttcaccccgcccagactgccgctcaggaaagggttgtgctggggccggggggcgaggggcgggcggctggacgcttccaggctctgctcggctcaccaaaacattccaccaccccctccccgcattggggcggtgtggggagtgcggggatccctcagccctgagagggatccctcggctgccctcagcaccgccccatccacgacctggatctgcaattgcactctggctccttccttcgcccccagactcagtggtgggaaccggtagtggggagacgaacccgggatactgacaccccacgagttcgactccccccgcccgaacacagagaactagattaagaaaggaggaggtgggcgggaccgccgctgaggaggcgggggtctcgccggctggcaggggcaggtgtgctggcgccgaaagggggcacgggggaacgtcgagggcgcaggagttccgactccctcgtgcccagagtcctggtacctctcctctctttgctgcgtcccgacgcctgctctccggctgctccgggagaagttggacaacaaggcggggaggtgggggcggggaatgcggggggccgctataaatagagggcgatcgcgggcaggcggggggtggggagaggatggccaacagggactctggggtcaatgcctcaaggggcgcgggggaggggccggggacccccagaggctctgactcctgggtaaacaggcgcaggggcggagttaaccctgcgggggtggagtaggggcttggggaggacgcagtgtcctgggctgggacccaagagaccctgtggcttcgccgctaacccctcccagtccggcccagaataggagaccagctcaggcccgctgaatcgcaatgcccgggggatggtctcagggtctgccgcgtccctctcggtgcccgagtgggtttgccactgtagactttacacacacacgcacacgcacacacacacacacaccctggaatgagctctccttgtgcccctcggaggaaggctccctggaatgagttagttgattaaaaatgtggcttaagggaattcgaagttgtttaggcaaaaggaaacctgactgaatttctccccacctgccccccttgtagctcccccaatcccaggatcatatccaccccaacccccttcagactggttcctgagttgccatttcgggggctgggcgccaggccagtcaggaacaatggccaatggaacttgagctgccaactgcaacaccagcaccgactgcccccccaagacccccaagtttccctgccccctcctgcctgggaaccaccctcccaccaccaccctcaccacccgcaatacccctcccatccaaggaacatcaatgcccctttcatccccacttggcagggtctactggaaagaaggagaggccaagagggaggaggtgacccacagtaggaaaactggtcgggctaaaacccagccttcaacaaccccaaatctaaggagctccccctacatcccccaatttggagcacccaacttttcttctgttcctttctcccactccctttataactttttccccagaaactggcacagaagctgggcaccctggctcctctcctagtcccctcttccctctggatgccagtttaacactctcctggacaaggaaaagcctgctggaataagggtcacagccaaaggtgcgcaagacaggagagatctcatcagcaccagaggaacctggggagagggagagcctcgagtgagaacttttgcctgcaggcttttctttgtcaaaagtcgtcttacttggagtgggggagggaaggacctgaaggttccagcatctaaattcgtctctgggtcaggatgactcagggggaacctgataaggggcctacgcaggggcgcagggcaggcaggagatgggaaatttccactgacatccattggcttcctagaccttggggtcccacccagcctgctgcaggcagaagtaaggctggttctcccctaagatatggttcttccatgtcagggcagctcccagcccaaccagggtgtaagtgttgcaaggacaatctctgtctaaactctttccctttggccagagcagcttcacactataccttcaagtaagcaacagttttaagtatctgttatgtgcaagccactgtgtagatgaaattcaaagtgtgcatctggtcacaccctctctagacatttgtgatgagaaatgacattttgacatttgtcaagagaaggtacaaacacaggacaagttatatataagatcaatcatttggacagtaagtcctatagcagtagtttcccacccttctcaagtgggagattagagatttccaaccccacataataggtatagtatcccctgatggagaaaatgcaaactatgaattcatcaatactttgaagtaagtttctgtcacaacatctgtaa

SEQ ID NO: 1241472 - DNA, 4001 bp, Homo sapiens
ggggagagagactagggtagtggtgaagcagtggtgtgagttagaataagatcagtacgcttgggaagttagaaggcaagggggatgcttagaggtctggaatttgggcatgggagtcaaacggtctctaataaccttggccgcctcaggcgtctgtcctggcaacagtggcttctcctctgtgatctgcacctcctgcagctccgccatggtggcctggcaggatgaggaaatgagactgggaagttgtctctacatccccacatcgcctcaaacaccaggcttcctctctcagcacaggaagatgcagggaacagagggacccaggggttgaagactactctagaacacacagagggcctttcctgcccccagctccgtttccaggctgatcggtggaagctttggaagaggaatcaggacagcccttctcttgatactcaccatccccactgccaccctcaacaccacacctccagacccctccctcctctgccctggaccaaaataccagggtggggcagaagtgtagctcagatttctcgggctatatttaggggccaccccacactctcaggtagggagtgaaacttgtagctcagtgactgagtattctaaaggacagggtaccaaaagacgggactgtgagagttcacaattgaccatgaccttcaattaaagccccaaagtcggcagctcaaagggggctaaaaatgaccaaagcaacatgaccaatgggggaggtggggaaaacaacataaaagggacatctgtccaaccaacccaatgcctcccttcctcccaagacccttcctcccaactctgaataaactccgcaagttcaacattagtgggtgaggagcagagcacctggacagacctgcacaggaaggagcctgcagcctgcggggtggggtcacttactgggctcctattggctggatgcagtgggattaggggtcagggttctcactccttctgactctggggtctgagaaaacacagcaacgaggtgaatgacatgggagacagacctggggtctttcagggacggaaagcctcagccaagacccagactcccagggtcatcaacctcctcgggtcactaaccctccccagtgtctgtctacccctaagtccagagaacacgtcctctctaggctcgagccggaatcaatataggctacaagggcatcagttcaggctgcgcggaggagagaaggaagtgctgatgtggaggtaagagggtggccctgtcagaacctccggattcgaatcccggctctgccactcccagtgtgaccttgccccagttagttactacatttggcctcaattttctatctgcagggggactaaacgcgggggaataggggatccccaaaatttttgacagctctccagtaagaggagggtagcagagcatggctgtttccctccacaatttaaaaacaaacacaaagattggtgccgtcgcttctctcctctactcagtctccgtgtaggtcccacgagtggagaaagggagaggagagcggtcccacaatcttctcccgttctcccccgacggcccgcgaaggcaagcgccatcgggaagggatgggtaggacagaggagaccggccgggcccagcacccggaacccgtccctacgagtccctacgcagcccgtccgcgtggagactgacacccttgcgtggccggtgccaagcgccccggaccttgcacacaacctcgcgcgcaccccaaacacgccctgcagctcttggagcctcagcctttgtgcgcagcaaccgagcgcccgctccgtgctggccctttcccccgagcctccagctccaggggacgcggatcaatcacaccgcccgccggcccggctggcgccttccaggccctacggcccctcgcctgcccctccccctacctgctgccgccgcggccgcttccaccttcacttgcctttgactcgggcccgccccggctcgggcttcccgcagacccgcccccggcccgccccagcccgcccacgggcgctaggctccccgcagacccgccccagacccccagtaaacacgccccccctttcaccccgcccagactgccgctcaggaaagggttgtgctggggccggggggcgaggggcgggcggctggacgcttccaggctctgctcggctcaccaaaacattccaccaccccctccccgcattggggcggtgtggggagtgcggggatccctcagccctgagagggatccctcggctgccctcagcaccgccccatccacgacctggatctgcaattgcactctggctccttccttcgcccccagactcagtggtgggaaccggtagtggggagacgaacccgggatactgacaccccacgagttcgactccccccgcccgaacacagagaactagattaagaaaggaggaggtgggcgggaccgccgctgaggaggcgggggtctcgccggctggcaggggcaggtgtgctggcgccgaaagggggcacgggggaacgtcgagggcgcaggagttccgactccctcgtgcccagagtcctggtacctctcctctctttgctgcgtcccgacgcctgctctccggctgctccgggagaagttggacaacaaggcggggaggtgggggcggggaatgcggggggccgctataaatagagggcgatcgcgggcaggcggggggtggggagaggatggccaacagggactctggggtcaatgcctcaaggggcgcgggggaggggccggggacccccagaggctctgactcctgggtaaacaggcgcaggggcggagttaaccctgcgggggtggagtaggggcttggggaggacgcagtgtcctgggctgggacccaagagaccctgtggcttcgccgctaacccctcccagtccggcccagaataggagaccagctcaggcccgctgaatcgcaatgcccgggggatggtctcagggtctgccgcgtccctctcggtgcccgagtgggtttgccactgtagactttacacacacacgcacacgcacacacacacacacaccctggaatgagctctccttgtgcccctcggaggaaggctccctggaatgagttagttgattaaaaatgtggcttaagggaattcgaagttgtttaggcaaaaggaaacctgactgaatttctccccacctgccccccttgtagctcccccaatcccaggatcatatccaccccaacccccttcagactggttcctgagttgccatttcgggggctgggcgccaggccagtcaggaacaatggccaatggaacttgagctgccaactgcaacaccagcaccgactgcccccccaagacccccaagtttccctgccccctcctgcctgggaaccaccctcccaccaccaccctcaccacccgcaatacccctcccatccaaggaacatcaatgcccctttcatccccacttggcagggtctactggaaagaaggagaggccaagagggaggaggtgacccacagtaggaaaactggtcgggctaaaacccagccttcaacaaccccaaatctaaggagctccccctacatcccccaatttggagcacccaacttttcttctgttcctttctcccactccctttataactttttccccagaaactggcacagaagctgggcaccctggctcctctcctagtcccctcttccctctggatgccagtttaacactctcctggacaaggaaaagcctgctggaataagggtcacagccaaaggtgcgcaagacaggagagatctcatcagcaccagaggaacctggggagagggagagcctcgagtgagaacttttgcctgcaggcttttctttgtcaaaagtcgtcttacttggagtgggggagggaaggacctgaaggttccagcatctaaattcgtctctgggtcaggatgactcagggggaacctgataaggggcctacgcaggggcgcagggcaggca

SEQ ID NO: 1241473 - DNA, 4001 bp, Homo sapiens
gattgacaaagagagacacggaaaggatgaaggttagtgtagtgacgagacaagggcctgactcccaattatagtgtatggggagagagactagggtagtggtgaagcagtggtgtgagttagaataagatcagtacgcttgggaagttagaaggcaagggggatgcttagaggtctggaatttgggcatgggagtcaaacggtctctaataaccttggccgcctcaggcgtctgtcctggcaacagtggcttctcctctgtgatctgcacctcctgcagctccgccatggtggcctggcaggatgaggaaatgagactgggaagttgtctctacatccccacatcgcctcaaacaccaggcttcctctctcagcacaggaagatgcagggaacagagggacccaggggttgaagactactctagaacacacagagggcctttcctgcccccagctccgtttccaggctgatcggtggaagctttggaagaggaatcaggacagcccttctcttgatactcaccatccccactgccaccctcaacaccacacctccagacccctccctcctctgccctggaccaaaataccagggtggggcagaagtgtagctcagatttctcgggctatatttaggggccaccccacactctcaggtagggagtgaaacttgtagctcagtgactgagtattctaaaggacagggtaccaaaagacgggactgtgagagttcacaattgaccatgaccttcaattaaagccccaaagtcggcagctcaaagggggctaaaaatgaccaaagcaacatgaccaatgggggaggtggggaaaacaacataaaagggacatctgtccaaccaacccaatgcctcccttcctcccaagacccttcctcccaactctgaataaactccgcaagttcaacattagtgggtgaggagcagagcacctggacagacctgcacaggaaggagcctgcagcctgcggggtggggtcacttactgggctcctattggctggatgcagtgggattaggggtcagggttctcactccttctgactctggggtctgagaaaacacagcaacgaggtgaatgacatgggagacagacctggggtctttcagggacggaaagcctcagccaagacccagactcccagggtcatcaacctcctcgggtcactaaccctccccagtgtctgtctacccctaagtccagagaacacgtcctctctaggctcgagccggaatcaatataggctacaagggcatcagttcaggctgcgcggaggagagaaggaagtgctgatgtggaggtaagagggtggccctgtcagaacctccggattcgaatcccggctctgccactcccagtgtgaccttgccccagttagttactacatttggcctcaattttctatctgcagggggactaaacgcgggggaataggggatccccaaaatttttgacagctctccagtaagaggagggtagcagagcatggctgtttccctccacaatttaaaaacaaacacaaagattggtgccgtcgcttctctcctctactcagtctccgtgtaggtcccacgagtggagaaagggagaggagagcggtcccacaatcttctcccgttctcccccgacggcccgcgaaggcaagcgccatcgggaagggatgggtaggacagaggagaccggccgggcccagcacccggaacccgtccctacgagtccctacgcagcccgtccgcgtggagactgacacccttgcgtggccggtgccaagcgccccggaccttgcacacaacctcgcgcgcaccccaaacacgccctgcagctcttggagcctcagcctttgtgcgcagcaaccgagcgcccgctccgtgctggccctttcccccgagcctccagctccaggggacgcggatcaatcacaccgcccgccggcccggctggcgccttccaggccctacggcccctcgcctgcccctccccctacctgctgccgccgcggccgcttccaccttcacttgcctttgactcgggcccgccccggctcgggcttcccgcagacccgcccccggcccgccccagcccgcccacgggcgctaggctccccgcagacccgccccagacccccagtaaacacgccccccctttcaccccgcccagactgccgctcaggaaagggttgtgctggggccggggggcgaggggcgggcggctggacgcttccaggctctgctcggctcaccaaaacattccaccaccccctccccgcattggggcggtgtggggagtgcggggatccctcagccctgagagggatccctcggctgccctcagcaccgccccatccacgacctggatctgcaattgcactctggctccttccttcgcccccagactcagtggtgggaaccggtagtggggagacgaacccgggatactgacaccccacgagttcgactccccccgcccgaacacagagaactagattaagaaaggaggaggtgggcgggaccgccgctgaggaggcgggggtctcgccggctggcaggggcaggtgtgctggcgccgaaagggggcacgggggaacgtcgagggcgcaggagttccgactccctcgtgcccagagtcctggtacctctcctctctttgctgcgtcccgacgcctgctctccggctgctccgggagaagttggacaacaaggcggggaggtgggggcggggaatgcggggggccgctataaatagagggcgatcgcgggcaggcggggggtggggagaggatggccaacagggactctggggtcaatgcctcaaggggcgcgggggaggggccggggacccccagaggctctgactcctgggtaaacaggcgcaggggcggagttaaccctgcgggggtggagtaggggcttggggaggacgcagtgtcctgggctgggacccaagagaccctgtggcttcgccgctaacccctcccagtccggcccagaataggagaccagctcaggcccgctgaatcgcaatgcccgggggatggtctcagggtctgccgcgtccctctcggtgcccgagtgggtttgccactgtagactttacacacacacgcacacgcacacacacacacacaccctggaatgagctctccttgtgcccctcggaggaaggctccctggaatgagttagttgattaaaaatgtggcttaagggaattcgaagttgtttaggcaaaaggaaacctgactgaatttctccccacctgccccccttgtagctcccccaatcccaggatcatatccaccccaacccccttcagactggttcctgagttgccatttcgggggctgggcgccaggccagtcaggaacaatggccaatggaacttgagctgccaactgcaacaccagcaccgactgcccccccaagacccccaagtttccctgccccctcctgcctgggaaccaccctcccaccaccaccctcaccacccgcaatacccctcccatccaaggaacatcaatgcccctttcatccccacttggcagggtctactggaaagaaggagaggccaagagggaggaggtgacccacagtaggaaaactggtcgggctaaaacccagccttcaacaaccccaaatctaaggagctccccctacatcccccaatttggagcacccaacttttcttctgttcctttctcccactccctttataactttttccccagaaactggcacagaagctgggcaccctggctcctctcctagtcccctcttccctctggatgccagtttaacactctcctggacaaggaaaagcctgctggaataagggtcacagccaaaggtgcgcaagacaggagagatctcatcagcaccagaggaacctggggagagggagagcctcgagtgagaacttttgcctgcaggcttttctttgtcaaaagtcgtcttacttggagtgggggagggaaggacctgaaggttcc

SEQ ID NO: 1241474 - DNA, 4001 bp, Homo sapiens
tcaattaaagccccaaagtcggcagctcaaagggggctaaaaatgaccaaagcaacatgaccaatgggggaggtggggaaaacaacataaaagggacatctgtccaaccaacccaatgcctcccttcctcccaagacccttcctcccaactctgaataaactccgcaagttcaacattagtgggtgaggagcagagcacctggacagacctgcacaggaaggagcctgcagcctgcggggtggggtcacttactgggctcctattggctggatgcagtgggattaggggtcagggttctcactccttctgactctggggtctgagaaaacacagcaacgaggtgaatgacatgggagacagacctggggtctttcagggacggaaagcctcagccaagacccagactcccagggtcatcaacctcctcgggtcactaaccctccccagtgtctgtctacccctaagtccagagaacacgtcctctctaggctcgagccggaatcaatataggctacaagggcatcagttcaggctgcgcggaggagagaaggaagtgctgatgtggaggtaagagggtggccctgtcagaacctccggattcgaatcccggctctgccactcccagtgtgaccttgccccagttagttactacatttggcctcaattttctatctgcagggggactaaacgcgggggaataggggatccccaaaatttttgacagctctccagtaagaggagggtagcagagcatggctgtttccctccacaatttaaaaacaaacacaaagattggtgccgtcgcttctctcctctactcagtctccgtgtaggtcccacgagtggagaaagggagaggagagcggtcccacaatcttctcccgttctcccccgacggcccgcgaaggcaagcgccatcgggaagggatgggtaggacagaggagaccggccgggcccagcacccggaacccgtccctacgagtccctacgcagcccgtccgcgtggagactgacacccttgcgtggccggtgccaagcgccccggaccttgcacacaacctcgcgcgcaccccaaacacgccctgcagctcttggagcctcagcctttgtgcgcagcaaccgagcgcccgctccgtgctggccctttcccccgagcctccagctccaggggacgcggatcaatcacaccgcccgccggcccggctggcgccttccaggccctacggcccctcgcctgcccctccccctacctgctgccgccgcggccgcttccaccttcacttgcctttgactcgggcccgccccggctcgggcttcccgcagacccgcccccggcccgccccagcccgcccacgggcgctaggctccccgcagacccgccccagacccccagtaaacacgccccccctttcaccccgcccagactgccgctcaggaaagggttgtgctggggccggggggcgaggggcgggcggctggacgcttccaggctctgctcggctcaccaaaacattccaccaccccctccccgcattggggcggtgtggggagtgcggggatccctcagccctgagagggatccctcggctgccctcagcaccgccccatccacgacctggatctgcaattgcactctggctccttccttcgcccccagactcagtggtgggaaccggtagtggggagacgaacccgggatactgacaccccacgagttcgactccccccgcccgaacacagagaactagattaagaaaggaggaggtgggcgggaccgccgctgaggaggcgggggtctcgccggctggcaggggcaggtgtgctggcgccgaaagggggcacgggggaacgtcgagggcgcaggagttccgactccctcgtgcccagagtcctggtacctctcctctctttgctgcgtcccgacgcctgctctccggctgctccgggagaagttggacaacaaggcggggaggtgggggcggggaatgcggggggccgctataaatagagggcgatcgcgggcaggcggggggtggggagaggatggccaacagggactctggggtcaatgcctcaaggggcgcgggggaggggccggggacccccagaggctctgactcctgggtaaacaggcgcaggggcggagttaaccctgcgggggtggagtaggggcttggggaggacgcagtgtcctgggctgggacccaagagaccctgtggcttcgccgctaacccctcccagtccggcccagaataggagaccagctcaggcccgctgaatcgcaatgcccgggggatggtctcagggtctgccgcgtccctctcggtgcccgagtgggtttgccactgtagactttacacacacacgcacacgcacacacacacacacaccctggaatgagctctccttgtgcccctcggaggaaggctccctggaatgagttagttgattaaaaatgtggcttaagggaattcgaagttgtttaggcaaaaggaaacctgactgaatttctccccacctgccccccttgtagctcccccaatcccaggatcatatccaccccaacccccttcagactggttcctgagttgccatttcgggggctgggcgccaggccagtcaggaacaatggccaatggaacttgagctgccaactgcaacaccagcaccgactgcccccccaagacccccaagtttccctgccccctcctgcctgggaaccaccctcccaccaccaccctcaccacccgcaatacccctcccatccaaggaacatcaatgcccctttcatccccacttggcagggtctactggaaagaaggagaggccaagagggaggaggtgacccacagtaggaaaactggtcgggctaaaacccagccttcaacaaccccaaatctaaggagctccccctacatcccccaatttggagcacccaacttttcttctgttcctttctcccactccctttataactttttccccagaaactggcacagaagctgggcaccctggctcctctcctagtcccctcttccctctggatgccagtttaacactctcctggacaaggaaaagcctgctggaataagggtcacagccaaaggtgcgcaagacaggagagatctcatcagcaccagaggaacctggggagagggagagcctcgagtgagaacttttgcctgcaggcttttctttgtcaaaagtcgtcttacttggagtgggggagggaaggacctgaaggttccagcatctaaattcgtctctgggtcaggatgactcagggggaacctgataaggggcctacgcaggggcgcagggcaggcaggagatgggaaatttccactgacatccattggcttcctagaccttggggtcccacccagcctgctgcaggcagaagtaaggctggttctcccctaagatatggttcttccatgtcagggcagctcccagcccaaccagggtgtaagtgttgcaaggacaatctctgtctaaactctttccctttggccagagcagcttcacactataccttcaagtaagcaacagttttaagtatctgttatgtgcaagccactgtgtagatgaaattcaaagtgtgcatctggtcacaccctctctagacatttgtgatgagaaatgacattttgacatttgtcaagagaaggtacaaacacaggacaagttatatataagatcaatcatttggacagtaagtcctatagcagtagtttcccacccttctcaagtgggagattagagatttccaaccccacataataggtatagtatcccctgatggagaaaatgcaaactatgaattcatcaatactttgaagtaagtttctgtcacaacatctgtaaatgcggtaatacctacacatgcaaggcatattatttactcagttcacactcactctttatacatacagattctagggccctttgcaagatttcagaaatcctcacgccaggaggctgtggcccacagtcta

SEQ ID NO: 1241475 - DNA, 4001 bp, Homo sapiens
ggagtgcagtggagttataatagtccactgcagtcttgaactcctgagctcaagtgatcttcccacctcaatcttctgagaagctggagctacgggtgctaatttaaaaaaattctttaaacatttttttttgtagagacaagatcttgctatgttgcccaggctggtctcaaacttgtggccccaagtttcacatatgggggcattttggatttccaacattctgatcagggatactgaacctgtaatagacatcatgtggaaaataaattgcacaattcaataaaaacatagttggattgccaattttctgtaaaaattcgtgcatacagatgaattcaaaatacacctgtgtgcgtttggactaaactaataaatcatgtacaatgactaagaagacatatgacaacatcctagaaagacaatacattattgccaacaaaagtgcttagcactaagctgtgctaggactatgtagactgaatttctgcctctcctcttacactggcatgcttatacaattcatacttttttctttcctttttttttttttattttgagacgaagtttcgctcttgttgcctaggccggagtgcaatggcgcaatcttggctcacagcaacctctgcctctcggattcaagggattctcctacctcagcctcccaagtagctgggattacaggtatgcgccaccatgcccagctaattttgtatttttggtagagacgaggtttctccatgttggtcaggctggtcttgaattcccaacctcaggtggtccgcccgcctaggcctcccaaagtgctgggattacaggcgtgagccaccgcgcccggccgttcaagtgattttcttgcctcagccttccgagtagctgggactataggcaggtgccaccacgcccggctaatttttgtatttttaagtagagatggggtttcactgttggccgggctggtctcaaactcctgacctcttgatccggccacctcggccttccaaagtgttgggattacaggcgtgagccactaagcctggccatacttttgtcttttaaaaggcaaggtgggccaggtgcagtggctcacgcctgtaatcccagcactttgggatgctgaggcgggtggatcacgagatcaggagttcgagaccagcctggccaacatagtgaaaccctcgtctctactaaatatacaaaaaattagccgggtgtggtggcgggcgcctgtaatcccagctacttgggctgctgagacgggagaatcgcttgaacccgggaggcggaggttggagtgagccgagattgcaccattgcactccagcctgggtgacaagagtgaatctctgtctcaaaaataaaaaagcaaagtaaaagggtaagcacatcatttaggcgcaacggtgtcggctcaagaggatttgcgatttggaagagagcgaggttagcgagaagacagaaggctggaacttggacgaatgtaagctgctcgcggaggggaggcagcgtcttccctgcttcaggccaggcgtgggatccgggccggtcttctctccagtccggttagcgggcggtcactgggtcacatctctacggacgttttcctgttatgacagcctcagaaaaccctttccaaaagctccggcccggaaatcccatcctccacccgaagaaaaccccattttcctttcccgtcaccttcgttcggaagccccggggaagcccagaccacccctccacacatgcacagcaccgagggcttgcctagaaccctccccgccaccgtcgccgtgatcctcgtcgcggcggccccccgggctccccaaacccacctgcagcctcagcgcctacagcgaccccgagaccaagggcaacagggaactcaacccgcgccagtggaagctgcgacctcgggacctgccattcgccgcgcccgcacggagcagaggggtgacgccagcaaatcatactactttttcctcctcagggttgactcctctcattttttttttttttagcttccaaacattaccaataatttctgaataaaatttcgctccagacagacgaggcgtgcaggcgtgaccgccgtcgccttccgacagcaccgtgcccaccccccggagatggtctcgccctggttcctcctcgtctccgccgctagtctccagctccaaaatggcggctgccactgtggggcttctgccggccggtagtccctggcgctgctgacccagcatcggcttttctacgtcttgaacctggattcgcctaggggttgggaagggctgtggacggcgttgggggaggcctgacgaggcaagtgagggcgggagaaaggagcgagcctcgggctggggaaggcggcgtcattggccctccgggagcacggggccccgactccgacccggtctcccccgaggactcgcccccgccgcttcggctgcgactgtcccggtcgttcccggcagaagtggtcagcgagggaaagagaagtgacttctccatgggtttcaagctcccagctgttttgcggcagcccgtacggttccctcccgggatcttcttccctcctttctgcttccctctgcttcccctttcatctcttggcgctggaagagttaaaccgacgccagctttagctccttggcttcgtggctacggcgttcttagcctcccctgctcgggctcttcccgtcgttttgggttgagagaccacgaggttgctaagctctggacaccgcttaggcgtccttttagttcttcgactccagagacctttcggttgtttgtaccacactgtactaaaagggtcttgggccttcgcgccctcccgccatcgccctccagcgcttccactatcactgcgaagttctaattcttttttgacttcgtactattttacgtgctctttagaaaagaagaggtcagattgaaccccggcaagtctggcttcctgtgaccaggcgaacctgagctatcatttatacccatcccctaatttttaattttacaacccctttaacccctttcttttttctttctttttttttttttttaataaagacggggtttcactatgttgcccaggccggtgtcgaactcctgggctcaagagatcctcccattttggcctgtgctgggattccaggcgtgagccaccatgcccggccttgcaaccccagtatgaaactggggctctccctcaactgaccgagaagagccttccccactcagtgagctccagggctaacccaaactcctctgttttcccttggattttgcttagttcaccttagttgtcatcaacatgcacggtaattattttttatttttgagaaggaatctcgctctgtcgcccaggctggagtgcagtggcacgattctcggctcactgcaacctctgcctcccgggttcaagtgattctcctgcctcagactcccgagtagctgggactacaggcgcgcaccaccacgcccacctatttttgtagctttagtagagacagggtttcaccttgttggccaggattatccgcctgcctcggcctcccaaagttctgggattacaggcgtgagccaccgcgcctggccgatttattatttgagaccgggtctcgctctgtccacccaggctggagtgcagtggtgccatctcagctcactgcaacttccgcctcctgggctcaagtaatcctcccacctcagcctcccaagtagctggggtcaccagcgcagccaccgcgcccggctacttttttgtgtttttagtagagaaggggttttgtcatattgcccaggctggtctggaactcctgagctcaagtgatctgccctcctcggcctcccaaagtgttgagattaaaggcgcaagccactgcgcccggcaacatgcacgattattattaagagggcaagtaactgtgagatatttgcgatgaagtagtatctgtcaaaaccagtgctctgaaggaatttatgatatgatgaggcttcattcc

SEQ ID NO: 1241476 - DNA, 4001 bp, Homo sapiens
aaaaatacaaaaaaattagctgggcgtggtggcaggcgcctgtagtcccagctactcgggaggctgaggcaggagaatggcatgaacccgggaggcgaagcttgcagtgagccgagatggcgccactgcactccagcctgggcgacagagcgagactctgtctcaaaaaaaaaaaaaaaaaaaatcataaaacaatatccttacctagcactatattatttcctattttctccccctctctctttcttttttttttttgcagggggagatggagtttcactcttgtcgcccaggctggagtgcaatggcgccatctcagctcactgcaatctccgcctcccaggttcaagggattctcctgccttagcctccgagtagctgggattataggcgcccaccaccacgcccggctagtttttgtattgttagtagaggcggggtttcaccatgttggccaggctggtcttgaactcctcaccttaggtgatccacccacctcggcctcccaaagtgctgggattacaggcgtgagccactgggcccggccttttttttcaggcagggtctggagtgcagtggtgccatcactgctcaccgcggcttcgacatcccaggatcaatcaatcctcccatctcggcctcccgaatagctgggcctacaggcatgcgcccagacccttggctaattttttgaatttattgtacaggcagggtttcgccatgttgcccaggatggtctccaactcctgggctcaagcgatcggcctgcctcggccttccaaagtgctgggattacaggcgtgagccaccgcgcccagcctattttctctttttaatggcgccagtgacccattcacctattaaattgatgttacgactcttatataggccgctactcaacgttaaaaaaaatcatctttaacatactattttaatactagacctcaaatcttagctaagaagtagtttggaaggactggggaagagaaggttaagaatgactattatgtacggtaaatatgctaagaagctgatgaaataacgatagatttacttagctacaaaaaggccaaactagcattagacttcacttgtcagcagttttgtttttttgaggggggcgtgggggggggggtctctgtctgtctgaaggcacaaaagaggaaacagcagataggactaacgagggctggaaattggtgaagaaccaccacgggagttgagagatgcagatgaaggaaaccatggctagtagcaagaactagggcagcggtaactaacctgcctcagccaaggaagtgaggctggtccaggatgccaggctcagaaaggcaggtactgactgaacacactccccgctttggttcctgtaggacgggtgagataccacaccttggcaaccaccagtaaaggctcatagtctagcccttgggaggccccgattttagggctgtgctcggaggcgacctacgttagggactgggagaagcaggtaccctgggaatgaagaatggagagcagcgcttactccaagaatctgagagacgggggagtcaagccgctgctaggccttctctatgactgcgggggttcgaatacagtgagacccgacaaaagcgaccccattctgggtgatagcacagtcctggcaaaaaagcaggcatggcaaaataccccagggtcgtcaggtgggacctgggccccgctctcaaagcccttctgggtccccctatttcccaccacccctcgcgcggagccctgaggcagtcagcgtcctccaggctagggaaaggcgtggttttccttccccacgtctcccgtaaggcactgctgccagcccagtactactgcgtcttggcaaggctggaggtgctcccaccttcactttaattagcatcttctttccagtttggggctgcacacggataaattgctgctcctaccgctccggtcgccgctgccgccctccagcactcttgcctgcaagggccacttctacttccgggtcactgtctggctccacccccccccccccccccactgggttccggaaaggctcagggttgctcccgcgtttcggttcagtgacgtcgtaaattggaatgaggcatccagtttagcaacagcagagatgacgactctgcgattctgagagtccctggcgagcccgggctagcgaaaagtgggggcagaacgaactacatctcccatcgtgccaggaggcggtcccgcccgtttccccctgggagttgtagtctaaccccctcggatccaacagcaacctcagtgcgtgaactctgttatccagaaggcctcgccctgccgccgccgaagctggaattcgtcggctagtagttctcgccggcaactagaggaacctgttggcgtggcccagaaggcttagcgggattgcacgaggttagttgctaagcaaggtggtctttggtcaactgccgcctggaccaaggcaacaggaagtgagtacctctattccggaaactagttatgaaccctccccgccccccgtcgccaacattccttcgttcccctaaatcagcctcttgccccattgctctttgcaggggtagaagaaggaagtgtagcggggtaaggaatgcaccgtcagggtctctcacaaccctttcccagctctcctccccaacaaacagtacctgggatggagccctagggtaatcgcagccacgggatgggtcgaggtgacaggcttcagggaccacacttcggcctttgcccgaccttccacaacttaagcgaagagaggccaccagccgtaacagggcgttaaagcccaggggaagattggtccttatgacttcctgccttccagccctcagattcatcgctaccccgaggctaagcgccatgcctcatattgacaacgatgtgaaactggacttcaaggatgtccttttgaggcccaaacgcagtacccttaagtctcgaagtgaggtgagcaagcttctctacttgctgtttcttgaccccacgctcccggtgggccacaaccaagaaagatgcctgtccttgtcctaatatggtacgttttttggattaatgaaatggtcaatttcctgttcatatctgcaggtggatctcacaagatccttttcatttcggaactcaaagcagacatactctggggttcccatcattgctgccaatatggatactgtgggcacctttgagatggccaaggttctctgtaaggtagggctttcctcatgccccatccctattggtgtccagttagcccagctgactgcagaggtgtttgcatccccacccccatgcccagtcagttctctggcagttagcagtcaggatgctctgatttacggttttttccactactgaagccctttatctgataagttcaaaaggccatctgaattagtgagattcaaagctaagttctgctccgatatttctgatatatgaacagaattttcccttttgtcctgtttagcagtttgtacaccttgccaacttttcccaccacccaggtcaccccctcacagtcacatgcatcccttcagttatgcgattgtccacattaagcattcactgttttagtccagaaactacagtttaagcattcaaaaatcctaactagaagatcctaggagaagcagcttattaattttctttaataagaacaattcattaataaaagaatacttctgccattctttttttaatcttcctcttctttaagtcctaggttcctgggagtttctgggatgtgccccaaatgggatgtgtttttcttatatacaagttgttcactttgaaatggaagatgctgctcctgtcagtactattacctgcctctatacttgttgctgagaaggtagagagttatctgggcactttgagaacatatgcactctgctggttgatccatgtagccctggttgatgaattctgctattgtttgtggctccattagtcttaaggacttcatatcctttttctatttt

SEQ ID NO: 1241477 - DNA, 4001 bp, Homo sapiens; identical to SEQ ID NO: 1241476

SEQ ID NO: 1241478 - DNA, 4001 bp, Homo sapiens
attctttgctgaccctgcttcctagcccaggagcatctccacctatgtaaccctccccatccttttgaatgcctctgccaagcctttacagtgtttttgaaaagactctgatgaagcttttactgtaaccatgtctttaatttttagaccccatacactgaaatgatatttgttcattcttttcatatctctacatatgcaacttaatgctatttgtttactaacaatggtcaacttattttcctactgaaatataagcttctagagaaaaagagtgcttctgaacttttgtaaattcacagatctaataaatatttggtgatatggacaacgctatgcaatttttgggaagtgtaatcaaatttaactcaaaaccaacccagtaatcaagttcaacaggataataataaaaaggcaatgggcaagatgtgagactttagttctagtccaagatttacttgtaacttaagtgagcaagtcacttaagtatactgttttagtttctctaactaaaatatagaaataacaatccttatctcctctttctcattttgagtgcaaaaaagaaaacagactactaagaataactaactctaacatcatacattaacgtggcatcaggataaaaaagaacacttaaaaatattctcttgcaaccacttctctccttctccatctttcagccttaaaagtatgctggcttggaacacacaccagaactgcagatggatttccgacggatgaatcaccttcagcaaccccagcaagttctcattaaatgtttaccctaaagtaagattttatgatcaaatctagtgtatcgttagtttttggaagtagaataatcactgcagggttttacactagtatatattaacttgggattccgtgatccatggatctctccaaaggatgtgcatatgtgcaaatgtgttgatggagggggcaagattactttgcttaggttatcaaaggggtccttgtgccccccaaattaagaactaatggcttagaatataccaacaaagtatttcccatgcataaaccctgcaagataaacactgataaagaaccaacacacaaagatcttcccaatgagcttcaagaaaagcttccaactgagtgatcactgctgaacttaaagataatgacaaaaataacggagttgccacgggtgtggggattttgaagctatgcccctcctcctcaccccgaccttggagaactatatatacagcatgagaggaaggaagttttggcaatacctcacattcgtataccactttaatttacagaacagagccttcgtttgattctcaagataatcttaaaaaaaaaagaaaaagatgatttcaaggtattatcagtaagcccattttacagatggggaaactaaagctcaagagacggttaggtgacttaggacaatcaaaaatgactagtcaaaccaatgatctagccaatttctagtgccggtgagtgggaagagtggtgaagaccctaagacatataccccgtgggcgcctaaagcactaagctcacgacgctgggaaagcggggccgagaaggagggactcggggcgacccgacagcgccagacagggcggccggcgccgagggccgctacctcggtgcggcggtacagcgtggcttccccgaaggcgccgcggcccaggacgcggatggggatgtagtgcagttcctcctgctccgccgcgccgccgccggctcgcggcccctgactggcgctaggccccggactcgagtccccgcaacccccggactcgctcccaaagtccgagttgatggaatcgcagtgtcgctcgtactcgcccagcaccgacatggcggcggccgcgggccttggggaccagcctgcgtatgcccggaggccctggccgcgctgcgtcccgctcgcttcagatgccggcccgcggatccgtcagcccagcaaccccgcgaagctcgatggtggctcctgccccccgacccggaaacagttctctgtgtttccggcctggctgagtttcctccgcctttgcttaccctcttggctagtctagcggccaaggcttcccgctttcggggaaggcctgcaaagtgaggcctcgggctagggttggcgggcgcgtggtgggaaccgcgtggaaccgaagggctcccacgggaacaagggcatcactgacggtacggcctctcgggtctattgacccttctctgcctccccggtccggactcatacaacttggaggcccagaggtcgtccagtctcatcttgacgtcaggtctgtgacaagagggtgattggggaagcattcccagtgtacaccttcttccccattccaacgttggacagcattcttttttagagagatagtatagtaaagataatatggccgggcaaggtggctcacgcctgtaatctcagcatgttaggaagccgaggcgggcggatcacctgaggtcaggcgtttgagaccagcctgaccaactggtgaaaccccgtctctataaaatacaaaaattagccaggcgtggtggcaggcacctgtaatcccagctactccagaggctgaggcaggtgaatcacttgaacccggaaggaggaggttgcagcgagccgagatcgcgcactacactccagcctggataacagagcgagactttgtctcaaaaaaaaaaaaaataataataatatagacagcctaaatgtctgcctccggtcatctcggtccctgggccgagttctttctcccagggccatcctaagtccctccctcttctacacaactccaaaaatattttaagtcaactctcctgacactttccttctcccccgtctctttttccagattcaatttattctatgtgtttttccagatatttgaccatatgatatcatgaaacattctttgagcacttggtgccacacactgtttgggaacaggaaatctgcaataatgttctccctaccgtcaagtaggaaaacagcaatacggtgaacaataggtgttccatcagttatgtgaccttgggcaattatgtgaccttgggcaacttctcatctccaagcttgttttgttgtgagaatgtggtctacatcacagacataacagctaacatttattgagtgttatgttctgggtactatgctaaaggttttttacgtattatctcacattattatgtattatcctatgtattatgtattatgtattatcctaacattcccattttacagaaacagaggtacctaagtaacctgcttaatgtgacagacctagtaagagggagctgggaagttgaacccagcaatctgaaaaagcaggatgtgatggggctaagagaaagccatgtgcctagccgggcgtggtggctcacacttgtaatcccagcactttgggagggccgatcacttgaagcctggagttcgagttcagcctggccaacatggtgaaaccccgtgtccactaaaaatacaaaaattagccaggcgtgcacacacctgtaatcccagctacttgggacgctgaggcacaagaattgcttgaactggggaggcggaggttgcggtgagccaagatcatgccactgcactcgagcctgggcaacagagtgagaacctgtctcaaatacataaaaatacattgtgtcatatcgatttgtgaaaagttcctactttaagagagcttacatgtaacagaaaaccaccaggcaattaaaacagtttctataagggctattaaagtgcaagattctagagaggcatttaggagtggcatctgtccaagccaaacttgctgtgtgagtgcaggaatatacaaaatgttaagtctaaacaaagtagagagatcatttcaggtagaggccattccatctacatcctcctattaattagaaggcactttgaggataggtattgcctcttgtttatctagataaactccagagtttagtttggcttaaatctgttaattctattaacttaattctgttattct

SEQ ID NO: 1241479 - DNA, 4001 bp, Homo sapiens
cacgcctgtaatcccagctactgaggaggctgaggcaagagaatcacttgaacctgggaggcagaggttgcagtgagccaagactgtgccactgcactccagcctgggtgacagagcgagactccttctcaaaaacgaacaaaaaaacaaacaaacaaaaacaaaaaaattaacgttggtctaatttagaattgttttgatgcagagaagtgaattacagttaaggaactgtaaggctgaatgtgataaaagcttgaactctaatagtgactgtggaaacagaagatctggagcagaacaggatgtgaaaggtaatggggagaaatcaattaataaatattcactttattcaacccattatctgtcaaccactccctttaccttcattttatctgcactttattcgtaacagtgaaggaaaccccaattaaaaacttaattgttagtgagcaatctcttaaaatttagcttcaagcgtaacaagtttaccttcatggcaaaactagacggcatcatattcttaggccactcaaattctgttgtatgaattcgtatgccagattcaagtaaaagtgtagctttaaagtccggtctgtagaagaaaaaagtcgaatttttctttagggtatatgccaaagctaattgctaaacaggcttaaaatgtaggttaaaaaaaatcagtaatctcatacttaattgtcaaagagaaaataagcctataaaatgttcttacttttgaagacgaataaggtatgtcttattatccacatcataaacattgtttactctcattcctagcaagctgcaaagataaaggaaacatgtaacatgttacactattgtctgaaacataaaactacacataatttaataaaagcttcgaaagagcggatctcagtctctaaggatatggagtcagccgaggagcagagtctgaaagccatttggagattcagttcaaaacttaagagtaacgatttaaaaacagaagtggtctatcagctctaggaacaacacactatagcttgcgtcttccaaatgacccaattttgggggagaaatacagtaaaatataatccaattaatttattacaagggagaaaaaaaaaagataaaagagggccccgaaaatatgacaaagctcacagggctgaataatagaatccagactagaatccagatctcagtccaaatctgctcaatccagctaaaaccgcgatgctctctctctctctggggtgaggggagggaggtgttcaagaaaccaagcccccagtctggaaacctctgaagcaaacgaccactctggcgtctcgtgttttaacaaacgtttcctgcccaacccggacaacccaggccaacaatgcaagagcttcgcgctagcggggcaagccagagagctgggaggacgcgggggatggggcacgaggtgcctgggacccccaggggtatcctaagggtcacgggaaagacaccacacgcctgcccactcaggcctaggcaggtccatagacgcactaggaaataaggaaacatatcaagctggtctgtttgcgccatgggactccggcctctgcctcctgcactccccacacgagcctcgtcacttagggtactgtacctagcattcagctccgcgagtacggcgcggaggtcaatggtgctaaagcggctcttcatggcgaggcccgagggtcactaccgcaagttcctctactgcccggccggactcgacgccacttctcctccgcgcaggcgcacttggcggagctctacggccgcgcagaagacccaatattcctcgaggcgaacgtatttgtgtcgcttttctgaagatttcgattgtcaagttgcagctgactctcttcattgtaccaaaattcaaattcgaataaagattcaaactgttctcttgaaactgcattccttcctggaacccttacggaccagtctggttaccgtgccccattgtgtcttgggctcaagtcagccttcatagtgacccctgctggtcgaaacaattttcgagatgattatcaggagtatttccccacaggggggccgtagggctcagtgtagaagagcaaggacccctttctgcgcgcttactttgacataagattttgaaatgtaacgaaacggaactgcttcggtccttctaagattatcctcaacgatcgaggcgaactctcaaaacggagttcctattttgatgggtcctgctctcggaaggagcattctgcaattgattacaggattctcatcgaacctcggtcttggtacccctgagactcaccgcagtacctggtgtacaatcggtgctccataaacacttggcagcatgaatgtgcaagtgtttagctagataatggtgaaataagataaaaataaaaacaagaagattcccaatgggggtggggtgggaggggggattcacagtgtagtgaggaaaatagtcctgtaagaatgtaaattctgcatttcttttgtcttaggatagatgcatgggaagaaaggctactttataaggtgagaactcaaaagaggcagggtctcactatgttgcccaggctggagtgcagtggctattcacaggcgcaatcccactactgatcagcacgggagttttgacctgctccgtttccgacctgggccggttcacccctccttaggcaacctggtggtcccccgctcccgggaggtcaccatattgatgccgaactcagtgcggacacccgatcggcatagcgcactacagcccagaactcctgaactcaagggatcctccagcctcagcctcccgagtagctgggactacaggcacgcgccaccgcgcccggcgctcggcgtcgctgcaaaagagctgctagaggcttgcaggctacacatggtagcaaccagaattcctaccaccagaaggcgactctaaacagaaagggcgccgctgctatttcagaactggtaccagtagatgcaaaaatggctatagcacatactgcacagcattactgtcatacggtacagtaaaccatacagaatggcccaaaatatgaaagcattggggagaaggtggagaacagggaacttttgtatgctgttgatgggaatgtaaattagtagagccattgtgcaaaacagtataaaggctcctcacaaaattaagaatagaattaccatgtgatctagcaacaacatcactatcctgaagatatatgttcatgttcattgcagcattattcacaatagccaagatatagggataatctacttttcatcaatggatgaacggataatgagtgcaaatatatatgtacacacacacacacacacacatacatacatacagtggaatattattcagctttcaaaaaagaaataaatcttgctgtttgcaactggcatggatttaacaacatggatgaacctggaggacattatgctaagtgaaataagccagacataaaaagacaaatactgcatgatctcacttatacgtggaatctagaagtttctcatagaaacagacagcagaaatgtggtttccaggacttgggatgtaggggaaatgggaagatactggtcaaaatgcacaaactttcggttgtaagtagagtaagttatggagacttaatgtacaacatgctgattatagttcatagtaatgtattgtatgcttgaaatttgcatgggaacagaaaaccaaataccgtatgttctcacttataaatgggagctgaatgatgagaacacatggacccatggaggggaacagcacacactggcgcttatcagagggtggagaatgggaggagggagagggtcagcaaaaataactaatgggtactaggtttaatacctgggtgatgaaataacctgtaaaacaaaccccatgacacaaatttacctatataacaaacctgcacatataccccatgaacttaaaataaaagttaaattaaaataaaaaacagaaatttgctaagaaagtggatatcaaatac

SEQ ID NO: 1241480 - DNA, 4001 bp, Homo sapiens
ccccggctcggtccccgccatctgcctctcattgcggccagacgggggagggggaggggcgccccagcgaggcctgacagcgcccccagccccgggcgtccagtcggccgggccagagctcggtccgccaggggccagctccagcgccaaacctccccttcccctggcggcgcctggtgctgttggggccgtagttcccgcccgccccccagttcagtgacaggcggcccagccgggaggcggcgcacagccaacagcacccccacccccaccccagtcacgacctaaaaaggagaaagtggtgcccgggcccccagcctcacttccgcaggccaacgagtccccccgactcccttcgacctctgactccctcaccccccaccctaggctcgctgccttaaattccccagactcaggatccccggccctcctctcactgaccccaagaccccttcccagcccagcactaaccttcccccaatccccccgcgcccagcgggggggcctccttttcctccccgaacaccagcttaaattccagctcctcatcctcgcagctggccgcccccatggatccggcaggagcccccaggtcccggcctgggtgggaggggggagttcaggaggctgctgtatcttcacccgggtggctccctccctccctttctctgagaagccccctcctccgtcgctgccgcctccctccagaagccccctcgttattatagaaacttttccaaacttttttcccccaaacttcttcaaagcggtcccccccccagcctgtccctgattggctgccggggatgctccagcccctcctccagggatgagatgggaaaaccacgcgcccctcgtcctcccccaccctccctccctctgtcctctcttcagtccctccccctcaaaaaaaaaaaaactgaattggaaaacggtccttcaagagtgatactaatgttgcctattggtccgccgttgtgacaatcatttcccgcagagagcccagcccccacctcccctagtctcagttcaaggttctgggtccgagagccttaaaggggccacatcctgggcccccagggtagagagcccacggaagacccttttttaaattctgaagactgtgtagatagcacctagcaaggcagaaccacttctcctcccctttccctccaagcctgaggccaggagggtcctgggggcagagtggcaccgagttgctcggaagaggaaaaggctattcttccgcctcccttgcctggggctactctgcccgggccttctggaagtctttgcgctgccgaatcagcgcctccatcagccattcctccaggacccccaaagatgaagaacgcttagccagcctggatgcctctgggagcagtccgagccaaagaggctttgagaactgtccctaggcccacagcccttgatgggcgtagatccaggccaggctttgccgctgcccttgtcccagccacccagaggggccgtgaattagcctccacgggaagttggcagcctcctccctagaactgtagtctggaatgaatctctgacccgatagcatcccactccggctcttctaaaaatccttgccaggtttactaggggcctgaaacctccggaccctgtgggttcccctcctcttccccctccttggcccccccgcccccaacaggctggacacctgtcacctgggctggaggaggaaggaagacctggactggagtttccgggaaagtcaggcttggagaggcctgggttgtgtgagagggagttagatgggagattcgtgactcggtgggagatactggcgaggctggcgggtaggagagatgggagggtggttatcattttctcccacacacacacagtttcaacctctcttagaggccgcgtctccagtctctaaatccctccggttcagggccgcacccccaacgccgccccatcccagcaactaaacggttaagcgacggccccaggtcagacgtttacaaacactcagaagccgggcggggaccgcgcccgttactctaatgagaaacaggctctacgggactggggaaagaagggagggctggcccgacgggccggagctccgcagcggccgaggcggcttccctccctcccctcggtcctccctcgggcccgcccaggggaccacccccccagtccccggggaccccagtgacgtgcggagctgccccggctccgagcccagggccgcaacacaggaggggcggggagaagagcccaggccggcggggagagaagaatgttccgaggccgagcggggaagcggcctggtttgattttcttctttcttttttttttttttcttttttttttcttttttttcctttggttggtctcctcaggttacatttcccttccagcttcatctcggaaataaaggaaggagaaacccacggggagggaggacgaggaacacctcgacccatcaaccagcctgtacctaagagggcaagggaggtgggaagcggaggcgagaaaagcagggatagagaccccgaggcccagcccctgttcccccagactctgcccctccccggccccactccccgcaggcacagcacatgcagacgcacacattcttttcaaatgtcatatttcctttgatcctgggcagcgtttctccatgtgtctggctcagctcctgcccagccaaccgccttcccctctcacccctgtttgttttcctggagaaccctcctcctcctagcatctggaaggccctgagggctggcgtcggccctcattcccctgatgactctggcctctcctcccatgactcaatttccccttcatgggtgttggggggtagggaagggaggagcagaggggagagtggttgagattgttcagagtgccaagcttctctgaggcggggggcgggggggcatccccttgactctgaaaaccctccaatctgtctcggctgcggcagagagatggaacttatgacttctgaaatgctcggcctggcgttggagcctgggcaacagcgggtagttgcggatttaagttgccctacacttctgccccctggcgaccagaaagacccagcccccccgtccttggttcgcggtttctctagccgcctggcctcggtctcagctccgctgcctcctagcgcacataccggagcacaacccggctttcttaccttggttggtggcttctgctctgcactttaacaagcatcattcaacttccttggaggtggatgttatttatttctttttttaattacacaagatgcagtcttctcttttccccagaggtctaaataaagctaattaatatgcattcttcttgtaaacaattcaagctatacaaaaatatgtagtaaaccttgatggtccaccattttgtatgcctttattaacatgtacgcacacacacatgctctttttatgcgcgtgacaagcatttttcttgcttttttttttcctcacttaacaaatggttggaagatcttctcccatagtaccatctgaaaatgatgatgaaaatgcccaccttttcagtagataaagtgacttttacaaatcaggttagcaatagagttgatctggaacccaggcctcctgggtccttgtcaagtttgctaattcattccatcacattttacacaggaatctgtcccaggcttggctcctccagtaagtagagcctgagacaagaacaggatgtaggtagtttatagtgaaaagcaatcagaaggaacagaaagagaagaatggaaaaagtgaaactggaaagaagaaaagccagtccaagggtgtgctacagaacaggtcaccactctgagcaactgggatattatcctactgagaccatctgtatagccacagagaatgtaattgaagagaagaggccagccttgtctctactaaaaataaattttaaaaggccgggtgcagtggctcacccctgtaatcccagcactttgggaggccaaagcaggcagg

SEQ ID NO: 1241481 - DNA, 4001 bp, Homo sapiens
gggaggccgcctcatttagctcagactccacctcgtcgcaggctgcatacagggctgcctcgtcagaggcatcggagaagaagctccacgaggacaggctgctgctgccagggcttgggctgaagaaggcccccccaccctggccccctgcttctctgtagcccccaaagccttctggtggggggtaatctctaggagagccgtccccccaggcatcagggttgtcctccagcgctgctggcggctccggcgtgggagagatggaggtgatgcggatgctgggacactcgagaacacggccacccccagcacccccagcaccccctcctggtcctcccagcctcaccgacctggcgggctggctctcccaggtgccaggtgagggggctggtcgcggcggtggcgaatgcatgccaggccgagggggtggaggtcggggaataccgataggtgcagcgccatagggagggggctctcccaaggccagacggcagcatggcggggcatcctctgagtccagttctgtcaaaatgggaagaggagcagagggagagggggaaagagagaagcaggtgagatggctatgttccttgagtggccaggccgcaagtccttctatgctccctgcccctcagcaaagagaccttctgagccacaagacaaaagcagagttggacctgggaagatggaggagattgaagcaggcatgccaggcctttgcccactggcccctggatcctaggaccgagggtacccgatccagtgggtcttaaggtgagagaggtgggtccagaggggctggagctggggctgggcctggaggcgtgtttcttgaggcactgggctggactgggggcgactcacacatgaacccaattagcagcggttcccaaacccccaaacggcgctggcaggagccccagttgccatcgcaaccgtggccagaggggaggggggcgtcagggctgtggtgacgaggggaggtggctcctccctctctcctcgccatctaggggcggaggtgcagccgagggggtgatgcgtgctgggcccagccgggggaaggggggcagcgggcagcgcggattcgtgcgagcggcggccgccgcccccggctcggtccccgccatctgcctctcattgcggccagacgggggagggggaggggcgccccagcgaggcctgacagcgcccccagccccgggcgtccagtcggccgggccagagctcggtccgccaggggccagctccagcgccaaacctccccttcccctggcggcgcctggtgctgttggggccgtagttcccgcccgccccccagttcagtgacaggcggcccagccgggaggcggcgcacagccaacagcacccccacccccaccccagtcacgacctaaaaaggagaaagtggtgcccgggcccccagcctcacttccgcaggccaacgagtccccccgactcccttcgacctctgactccctcaccccccaccctaggctcgctgccttaaattccccagactcaggatccccggccctcctctcactgaccccaagaccccttcccagcccagcactaaccttcccccaatccccccgcgcccagcgggggggcctccttttcctccccgaacaccagcttaaattccagctcctcatcctcgcagctggccgcccccatggatccggcaggagcccccaggtcccggcctgggtgggaggggggagttcaggaggctgctgtatcttcacccgggtggctccctccctccctttctctgagaagccccctcctccgtcgctgccgcctccctccagaagccccctcgttattatagaaacttttccaaacttttttcccccaaacttcttcaaagcggtcccccccccagcctgtccctgattggctgccggggatgctccagcccctcctccagggatgagatgggaaaaccacgcgcccctcgtcctcccccaccctccctccctctgtcctctcttcagtccctccccctcaaaaaaaaaaaaactgaattggaaaacggtccttcaagagtgatactaatgttgcctattggtccgccgttgtgacaatcatttcccgcagagagcccagcccccacctcccctagtctcagttcaaggttctgggtccgagagccttaaaggggccacatcctgggcccccagggtagagagcccacggaagacccttttttaaattctgaagactgtgtagatagcacctagcaaggcagaaccacttctcctcccctttccctccaagcctgaggccaggagggtcctgggggcagagtggcaccgagttgctcggaagaggaaaaggctattcttccgcctcccttgcctggggctactctgcccgggccttctggaagtctttgcgctgccgaatcagcgcctccatcagccattcctccaggacccccaaagatgaagaacgcttagccagcctggatgcctctgggagcagtccgagccaaagaggctttgagaactgtccctaggcccacagcccttgatgggcgtagatccaggccaggctttgccgctgcccttgtcccagccacccagaggggccgtgaattagcctccacgggaagttggcagcctcctccctagaactgtagtctggaatgaatctctgacccgatagcatcccactccggctcttctaaaaatccttgccaggtttactaggggcctgaaacctccggaccctgtgggttcccctcctcttccccctccttggcccccccgcccccaacaggctggacacctgtcacctgggctggaggaggaaggaagacctggactggagtttccgggaaagtcaggcttggagaggcctgggttgtgtgagagggagttagatgggagattcgtgactcggtgggagatactggcgaggctggcgggtaggagagatgggagggtggttatcattttctcccacacacacacagtttcaacctctcttagaggccgcgtctccagtctctaaatccctccggttcagggccgcacccccaacgccgccccatcccagcaactaaacggttaagcgacggccccaggtcagacgtttacaaacactcagaagccgggcggggaccgcgcccgttactctaatgagaaacaggctctacgggactggggaaagaagggagggctggcccgacgggccggagctccgcagcggccgaggcggcttccctccctcccctcggtcctccctcgggcccgcccaggggaccacccccccagtccccggggaccccagtgacgtgcggagctgccccggctccgagcccagggccgcaacacaggaggggcggggagaagagcccaggccggcggggagagaagaatgttccgaggccgagcggggaagcggcctggtttgattttcttctttcttttttttttttttcttttttttttcttttttttcctttggttggtctcctcaggttacatttcccttccagcttcatctcggaaataaaggaaggagaaacccacggggagggaggacgaggaacacctcgacccatcaaccagcctgtacctaagagggcaagggaggtgggaagcggaggcgagaaaagcagggatagagaccccgaggcccagcccctgttcccccagactctgcccctccccggccccactccccgcaggcacagcacatgcagacgcacacattcttttcaaatgtcatatttcctttgatcctgggcagcgtttctccatgtgtctggctcagctcctgcccagccaaccgccttcccctctcacccctgtttgttttcctggagaaccctcctcctcctagcatctggaaggccctgagggctggcgtcggccctcattcccctgatgactctggcctctcctcccatgactcaatttccccttcatgggtgttggggggtagggaagggaggagcagaggggagagtggttgagattgttcag

SEQ ID NO: 1241482 - DNA, 4001 bp, Homo sapiens
atacttttaagctagtaggtcaggctctagaaattaaggaatgcagaaggggaatttcctgcaacagagtggaaatctgcttaggtctggcacctattgaaagggccagagtggaaggctgaaatccagcccaagttccacactcagccacatgccagtgcagagcgggggcttgggagcactctataggctacaggaacacctccttaacctagttgatcctcctacaatagctaggggtgggagggtggaggggctttttctaattgtcccacagggaactgttgccctcttgtaaatcatccagaggtgcacttttttttctagttctctttaaaaccaggtagttggcagctgctgagctggttgcagatactcttttgaaattcagagggcatgaaactagtgtcttcaaatccatcccttgaccctcctgctcccctactggaatggctagagagagcggtagtgccaggcgcaaccctcacctgaagatagggctgtgtcccccaatccgggccttggaccaagcgagtggggagggcactgccaggtagtccatgccagccacctccttccgggaacctcctggaggagccacagactcctctgctcccaagggcagcttcccattgcatgaggcaggctcctcagaccgaggcagagccactgcctgctcgctggaagtccgccgtgtcttctgagggatgctctcagctggtggggcccccacatagtcaaagggaccaggggagcccgggtcccgggccagaggcaatgggggtggtggaggtggctcagacccctcttcccccaggctgccacggcgggacagagctggggaggctgaagatggggttcccgagctggaatagcgccgcttgccacatggagaggcaggccgcggggaggctggggtgggcccaggagcactgaggagtagccagctatcctctggccctcggcctccggggcttggaccatacaggctccagggatcttcgggggtccatggccgaggggaggcccggggcgagggcagcggggagcccaggccaaagcgggaggccgcctcatttagctcagactccacctcgtcgcaggctgcatacagggctgcctcgtcagaggcatcggagaagaagctccacgaggacaggctgctgctgccagggcttgggctgaagaaggcccccccaccctggccccctgcttctctgtagcccccaaagccttctggtggggggtaatctctaggagagccgtccccccaggcatcagggttgtcctccagcgctgctggcggctccggcgtgggagagatggaggtgatgcggatgctgggacactcgagaacacggccacccccagcacccccagcaccccctcctggtcctcccagcctcaccgacctggcgggctggctctcccaggtgccaggtgagggggctggtcgcggcggtggcgaatgcatgccaggccgagggggtggaggtcggggaataccgataggtgcagcgccatagggagggggctctcccaaggccagacggcagcatggcggggcatcctctgagtccagttctgtcaaaatgggaagaggagcagagggagagggggaaagagagaagcaggtgagatggctatgttccttgagtggccaggccgcaagtccttctatgctccctgcccctcagcaaagagaccttctgagccacaagacaaaagcagagttggacctgggaagatggaggagattgaagcaggcatgccaggcctttgcccactggcccctggatcctaggaccgagggtacccgatccagtgggtcttaaggtgagagaggtgggtccagaggggctggagctggggctgggcctggaggcgtgtttcttgaggcactgggctggactgggggcgactcacacatgaacccaattagcagcggttcccaaacccccaaacggcgctggcaggagccccagttgccatcgcaaccgtggccagaggggaggggggcgtcagggctgtggtgacgaggggaggtggctcctccctctctcctcgccatctaggggcggaggtgcagccgagggggtgatgcgtgctgggcccagccgggggaaggggggcagcgggcagcgcggattcgtgcgagcggcggccgccgcccccggctcggtccccgccatctgcctctcattgcggccagacgggggagggggaggggcgccccagcgaggcctgacagcgcccccagccccgggcgtccagtcggccgggccagagctcggtccgccaggggccagctccagcgccaaacctccccttcccctggcggcgcctggtgctgttggggccgtagttcccgcccgccccccagttcagtgacaggcggcccagccgggaggcggcgcacagccaacagcacccccacccccaccccagtcacgacctaaaaaggagaaagtggtgcccgggcccccagcctcacttccgcaggccaacgagtccccccgactcccttcgacctctgactccctcaccccccaccctaggctcgctgccttaaattccccagactcaggatccccggccctcctctcactgaccccaagaccccttcccagcccagcactaaccttcccccaatccccccgcgcccagcgggggggcctccttttcctccccgaacaccagcttaaattccagctcctcatcctcgcagctggccgcccccatggatccggcaggagcccccaggtcccggcctgggtgggaggggggagttcaggaggctgctgtatcttcacccgggtggctccctccctccctttctctgagaagccccctcctccgtcgctgccgcctccctccagaagccccctcgttattatagaaacttttccaaacttttttcccccaaacttcttcaaagcggtcccccccccagcctgtccctgattggctgccggggatgctccagcccctcctccagggatgagatgggaaaaccacgcgcccctcgtcctcccccaccctccctccctctgtcctctcttcagtccctccccctcaaaaaaaaaaaaactgaattggaaaacggtccttcaagagtgatactaatgttgcctattggtccgccgttgtgacaatcatttcccgcagagagcccagcccccacctcccctagtctcagttcaaggttctgggtccgagagccttaaaggggccacatcctgggcccccagggtagagagcccacggaagacccttttttaaattctgaagactgtgtagatagcacctagcaaggcagaaccacttctcctcccctttccctccaagcctgaggccaggagggtcctgggggcagagtggcaccgagttgctcggaagaggaaaaggctattcttccgcctcccttgcctggggctactctgcccgggccttctggaagtctttgcgctgccgaatcagcgcctccatcagccattcctccaggacccccaaagatgaagaacgcttagccagcctggatgcctctgggagcagtccgagccaaagaggctttgagaactgtccctaggcccacagcccttgatgggcgtagatccaggccaggctttgccgctgcccttgtcccagccacccagaggggccgtgaattagcctccacgggaagttggcagcctcctccctagaactgtagtctggaatgaatctctgacccgatagcatcccactccggctcttctaaaaatccttgccaggtttactaggggcctgaaacctccggaccctgtgggttcccctcctcttccccctccttggcccccccgcccccaacaggctggacacctgtcacctgggctggaggaggaaggaagacctggactggagtttccgggaaagtcaggcttggagaggcctgggttgtgtgagagggagttagatgggagattcgtgactcggtgggagatactggcgaggctggcggg

SEQ ID NO: 1241483 - DNA, 4001 bp, Homo sapiens
aatagaactgcaagttttaatatgaattatttgacttgcaaatatatgctattttattcaagttagcagctatacttttaagctagtaggtcaggctctagaaattaaggaatgcagaaggggaatttcctgcaacagagtggaaatctgcttaggtctggcacctattgaaagggccagagtggaaggctgaaatccagcccaagttccacactcagccacatgccagtgcagagcgggggcttgggagcactctataggctacaggaacacctccttaacctagttgatcctcctacaatagctaggggtgggagggtggaggggctttttctaattgtcccacagggaactgttgccctcttgtaaatcatccagaggtgcacttttttttctagttctctttaaaaccaggtagttggcagctgctgagctggttgcagatactcttttgaaattcagagggcatgaaactagtgtcttcaaatccatcccttgaccctcctgctcccctactggaatggctagagagagcggtagtgccaggcgcaaccctcacctgaagatagggctgtgtcccccaatccgggccttggaccaagcgagtggggagggcactgccaggtagtccatgccagccacctccttccgggaacctcctggaggagccacagactcctctgctcccaagggcagcttcccattgcatgaggcaggctcctcagaccgaggcagagccactgcctgctcgctggaagtccgccgtgtcttctgagggatgctctcagctggtggggcccccacatagtcaaagggaccaggggagcccgggtcccgggccagaggcaatgggggtggtggaggtggctcagacccctcttcccccaggctgccacggcgggacagagctggggaggctgaagatggggttcccgagctggaatagcgccgcttgccacatggagaggcaggccgcggggaggctggggtgggcccaggagcactgaggagtagccagctatcctctggccctcggcctccggggcttggaccatacaggctccagggatcttcgggggtccatggccgaggggaggcccggggcgagggcagcggggagcccaggccaaagcgggaggccgcctcatttagctcagactccacctcgtcgcaggctgcatacagggctgcctcgtcagaggcatcggagaagaagctccacgaggacaggctgctgctgccagggcttgggctgaagaaggcccccccaccctggccccctgcttctctgtagcccccaaagccttctggtggggggtaatctctaggagagccgtccccccaggcatcagggttgtcctccagcgctgctggcggctccggcgtgggagagatggaggtgatgcggatgctgggacactcgagaacacggccacccccagcacccccagcaccccctcctggtcctcccagcctcaccgacctggcgggctggctctcccaggtgccaggtgagggggctggtcgcggcggtggcgaatgcatgccaggccgagggggtggaggtcggggaataccgataggtgcagcgccatagggagggggctctcccaaggccagacggcagcatggcggggcatcctctgagtccagttctgtcaaaatgggaagaggagcagagggagagggggaaagagagaagcaggtgagatggctatgttccttgagtggccaggccgcaagtccttctatgctccctgcccctcagcaaagagaccttctgagccacaagacaaaagcagagttggacctgggaagatggaggagattgaagcaggcatgccaggcctttgcccactggcccctggatcctaggaccgagggtacccgatccagtgggtcttaaggtgagagaggtgggtccagaggggctggagctggggctgggcctggaggcgtgtttcttgaggcactgggctggactgggggcgactcacacatgaacccaattagcagcggttcccaaacccccaaacggcgctggcaggagccccagttgccatcgcaaccgtggccagaggggaggggggcgtcagggctgtggtgacgaggggaggtggctcctccctctctcctcgccatctaggggcggaggtgcagccgagggggtgatgcgtgctgggcccagccgggggaaggggggcagcgggcagcgcggattcgtgcgagcggcggccgccgcccccggctcggtccccgccatctgcctctcattgcggccagacgggggagggggaggggcgccccagcgaggcctgacagcgcccccagccccgggcgtccagtcggccgggccagagctcggtccgccaggggccagctccagcgccaaacctccccttcccctggcggcgcctggtgctgttggggccgtagttcccgcccgccccccagttcagtgacaggcggcccagccgggaggcggcgcacagccaacagcacccccacccccaccccagtcacgacctaaaaaggagaaagtggtgcccgggcccccagcctcacttccgcaggccaacgagtccccccgactcccttcgacctctgactccctcaccccccaccctaggctcgctgccttaaattccccagactcaggatccccggccctcctctcactgaccccaagaccccttcccagcccagcactaaccttcccccaatccccccgcgcccagcgggggggcctccttttcctccccgaacaccagcttaaattccagctcctcatcctcgcagctggccgcccccatggatccggcaggagcccccaggtcccggcctgggtgggaggggggagttcaggaggctgctgtatcttcacccgggtggctccctccctccctttctctgagaagccccctcctccgtcgctgccgcctccctccagaagccccctcgttattatagaaacttttccaaacttttttcccccaaacttcttcaaagcggtcccccccccagcctgtccctgattggctgccggggatgctccagcccctcctccagggatgagatgggaaaaccacgcgcccctcgtcctcccccaccctccctccctctgtcctctcttcagtccctccccctcaaaaaaaaaaaaactgaattggaaaacggtccttcaagagtgatactaatgttgcctattggtccgccgttgtgacaatcatttcccgcagagagcccagcccccacctcccctagtctcagttcaaggttctgggtccgagagccttaaaggggccacatcctgggcccccagggtagagagcccacggaagacccttttttaaattctgaagactgtgtagatagcacctagcaaggcagaaccacttctcctcccctttccctccaagcctgaggccaggagggtcctgggggcagagtggcaccgagttgctcggaagaggaaaaggctattcttccgcctcccttgcctggggctactctgcccgggccttctggaagtctttgcgctgccgaatcagcgcctccatcagccattcctccaggacccccaaagatgaagaacgcttagccagcctggatgcctctgggagcagtccgagccaaagaggctttgagaactgtccctaggcccacagcccttgatgggcgtagatccaggccaggctttgccgctgcccttgtcccagccacccagaggggccgtgaattagcctccacgggaagttggcagcctcctccctagaactgtagtctggaatgaatctctgacccgatagcatcccactccggctcttctaaaaatccttgccaggtttactaggggcctgaaacctccggaccctgtgggttcccctcctcttccccctccttggcccccccgcccccaacaggctggacacctgtcacctgggctggaggaggaaggaagacctggactggagtttccgggaaagtcaggcttggagagg

SEQ ID NO: 1241484 - DNA, 4001 bp, Homo sapiens
ggcaggaagcaccaacctgagcattgacatcagcacccaaggacaccaaaagctccacgatgcccaggtagccatggatagaggctaagtgtagacacgtgtggcctggaagaacaaaaggaaaaaagtataaccacctgtttcaaccctcactcctttcacctattcttttatggaacaagtagtcttatcttctgaattttaagaacccacagtctgggttctgaaagaactttataaaggcatccaataggcactttgcacacatattttctcaaccttccaaatgttaggagtttaagctcttgcctggactccttaagttggcccacctgccccttctccacgtcacctgccctccgagggggtggggcagggcagggaggcagacataccattgtagttggtagccttcaggatggagtggaggtgcggggtggtgcaggactgagtcaggactcccacgctggccaggcagccctgctcacaggcaaggtgtaggggggtatttcctcgaaagtctcggagctcaggatcacagccagctcccagaagtgcctcagcaatttctggctggttggtgatcacagccaagtggagtggagtctacgaatgcaagagagaccagagaaagtaagccatggaccaaacccacaccccgagttcccctcaacccgtgtctcctggttgggtgctgctcctcctagacaggggggtggggagggctggcaaatagcagaggctccaggtgggtcataaagacctcaccaaatcagtggaatttccttcactctctaggatgtgggctgatgtgaagtaaaaggtgagggtaaatagtgctcagtggccctgaattcagaaaggatctggggtgactctgctacatcagctacgtcccagggtcagagagaacccgggccaggcaagcggcgcacctgctgcaggttgttctggaagttgaggaaggccaggtctcccttcacctggcggatcacttccatggtcagtgccttttcttcatggatgatggccaagtgcaggaacctgtggggaagagagggaaaaaccccaggggtggtgagtgcaccgcgtggggcccagggaggcgcgggctgcgggggattgcgcaaggccggggtttctggaggccgaggccgcggtgttttccgcgaggttattatgagctgagtgttcctggcaggcgcccagggactttccgcccccctccccccgcggccccggcgggcgccggccagaccgccccgccctcccgccagctcggaacgccctgtacttcccctcccggctgctcggcgcccgccagcggccagaaactcccgccccgccttatgcaaccggggacttcgcgtccccgctgccgccccgcccccggcctagaggacgggtctggggggagggggcgtgtggcgacgctgccatccaccagggcccagccgccgcccctccgagttgggccggtgccccgcgcggccctgcagccctgcagcgttcggggcggtgcaggagccccggggtgccgcggcgcccgcccggctgcatcgctggtcccccggctcgggctccaggcccggcgcctcccacccccaggccgcgcgcgtcccgccctcccgacgacccccagccccgggcctccgccacttacgagtccccgtcctcggtgagctgctgcttccagggctccgagccgcgcggcacctcctgcggctcgaggcggatctcctgcagctccttgaccatctgctcgtactcctcgtctttcatggagtccaggccgctgtcgtggcggtcgtccagtagccgctccttcttcagcccgtcgcgggggccctccatggcccactcctgggggcgctcggccgcctggaacatggcgcggacgagctgcgggcgctgctgcgggtgcgctgggccgcgggctgcgcgctgcttcctcgctggggcgctggcgggcgggacggcggcacggactgctgtgggctctgcagcgccgccgcggcgccctataaacgctggctggggatttctctggggcggggtcaggctcggggaatttccaagccagtcagaccagaaaaagagaactggcttcgtcctctgctagggggaaaaagaagcctaaaccctgagctggggttcatcggagaaactccctgcgatgagccactagggtcacggacagggaactttttgatgagcgccgagtggctggaaagtccttccgaccaggccccctccccccggtacttccctgcagcctgcaccctgtaatcctgtccctctgcaagtgagccttctttccctggggtttcccacgatcgatttgaattggggtcgtcggctgctgagatcccaaggacgccgacctgatgggcggtccctctttggggtttgccaacctgccggtcctttccgttttttgatcttttgaaaacgcaagagtggaaatgatggctgggcgtagggatttgctttccccagacttctaaggggaaggacgcactgtggttagggggctgcaggccgcgccggtgtttctgcctataccaggctctttgcagcaaaggaacttttagcttcgcccccacccccccacgcacccccgccaggtagaagttgtgaaagctttggaggagtgaaaagcctaaatccttggagaactctcaaatcacttcctagggatgaacagccctgttgactgggggaggggcaaacgctccctgtatggggaaactgctgaataggaccatgattttttttgtttcccaagtaaagcaaggtgttaatgtttgtagtggtggttgtggataccttgcaatagcagagtagctattgtgttcataagtagctattcgtttatgctatctgacctacattgtgctcccgcagaaaaaggatcgtgagcctacttctgggcacccaaattcgaggagaacttagagaaggaggctgaagaatgagtttagttagtgccttaaccgcgattggaccttaaggaccactaagaaagtagttgccaggcatcctgcgggaggctcaaggtagtcccatcctgcccgcccctccttgctctcttgtcctgggggacagtagcagttggacccattcacgccacctgggtagaaaggggtttcggctcactatgctctggtttcacctgcagaaatataatttatgctctccactccacctccacctccaagcctgcaagccatggactgaattcatctacttggtagaattggtacaggcaaaataaagcaaacttcggtcagagctcttcagaattagtcccaggaggcctctgtagttctgcagagatttctggtgattattgcaatcatctttaccttgactggccttgtactaaccaatccttcccctctcttcgtatctccacccctcccctaatattagaatgaaagaaatctgactcgatagagagagaccaagtatgaagggaaaaaaattaaaatcagatagaccctccagggtaataatgatcacatgttacaatgaaaacttcccagggatagacaccattgtctctgcaggtttatgatatgcaaatctacaatgattgaggcaaggtgaaacagtgactgcaatgggacatctcaattccaggttctatctttacttgactgcacattagttggagaggtcagttaacttttttgtggtatacttaacttttataataagattagattgaatgttacttaaggtcttttctagcttaaaagtcatattgcttgtctacaaatgcatgcctaactctcctttgtaagggtgaccatggctcttggaaatgtcagggtataaatttttgaaagaattccagcgccttatgtaccacattgttctcagaactaatcttgtaagatagatattgttcctacttccctaaaaagaaactgaaatgcatagaaatttacccaggaaccccttggcagtatattaatcatttggccaaagcagtc

SEQ ID NO: 1241485 - DNA, 4001 bp, Homo sapiens
ccagggcaaacagcctgtgggagtgaggcccaggtgttagccctggggtgtgagctcctgcaagccccagcaagcctggctgtcctgcagtcagcgggcgggggtgccaagccaggtctcagctgcaaaccacagctgactctcccacctggcactgctcccccgccagcttcggtagtgccctcctcctcatgccttctactggctctgggcagcatcctagaaagggcaaatgtgtcccagggcctctggtaagcaggggtccctcggtgaatagctgaggggtgtgatttgggacaggaagaggtccccaaacaggaaacctggagttacgttgtgtggagaggaaagccctttctctctctctctctctctctctctctctctctctctctctctctctctctctctctcttctctctctctctctctctctctctctctctctctctctctctctctctctctctccctctccctctccccccccccccccccccccccccccccctgcgctgagtactttccgtgtggttaacttttaactgtattcctcactgtcctaagcagtgggtacaactgttatcccagttttatagaggagaaaacagaagcccggggaggctagaactcgcctaaggtcacacagcttggatgtagtgcagccacagcgggtgcctgagaaaaaagtgagctggggggagtccggaggcagaagcagaggccctcctcggcatttgggaggtctcaccgggtaactgaatgttttccccttttgtcttgggggtggttttgcggaagcctgggtagaagttctggactgtccaagggtgccaaggataggtaacaccacggtgagggaagcagtgcccggttggtgatagcggaagggttaccaaaactgcgagctgaggttggagactggccttcccttcccacccggcctgcacaccccccacccctctcccctgcggtgaggctcccgcatctgtcaccccttccccggctgctctctggctctttcctcggaaaggtttgtcttgttggttgtcagggatccacacacctggagccagaccgctcacacgcgggcgcaggagctcgccccacacatctcccttccccggctctcggggcaccccagtaccctgataccggcagcggggtgcacccctgcagtcgctacctaaggaagacgcaggaggcacaaggcggggtggaggcgccgcgcagggacggaggtccacccgcccagatgtggggagatccgcgggaggggatcccgcccggcccggtgagccccgctgggagagtggtgtgcggcgctggttggcaacaggcgcccacggtcgagagagaggcagaggggctgtgccacccgtcgccgcgccccgctcctctggcgcacatctggcaggcgccccagcgccccggcagcggccagttttccctccttcggggccggtcctgccgcgtgacccctttcccgccgaggcagcctccacccgcatccccgggcgctcgtgtagccctcacctggcaaacaggacggtgccgtgctccagcgggctgcggctcactgcccgccagctctgccggatcagctcgggctccgggcgctccatgctgtcccggggacgcggagcgcggggctgggaccctcagggctcgggtgccgtcaccgcacgtgccgcgccatctcctccgcgacgcggtcccctccgcccctcgtacgccccccgtgcctccgcccggcgggggccgcagccgctccttccctggcgcgggagagaaaaggcgcgcggccagtcgtaggtggagacaccccagctgtgcttccggggaccccgcttggccgctgcgccctgcgccccgcagccgccagagccgccccaccccgcgacgcctgggctgggcgctttaaagccgccacggcccccgccccctccaggccagcaaggcgcgcgctccctccgccagccgctatggtggcctgggaaaggcccggcctgcagaacgtaactgacatcgcggaggctctctgggcctcagtttctcctcccgagccccgagggcactgtgttgaatttggtcgcctcaggtaggcgctgcatgcgccccctctccacaggcccctcaactcacgcattgccagaggcatttgagtttgccacccacctggcctgcaggtcaggcctggggaggcggcctaggggcctagttctcggtctgactagggcaccagcacacgttgggggccaccagggctttcagccgtagggacagggccaagaccacagccattcccagccaggcctgggtttttttgagactccatctttagaaagccgtgagatccagttctaatcccagctctgcttggccagggtggaatcttgagggagttcagctctaacattctaccgttccatgatttaattttaattttaattttaatttttcacctcttccctccctgggccttccccacttccatgatttttcatctttttgtttgtttgtttgagacggagtctcactctgtcgcccaggctggagtgcaatagcgtgatctcggctcactgcaagctccgcctcccgggttcacgccattctcctgcctcagcctcccgagtagctgggactacaggcgcccgccaccacgccaggctgattttttgtattttgagtagagacggggtttcaccgtgttagacaggatggtctcgatctcctgacctcatgatccgcccacctcggcctcccaaagtgctggggattacaggcgtgaaccactgcgcccggccttttttttttttttttaacggaagtactgtttaattttttcaatagaagttcagataatagaatccatgctccccactcagggtgtgcaattggccacctgccaattacaactaaacttttctctttcaagcagaaagttcctcaagccccagcccagtgctggtggcccaggtttgggagagcaagcccgttttcacctttatttctctctcattattccctcaggggtctccgagcctatctcctctgtctgtccacgcctctctggccctgtttcctcagttgtgcagcaaaggggttgggtggtgaggtctctgggaccttttagtccacctcctttagttccatgggtagaaggtgggtgttcttgagcccctggttatgaacagctggggctccatgcccagccctgtgctagacatggagtggcgagtcctggtctttaaaatttctccttctggccctgaatcagaactgagtgcctcagcagaacttttctttcctactcctagccatgccccaggaaatcatctagctgttctccctcttccaaggactcaggagtttgtggtaacccctattctatttcccatttcctcacaaatctctgggctggagcaggagagcaaggctataaggcagcctggaaaagctggtgtcctagggtccaagaggtctccaagcaagaacacaaagtgattggggctgaaggaacaagacgtgactaaacttccagcttggggtcccgtggacctgcagccaggtgcagcaggtcacagggcaaggacacgtgtcattggtgaccttcactattcagtgcccagatgctcagtgctctgtgcaggccacctggctggtctcaggtaccccactctacccagctcacgcttcttgccagcaatctatacttaggacccatcttgcttcctctctcctctggccagggtctggagtctgatgaggtagtgggagttaacggccctagctagtaagtagagtcagtactcaaaccatggcttcactctttgtcttcctagagccaggagatatgtgctaagataagccaaggtaagtgcactctatccctgctcccttcaagaaaggcctgagaatctggatgggcctaagcgatgagagtgatgtattcccatcagtagaccaagggtccaagcccacatttgaggggctcagta

SEQ ID NO: 1241486 - DNA, 4001 bp, Homo sapiens
acaggcacatgccatcatgcccggctaatttttaacttttgtagggtctcactatgttacccaggttggtcccgaactcctgagctcaagcgatcctccagcctcagcctcctgaagtgctggaattacaggcatgagccaccatgcccggcctgtcacattttttcttaatatatacaataagtgatatgtcccaattaataagtgtcttagattagatgaaatctgaaagtaactcctcagttggcctacagtaatcttcagagtgacttttccagtcttatttcctacccccaacacacataacacagaaagtacatcctatcacaaaaatgacttactcctttcccttatcaccatactttcaggcctttgtgcctttgcacatgttccttctttctgtccctcccatttattcctcaaaatcctatcacctcctctgggaagcctgtcctgaatccctctgctcttctggcagttaattaatccctctctttggctggagactcataactctgtaatgtgactgctactattaatacttacatctattgctttgctttgtcttccctctagacttcagcacagaaactggatcatatttatgtttgaagctcgagcacttaggatatataagacacaataaacatacaatgaaagaactactgagaacattaagtcaggggatgcttactgtttgagtacatcttaccttttctgtaggataggcaccagcttgaactttttgtgtcagtgatttcacttgtgcagttacagccatcacctgaaattagcccaaataaaacaagtgattagattatatcaaattatgtctgcaaactgtgaagagcaaaagctaaacaatgccacctaaaaattatctgaaacactgtctaaagtatagtactatcttctcacttctcggaaagcataggagagatggttcttcaaaaagtttaaaaaaaaaaaaactttccacttcttaaagaagagaccatcttttactgaaccacagggaggagaaaaggactgagagagtagtgactgaagcactgtaattttgtttgtactagttgaacttacaatgcatagaactacataactccccgacttatgacttaatttccactttacgagggtgtaaaagaaatatgcattcggtagaaaccgtccttttctcgtgatgctgggcagcggcatcaagcctaaatttcgacttatgaggttttcgaattacaatgggtttatcaggccataacctccatcgttaagtcgagaagcatctgtatataagtgtgtattacctgggcacccaaagggcaagtcatgttaccattccaagcactggtttccttagctatatgaataaaggaaaactattcatataatttctttttggagtttcttgtattcccttgggtgcagaatcaattacttagaattctggcgtgaaaaggttttgattacatcattttactctaaggtttttggaagcattcacgtatctcaatcaccaaagttttgaggtgaagtacacaaactcaaagccaatccgtgactaatttattccagaggcgacactactcacttgctcctggagatttttcagaagtgtcacggcacttggcaggtcggactccagcaccccctacagaagggagaggaggcgtaaagaaaagtcattctttcctcaggattataggaaagtggaacgtctagggtgggaaactgccctctctccgtcagacacccagactcggggccttcacactcgggttcacagactcgccttaaagccagccccttgggttaccggacaggaacggtaactctagggaggccgcctccctgaagcaactttcatcaccacccttccctggtaccaacagtttgcctccagccgctgaaggcaaaggacaactccacaatagctacgcgaggaagaaaccacaccaaactcaccagcgccgccatcttcgcaaagcccaccccttccggtgtcgtacttcctgagcgctaagggcgacttgatagatttgatagacaactgccgcttgcaaatctaagccaatacgaataagggctttctcacttccgcccccaacaggataaacgagaggaggagtctgatctggccaatggaataaaggaactggctaaattcgtcagactcagaaagagtcgtcaggacgaaaaaaagcacttggcaaagagcgtgtgattggtagactgagtaaaatgattgacggcaagccaataagagacagtcaaataattgattgacagttggaaggaccaatagaaaaaaggaattagcagagcgaacttagcgcgtattggctcccgtctgccgcagcacccagagtcttttttcacggcacttttcttgtagtgcgtgaaccggccgctaggtgatgggccttggcttggctttgcggtgtcgacattgcagagccgccattgctggctgctcatccaacggccaccgcgccaaatgccttacagacccggtggccctggaatcgattctgtaacactactccttgtgtgaccgtggacaagtcactcggtctctgagccttcttcatctgtaaataagagagcgaggctagagaagcccagagccagagtttagaaaccgagtgcgaggacacctgccctcttggtgtgcactgtggagcgctgagaaacggctccaataacgccccgacactcttcgctcctaccagtttggggacatgaaaagaatacgttttacaaattggggaacggttcatatttacatgacttaccgcggtcacacaggtcttcagcagaacttggttcaaactctggcagtgcatgtttcagtataacctgcctcatcattacccagtgctttcagatgtgttctctcactctggtttttcacaagctggtgaagtaggttggacggatactcattgttcccatcccatgccttaggaaataaagcaccgaaagggtgaatgatagtgtataattttttgttcacaactcgtccaacagagctgggtctagaaatcagatcttaccgacttgaagctgtcttttggaattaagaataacacctgtatctgggcaggtgaggtaaggaaatcctggtatctagatcttgctggattcaagaaggcaggagggtgttcagtccccactcctctaacatttaatttgctgcttcaggcccactgtggaagctcaggatgctgttgcagcatacttagtcaattatccagtagcttttgtaatgttttatcaagatttgtattatgaaaagtttctatttctacataaattttcggacctgtctaattagatcagcaataaacttttccttttcggggaatttgaaatttagtttgttcatatgctttatgatagcaatgagaaaacaaattgcactgccatattttgggtttttttgagaccgagtctcgctctgttgcccaagctggagtgcagtggcgcgatctcggctcactgcaacctccgcctcccgggttcaagcgattctcctgtctcgccctcccgagtagctgggactacaggcacttgccaccacgcccggctgatttttttttttttttttttttttttagtagagacagggtttcaccatgttagctaggatggtctcgatctcctgacctcatgatccacccgcctcagcctcccaaagtgctgggattacaggcgtaagccaccgcgcccggcctttttttttttttttttttttgagcggagtctcatactgttgcccaagctggagtgcagtgccgcgatcttggctcactgcaacctctgcctccctgttcaagcgattctcctgcctcagcctcctgagtagctgggattacaggcacccgccaccatatccagctcattttttgtatttttagtagagacggggtttctactaaaccatggttggccaggctggtctcaaactcctgacctcactatccacctgcctcggcctccca

SEQ ID NO: 1241487 - DNA, 4001 bp, Homo sapiens
tacaggataatagcaggatacagtagtatgcatcattataaatgatgtagaaatacatttattgacattgaaacatatttacaatacactattctgtgaaaaaagcaagttataaaacagtatgtgcagtgtaaactcatcattgttaatagacagcaataaagatatgcagaagaaaaaactctgaaaatgtacgcagaaaaatgtttatcagtggtgggaaaatgagtggttgttttcttttttaaaattatctgtattttctgattttttccccttcaatgaacatataattagaaatacttgtatacttagagatggttctaaaaataagcaaccaaacagtaaattgccttatgttcaaaggggctcccacatctgcactcccgctctcatatccgctaagcatttttttcctcaagggagtgaccacctgccagggcctcagaagatgcctagagacaacgtctttcctcactcccaagccactccagccctgctgcctccaaggtcaggttcagcgcaagagtaggctcagaaacaactccgagccagtccctgggtcgctgccccagaatttaagcccatccttcaatttcctcagcagtcaaatatccctggtcacttacctctcccgagggcagcgccccgcgcttgacctcctcgtaagcgcctacctgctcccaggtggccaggaaggcgtgggtgggggtaaagcgcgcagagcgcgggaagccagcgcgcacatagcgggcggccaggcccagcactgcgggggaggtgtcctctcggtacaggactcggcctctgccgtggctcgtgtcgatgtccgccagaaaaggggcgatggccgggaagtcggtggggaaatcatagtccacatactgcgtttccctggggaagtcctgagtggagatgatgccgttggtgcccacctgggagaggagagggacaaaaaggtgacagtcgctcaagcccaaggacgctaccctttcgcgcagggagggaagggaactgacttaggcaaaaagcctctctctccttccccactggccagggagtctggattcagggaaacaagcgcaacttttgcgactgtcccagctccgcgctgcagtaggtccaggggccctaaaactcgttcacctatcttctcactcccctcacaaccccggagccccatgtcctcggagaggaagcctccaggtctgaagagggaacaccccagctccgcagacgggcacagccttctcgcggtcctaactgcaaagcccgctggccgccctagcaacgccaccttttctgcctgggacgcgtacgtggctgcgaacaattcttgctctcccctccaggtcattcttgctcccctacagcagcggggcaggcagcggcatcgctctctggccgggtaccaccgcaagggtgctggggggctccaggagtggggtctgtttcctcccctctggaggcagggtttccgtgagaccgaccccagggaagaagctgcgggaaaagtgccaggagggggctgaacttacgtagaggttgctgaatcgggcttcgtagaagtgcaggggattcgccagcttcaccacggctgagctttcgtcgtcgccttcctgcaggagctggtccccccacgactccccgtgtgggaagagctcgtctgggtgcagcgccgcggcccgcaacattagcaacggcagcagcagtagcactggtaacgacgacagcaccggccgcccggccacccggtccccctccatgctcgctcggccgtgcgcttacccgctgcacaacgcgtcccgccccggcctccagcccactctccgcgccgcgccagcctcgaacctggatctccgcgggcgcctgggcggggcgggactccaggcccacccagcaagctaattggctgaggccctcggctggggaccaatcaccggctctgagaaagttcggcagtggccaccacatctggttctcgttaacttttctaaggcagcggccgctggagcagcggggctggcggggtaaaagctcctggccagggctgcctggagctgccccttccactccgcccccagggagctcccgggtcatcctctcatccgggctgccccgcggcccccaaggagccccacccccgggaccaaatggcccgcaaggtttggggcagcggcgttgcaggagatgagctcagcgcaaagggaaccccgcagcggcgagtgcggctgctggcctgcgcgctgtggccccaacaggctggcagggcgcgggcgggtggcggggttgcggtatgagctttgctccctgccctggggtcccgggcgctcctggctctggaggcctggccatcggtccgaaaagcaaagggacattgtcgtggtcccctcggccgcttcgctccacccagagacgccctgaggagaagcgagcctttgtacgaaggcagagggctgactcctaagttctgtccccctcccgaaggccggccgctagggaagacttggccaccctctggaagtaccttcccccgggaaaaccgcagcaggaaagaccatgaaatactactgtgtgtgatccgctccgtttggggagtaggatgaggcatcccgcttggttaccaggcagaaaggggcgagtcgcggggatgggaagaccctgatctcttgcccattgctgcggccgtcggagatgccctcccccgcggccacggaggcggtaacctgagctgctccgcaggactggaaaccgcacaacctcgaaaccagctgcgcaggagaaggggaaccccatccaccataaacatcccctctgcgaagcctcaggagctggaggagattttattaccatttttattatcaagagcttaaaatttcccagacagtctgttttctctcccaggccccccatgaggtccttaaaagcaaagatatttaaaaagaacgaaagaaagaaaaaaaccaaaaagcaaatccttggaaatgccttaaaggactctccagagacacactgctctttgtaggtgtttattcctatgggcccactggaccaaacgctaaaaaacgtgaagacatcagactgtgagactcatagagcagacacaaaatggaaaactggcccaaagcagtttgcttcctcagagtggagagttgtatatttgatgttccaaaaatatatttatgcttgcacatatattttctcattctttctggggtcaggtatttttattttactgaggatgaaatgaaagttcaaagacagatgacttgacttgcccaacatcatctgaagttactccctgatataaaactactggccctctgtagttttactttatctctcgattcagcataataataataactaacatttatttagtggtactaagctatgagctttggggcaagcaaacactgagatggtctccaatgatccccatttcctggtgttcattcccctgtataatctctgccctgggagtgtggactggccttgtgatttctaacaaacatagtgtggcaagagtgatgagaagaaggctaaataagattgtggcttcttccttgttagttgactttccctctcattgattttgatgaagcaagctgttatgtcggggaggcccacatagcaaggaactgaggagggcagcctctggccaacagtcagcaaggaactgaattctgccaacaaccatgtcagtgagcttggaaacggatccttccccagttgggtcttgagatggtatctcagcgctggctgacatttgattgcagccttgcaagagaccctgaagcagaggacccagctaagccaggtgcagattccagacccaccaaaactgagaattatagttttggttagattataattatagttttggtgggattccagaccaaccaaaactgagaattacagcttcagcttcagaagctgaagaagctgtgtgttgctttaagctattacattttgggataatttgttatgcagcaatagac

SEQ ID NO: 1241488 - DNA, 4001 bp, Homo sapiens
aaataaacaaatctgcaaacaaattcccgggcagttcacatcacctcccaaaggacactgacaatagctgaagagaccacaacacacaaactcgtttttcagccagcctgtaatgttcctcctatacacactctggaaatcctcagctcccttcaactccggagcaagagccaccaatattccaggtcagccacctatataatatgctcaccacgagagaagactcaaggtaaaattaaactgacagaaaaaaggaattttccttgttagatcatcaagcctccggaatcatgcaaacatgtgtgtatgttatggtgtttacggggacctaactgagaaacgtcgtggttccaggggcttccctcatgtgtcaggatggactttatcaggattctcatcctacaaagctaccatgtcagtcacaaaagacaactacgcaatctgtttcgatgtaataaattcaggagttgagctgtatggcaagcccatcttagaagtcctcaacaccaggagaggatctgtcctagttaggagcagaaagcagatctcataatatccaagttgtctggaaacatgatatatggtagggcagtctttccagctcccattttgttggtgccttcacctcgggttgtcagggctggggttagggaaattgcctctttccgtctctatctcttttaacttcgcagcgagagctggaagcagtgactgttcccatcacctagtgtccttctgtcaggggccgcttcggtagctacagaagcctagccgctggaagcttccttccccgacactccatacctccatgccacaccttttaggcaataaccaaatgtcattttgttctttccccttctcctgggcattatactgggaaactgtttacgcgcatcgaccccgcacacctccaaaaatctccactttccgggctccaagcagctctccgctactcagacagcccaggctaacacctcggatttccccatgcagtttcctctgcagcgtctcaatcacaaggctgtacgggcggcacatgccaacggaaccaccaccccttctgctccctcggggactcaagcctgctctcggtcaaagcacagaagcggctttcagctccgggcaggcggccggggcgtcgggggtactggaagtgcccaaacccagcggtgctgccgcgcggggaagcggaggtgcggccgcaggacaagcgcgcctcccaagtccctggccacctgcgatgcgtcctcaactcgcctgcccatcgccactaccagaaacctcagacagcccattgtgtgggcaggcagcgcgctcccccggccccgccgccctcgcctaccttctgtcggtctctccggagcgcccgcacagccggcagcccgcctccagcgctctgcaaagcgaaggaggacgctttgttagggctggagaaacgggacaatacttcgcagccggcgcagcggttccgggcgggcgtccttcaaaaggacgcgaatggggacccgcgtgagcgtcatttccatatgtaaggggccagctcttacaaaagcgcggctctcgggggccgcgggctgcagcgcgcatcctccccgcccccgccggcccgcccccgcccgcgcagcccgcgcctccgggaccggcccctcctcccgcctccgaagcagccccgtccccgcctcgtcctcccgcccggccgctgcttcctcccggcccgcagggattgcgccccgctggccccggaccccaaatgggaagcccccgagtgatccggtgcccagttcgctccgggctctcagggcctcgccgacggcgcgggggcagcgcgaggcctccgtgcacccccaggccgtgggtccgggtccccggggttgcgccacttactgcgtcccggggctcaggcgcccggcgccgccgcgggaaccatggccgctggcgcactccgggcttggcggcggcagcgggacggccgcgcccagcgcgctcggctcccggctcggccgcggccacccggagctctggacgccggggaggaagggccgggcccgcgcggggaggaggagtcagggcgacgccggccccggcgcggctcctcctctgcggcccgcgcggctcaggcagcggagggaggagcgggcggcgccgcctgagccctcgcagacgcgccctcccgctccgagcgcccgcctccgagatctgaagttagaaacgccggggctccgggtgcgggtgtaggaggctggcgccccgaggtcgccaccgagctggggctggcgctgccaccctcgccccttgcctgtccgcctccctttctttcccaacacgcctacactcacccgcaccgcggacactcgggccgcagcgtcttcgcgcagaggaagggcccccgccttcagcaagcgggactttaagggggtgatttcccagccctcgggtgtcgattggccatcaacattggaaagggtgttcaggaggcagaagggctgtagaagtgactcggaaccctgtagagcgagcgcgaccctcctgccgggtctacactggcttccgcacctgcccaccacgtcctcacaggctcccgcccctgtgcagccttctccgggtgaagctaaccctcggtcgcaagccacacaggacgaaaactccttggagttggtggttcccagcccaacagttgctcgatattaatcgcctcctacctactaccccagagtctgcgttctcactcccccatccctacacttctgatctcattgcagtcaaataggatcccaagtccaggccatggttctttttgagctgcagggttaaatgtgttgcccttgaaggatccgcctgatggattacaacccacaagtctggttattttagcaggaaactggtgattccttttctaccgagaaagcaagcaacagacaagaggaaaccagcattccttgagaatccagtgcgctagaaactcgacagaaattatcttatctaattctcacatcactcttaggaggcagacattattttgcagatgaggaaaatggatctcccagaagtcaaagagcttcctcaggatcacacagcaggaactccacagaactgagattcaaaagcagatcacatatgtggcaaaattgcatagaactgaatatacactcacaaatgagagcacgtgaaactcatgaaatttgaataagacatttggactacactaatgtccatttactgattgtaatattgttctacagttatgcaaaatgttaccattgagaaaaattaagtgaagcgtctatagggaatctctctattattccttacaacttcaagcgaatttacagttacctcaaaaaatttttttaaaaattttaaacatctcagtcttattcaaaagcccaggctctcttctttcaacacggtatataagcgtgcctgcagaataagagagatttatgctcctctctcctttttaaacagtcttgaataagtacacatacacacacaaacacacactcatacactgtatgcatggttgttcagtcatccagtaatatgatacaacacacacacacacacacgcagttcattaagaggatagctaacctgttaccagaatacttacatagaggtcatcttgtaagacagacaataatgctcactgggcactaaaacagccaacagtcttggaaggtaagaatgaagaggtgtctttcttgtttcacctaatctctgccatggaagcctcatcctactggttacctctccaagcatcgctttttaacctgcaagaatccttaaggatgatattgatcattagtttaaaacagtgattcctgggggtcaggggatattggaagtggcattcactccctgtgcaggaagatcagaattgctgggggttgtgtaatttgaaaaacacaagatgcgctttcttgagaggagtaagtggggtggagttagccctgggactgggaactgggatcacctccagccttgctacaaaggagggaaag

SEQ ID NO: 1241489 - DNA, 4001 bp, Homo sapiens
gctcacagccccaaccctggctgccctccctcagtctcagttccctctttcgaaccaaaagacgcagtgggggaaaggccgcttctgctcctttcgtgcccagcccgggtcagagcattaggattagctggccacaggcggcgaactgggctcaggccgggagctggggtcctacggtagaccccagtttggagaggttaggagagggggtgttgacttccaaaagctggagcccccagacgctttgcctcttggcttctctcctgtcaggccccagtgagggcacctgctcggacccttagagtcccctctggaactgcgagtcctcccacctgcccagactccgctggagagagggccgggccgggcgctcgagtgcctcccaacagggcagcctccctcctggcccggtctagcctctccgcgctctgctcgcccctgctccttgagctcggggtcgcttcccttggctccccgaggtcttctgcgccgagcagagctgccagtccaccgcgcctaggagacgccgagtacccgcatctgaccgcaggaccccagcgctaccaagtgcctgttcttggacccccagccgagcagggggaagcatccccagctcccgcacccaagtccctggcgccgctgccgggccgccctccctgatgcccagcgcgcagcctgccggcgccgcgccttctggacggctctcgccgcacctcctgagctcagcccgcggccccgcagtggggcggcctcacttactggcggggaagcgcgggtctgggttggcgccgtaccatccggggccagaggcgctgttcctcatggtgtcctggtacggcggcagctcgctcatgttgcccaggttgccgttgcagtagccccccacggcggagtgcgagagctggggcacccccgccgccgtcatgtggtaggcggcggtgacggcgccgtggtgccccacggcgtgctgctgcatggccgctgttggcggtgccgcctggccctgcctgtacgccgccagcggagccccgaggccgccgccctccatgcccactttcttgtagctttcctccaggggactcaagatgtcagacactgagaacggagtcgtgtgctttggactcatcgacatgattcggcggcggctggaggaggaaggaagaggaggaaaaaaaagggagagggggaaggcgaagcctcgctgctttttttttctccctttgccaaatattctggtgttaccttaacgccgatcttgttggatgtacacgtaacggagtggaccgagtcctccttaattggcttgagtggaggctcgggggctgcctcgcgtttgttttagcccggcgccaggttttaggcagccaccagaggcggggcgtaagcgctaaagcaacaagacaatagaagcctacatcttgcccgagataattagcttacatgctgatgacaaggtaaacacctttaagtttcacttgtcaggatttttaggtctcaaagagagagagagagaggcagagacgagacccaaagcatttcccccctcccttggacacccccacccccattttttgtggggtaccagcggagcgcggggaggaggtggaggggaggggaaggaggagggaaccgagagcggggagggcaggaggtggggtgggggagtaacagaggaggagagatggttgagaggaaggaaggtgaatgctgctttgcaaccaacttgcggagttacaaagtggaaccactttccaattcggtcggggttccccgggcacggacaggtctttaggaggagggggctgagggacagggtgggggtttcacctgagcctgccggggctgctcctccctcccgccgcggcctcccagccccgcgccttcccactgcctccggaccacatcgggcttcgctgcgctgagccccagtcgccaacaaatgagcgagcgagtctggggacgaaccctggggccgcactgttggtctacgtgtctgtcagtctgtctgcctctcttctgccgccgtcagagggacacctctgctccccgccccctttccccctaccggagagaatccgagcgggcggagggggcgctgagtaggggatcgactgcctcccggaggctgtcccggatccccgagccacaacccgcccccgcagctcaggggtttttcagtgggccacccccgctaacacgcctcccccaaggtcttccccccccccccccacccccggccgagcaaacacagcactggcccccagagctgggaggatgggaaggggtctcacgggagggtccgtcactgaagttgccccacctcgaacaaacctggtgtccctgaccctcgcccatctcccagacacgcggggatctggggctggagctgactttccgaggacatcacagccccagcacccgagcccagagccacgctgttttcccctctgatgcttcagggagcgcgcgagcagggagcggcgtgagtgcccgtctgtctgttgccgggcggaactgagcctgaaccccggcggctggagcgctggccaggagggggcgaatgccgaggtgcgggcagctcagcgggcgggaggctgggccgaggctcgcctccgcccgcagctcagccatgcaaaagtgctcttgcttcccgggaataaccaaatatctttgtttaaagtggtggcgtaaatggccagtcgctttgtggccacgctggatattagtagatgaggatcattctgcttcaattgggcgcctctcatccgacgagcaagaaactgcttaggaggaagagggtttcctgtctgcgcgttcccaggcttcaagtgtgggccccgcgccttgagggtccttgggcgcctggcgagggggagctgtgggctgcgctccccagcggaatcgggggtgtcccccgcgttgctccggccaggccggggcctgcagccgagtcgactaccgagtggagcactgaacggcgcggattttgagaccgactccggtttttgtccttggattttaaacgtttttatcattgtttttgttttgctttctccttagctgttttagtctcctctgcgcgccaggggctgggagggcggagcgctccccggccggccccggcaggtgcctccaagacacccgcgctggtcaaggagcttcttgaatttagtttttgttttcacattttctttcccctccttgtagagaaggagctcctgatcatgacgaacaggcagttttgagctacttaattcatccgggctccctttttttattaatagcaattacagtagagaaagttttatttatttttaaagatttcagccctctccttgaagagagctcttactccctcaatacaaagccaacttctataataacattcgcttttctcaccgcctaccttctttaccagggtaaagaaagctcaggacaccctccgccctcccacctgcgcccgcgtttttgtgcggtccccacggcagagctggggaggccaccctacgtttgcgcagggagacgcgctcgccgctggtgttgcgaaagaccagagcgaagcccggctccttgcccttccttcccaggggcttctctggggggcgctctcaggccccgacgaactgagcattgatcactgtggtggctaagcaaggaggggaggcgacgccgggcttaagcgaaccacagaggagaactggcaacgctgaatacagaccttgtctgcaggcgcgacctggccgggcctgagtcccgaatggggtctaattgcgaaggcggggtgggtttcccagtcacccagcttctttctctcactcgccattatttcatagttgtttgtaagtttaaggaacaccaagtgtagaatgttgtacatctcttccagtctcaacgccatttagaaatggagatcaatcttcacaaggtttttgtgagattcaagtaagatgaagcacatcaaaatgctttgaaagctttgaatgtttttcagctcagtgcca

SEQ ID NO: 1241490 - DNA, 4001 bp, Homo sapiens
tcctgctgcagttgctgctgcgccgccttgtccttggcctggcgcttcattttgtagcggtggttctggaaccagatcttgacctgcgtgggcgtcaggtggatcatgctggccaggtgctcgcgctccggcgccgacaggtacttctgttgcttgaagcgtcgctccagctcgtacacctgcgcctgcgagaagagcacccggcgcttcctgcgcggcgcgcttggcagcggggccatgttcttgctcacgtcccccagcgagcccaggccgcccatgccgctcatgttcatgccgctcgccgggcccatgaagcgggagactgtaagcgacaaacgcacagcgtcggccggggccaggccgagccaggccacccctgttttccgcgccattggcccgcccggcccgccccaaccgacggcgccctcctgacccaggcagcctagcgctggggcccaagaggcccatccgcggggaactgccagcgcctgccccaggccgtaccgtcgagggggctgtactggagcgctcacagccccaaccctggctgccctccctcagtctcagttccctctttcgaaccaaaagacgcagtgggggaaaggccgcttctgctcctttcgtgcccagcccgggtcagagcattaggattagctggccacaggcggcgaactgggctcaggccgggagctggggtcctacggtagaccccagtttggagaggttaggagagggggtgttgacttccaaaagctggagcccccagacgctttgcctcttggcttctctcctgtcaggccccagtgagggcacctgctcggacccttagagtcccctctggaactgcgagtcctcccacctgcccagactccgctggagagagggccgggccgggcgctcgagtgcctcccaacagggcagcctccctcctggcccggtctagcctctccgcgctctgctcgcccctgctccttgagctcggggtcgcttcccttggctccccgaggtcttctgcgccgagcagagctgccagtccaccgcgcctaggagacgccgagtacccgcatctgaccgcaggaccccagcgctaccaagtgcctgttcttggacccccagccgagcagggggaagcatccccagctcccgcacccaagtccctggcgccgctgccgggccgccctccctgatgcccagcgcgcagcctgccggcgccgcgccttctggacggctctcgccgcacctcctgagctcagcccgcggccccgcagtggggcggcctcacttactggcggggaagcgcgggtctgggttggcgccgtaccatccggggccagaggcgctgttcctcatggtgtcctggtacggcggcagctcgctcatgttgcccaggttgccgttgcagtagccccccacggcggagtgcgagagctggggcacccccgccgccgtcatgtggtaggcggcggtgacggcgccgtggtgccccacggcgtgctgctgcatggccgctgttggcggtgccgcctggccctgcctgtacgccgccagcggagccccgaggccgccgccctccatgcccactttcttgtagctttcctccaggggactcaagatgtcagacactgagaacggagtcgtgtgctttggactcatcgacatgattcggcggcggctggaggaggaaggaagaggaggaaaaaaaagggagagggggaaggcgaagcctcgctgctttttttttctccctttgccaaatattctggtgttaccttaacgccgatcttgttggatgtacacgtaacggagtggaccgagtcctccttaattggcttgagtggaggctcgggggctgcctcgcgtttgttttagcccggcgccaggttttaggcagccaccagaggcggggcgtaagcgctaaagcaacaagacaatagaagcctacatcttgcccgagataattagcttacatgctgatgacaaggtaaacacctttaagtttcacttgtcaggatttttaggtctcaaagagagagagagagaggcagagacgagacccaaagcatttcccccctcccttggacacccccacccccattttttgtggggtaccagcggagcgcggggaggaggtggaggggaggggaaggaggagggaaccgagagcggggagggcaggaggtggggtgggggagtaacagaggaggagagatggttgagaggaaggaaggtgaatgctgctttgcaaccaacttgcggagttacaaagtggaaccactttccaattcggtcggggttccccgggcacggacaggtctttaggaggagggggctgagggacagggtgggggtttcacctgagcctgccggggctgctcctccctcccgccgcggcctcccagccccgcgccttcccactgcctccggaccacatcgggcttcgctgcgctgagccccagtcgccaacaaatgagcgagcgagtctggggacgaaccctggggccgcactgttggtctacgtgtctgtcagtctgtctgcctctcttctgccgccgtcagagggacacctctgctccccgccccctttccccctaccggagagaatccgagcgggcggagggggcgctgagtaggggatcgactgcctcccggaggctgtcccggatccccgagccacaacccgcccccgcagctcaggggtttttcagtgggccacccccgctaacacgcctcccccaaggtcttccccccccccccccacccccggccgagcaaacacagcactggcccccagagctgggaggatgggaaggggtctcacgggagggtccgtcactgaagttgccccacctcgaacaaacctggtgtccctgaccctcgcccatctcccagacacgcggggatctggggctggagctgactttccgaggacatcacagccccagcacccgagcccagagccacgctgttttcccctctgatgcttcagggagcgcgcgagcagggagcggcgtgagtgcccgtctgtctgttgccgggcggaactgagcctgaaccccggcggctggagcgctggccaggagggggcgaatgccgaggtgcgggcagctcagcgggcgggaggctgggccgaggctcgcctccgcccgcagctcagccatgcaaaagtgctcttgcttcccgggaataaccaaatatctttgtttaaagtggtggcgtaaatggccagtcgctttgtggccacgctggatattagtagatgaggatcattctgcttcaattgggcgcctctcatccgacgagcaagaaactgcttaggaggaagagggtttcctgtctgcgcgttcccaggcttcaagtgtgggccccgcgccttgagggtccttgggcgcctggcgagggggagctgtgggctgcgctccccagcggaatcgggggtgtcccccgcgttgctccggccaggccggggcctgcagccgagtcgactaccgagtggagcactgaacggcgcggattttgagaccgactccggtttttgtccttggattttaaacgtttttatcattgtttttgttttgctttctccttagctgttttagtctcctctgcgcgccaggggctgggagggcggagcgctccccggccggccccggcaggtgcctccaagacacccgcgctggtcaaggagcttcttgaatttagtttttgttttcacattttctttcccctccttgtagagaaggagctcctgatcatgacgaacaggcagttttgagctacttaattcatccgggctccctttttttattaatagcaattacagtagagaaagttttatttatttttaaagatttcagccctctccttgaagagagctcttactccctcaatacaaagccaacttctataataacattcgcttttctcaccgcctaccttctttaccagggtaaagaaagctcaggacaccctccgccctcccacctgcgcccgcgtttttgtgc

SEQ ID NO: 1241491 - DNA, 4001 bp, Homo sapiens
gaggaaaaatactctattttttaaaaaaataacttgcttcctatacaaatcgctatttaaaaatatacaaataaggcccaagcataaaatctaactctggggctggcggtggagggaaggtgagggagggggctctggcacacgtccctcgtgtgtgcttgcgcgacggctgatgagggcgcgccagggaccctggcgcccaaggagatggggctgcagggaggcggacggagagcgttccaggcgttcggctccggccctgctccaatcgcagagcgcgctccaaagtcgagggtagccccaggtgccgccctgcggcctcaccagttccaggagaccagggcgggggatgctaagtgctggtaggcggggaagaggccaagcgccgagccgggaccgaaggcagggtagcccggcagagggcaggcggcggctggaggggcgccgcacttctcctgggccgcggcggttcccacctcgccaccgccgccgccgccgcacggctgcccgtcgcgaacaagcaccggcaccaccacgcgacgcagcaggccgggcgcggcgtgcagctcggcggatgctgccaggtcaggcgactccgccgcccctggagcgcgagcgcgcttcagcttgtagcgatgattctggaaccagatcttgacctgcgtgggcgtgaggcgaagcaggctcgccagctgctcgcgctcgggcgcagacaggtaccgctgctgccggaagcgccgctccaactccagcgtctgcgccttggagaatagcacccgccgcttcttccttttctcggcgtccgagcccggagacgcgggcctagcggacggccgctgcgacgagtctggcgggctggtctccaggctgctctcgtccgaggctagggacagcaaaggagacacgggtgggtgagacgccggaccctacgagggcctgctgcccttctggcgcgggcgtggaggcactggccagagggcacgcccactagcccgagactttcgggatgaggccatttcctgagtccacatctggacatccacctctccgaatgcggtgacctcattcataccacagcggtcatcagcgggcctgagatcgtgccccgaaaaaacccaccccggggccctcttaacatgtccgcaccggtagttgcgctggccgaccagtttatcacaagctgggtcaccagcgccggcctcctccaggtcgactgcactgcagtgtgccgaggtttgcggagccctgagtgggaacggggtgggggtaaactcgccaacactggccatcccagacggaggcctggagatcgtggccgtgttttcaggcatggagagggggcggggggtggggtgggggcggcaggtggcggcgcgttttaaatttcaattattccgacctctagaaatcgtcagacacagaaaccccaaatctcggagcaccagtgccaggcagggatctgctcttaggatgtgccgaccgggatgaatgcgttaggggttcgaggacagggctcccgtttccaagactgaggaaatctagactctgggctgggatttcggctttccggcccctcgtgggctgggcccttgattctgctgccccacgcctcctacctcccaccccgcaccgcaatccaccacgcacttacaagggtagtggccgcgctccgaatccagccaggcggcgcaggggtcgggctggggggcgcgtggttctggctcccgcctcggcaggtgttgcgcgtcctgctcgggtaaatctagaaggctgcgcacggtgaagctcaggcgtccagaggtggccatggccgaggaggggaaggaggcgggggcagggcaggctgggaacggaggggcggccgggacgccgctcctacggatgggcgtgggaggcgctcgccatgcgctggcagccgggatattagcgcatttacagcggaatctctgtttatataaacagctcttcccacccaggccgctttgaaagccgaggtccgggtctccagggtgttaagtacctgaatgagcactggaccagagccggggcgagcccggaaggtgccacctccgcccccgccccgccccgcaccccgccccgcaccccgccccttggcgcccagttacctcccagaggctgcaggaagcagcatttggcattagcgattctgtctgattagcccaaagtggggacagataatggggattgttaccagtgaataacatcttgggtggcgagcggtggccaccacccgcctgacccagccccagcttcctcctcctcctcctgggctgacttgaggccaggccccgcgggagcgccgggaagggtgggggtggcaggggtgggtttattagcacccaggaatttattccctgtttgctttattcttcgagcttgtttgctggagtggtagtttcccgcaattatccagaaagtgatttacaaagcggcgttaaactctggcgcgctccctttctctttttggttgggcccctctaagattcaggatgacaagtttcaggagggcgtaaagattagcctggccctgccagcattggcccaggggtttcaacggccgctgggagcctcggatcacaccatacatccccctaacagcctcagaggtgctgaggaagggctgggacaacattcggagccccagctccacgtctccacaggccggcaaaacagaagaggcttgtagccaagctacttaggtctacagtgcctgtctctttggcccagcttcgcccggccgctgccgatctcggagctcggaggccgagctccacaaatttgggtccaggcccgctttagagcccctgggcgggggcgcttctcagggcatcctgtgagggctttgaggcctccttggagtcgccagatgaactggtgccgcctgtgcgccttggccccatagcctcaacggcactctcactgcctgggctttggtctttgcccaggagcctgcccatggcctacgctccccgctcgcagcatggcagaccctgacgaggctgcccgccttggtccgggaatggaccgatcgggagaattaggacagggcctacccggcagaaaataccaccggccatgggtttctctgggatcttctagtttccacagttccaccctagaaaatgatcaatgtaggaggcgcagggaacaggccgccgtggatacattttgttgggccatggcctagctctggccgcgcttcaatctacagaggaacgccctctcagaggcctctcctactgaagctagtagtttggatatttagttgctaaattgtagcgaagggctctgtacttgggtggctgcaccagaagtcctggctcctcccgggctgaactcgaacctggctcggatgcggcggcggcggccctgtcaagccccgcgcaccctccccagcagcctccctatcaagcgtgcccgaggtgcccggagctgcaccgcgcgctgggtggtcgggcggaggcaaccccaatacaggccaactgctaggccgcggacaaaggggaaatggagctcgacgccccggacctgttggaagcatttgttccagtcaagattttgcatttgttcagtccggaataatgcatgattgacgtctgctcacaatgcgctttaacgcgccgggataaatcggagcttgtccggtgttgtcatggttttcaatggggttcaatgggattgggagcacgatcgactctgctggccgtctttccgcggccctggcaatagatttattagttatgtctttttaaataagattaaactgaaatgacttggctgtcctctctgcagacggggccggggcgggagcctggagtgggcaggggacagcggagtctggaaacccgccgcgcaccgctcctcagctcccgagcccccagcgtctagagagtgggcaggtcgcagactggctccaggcctcgtggacttatctctggccagagcccgaggcctggcaatctctgccagcccacctccct

SEQ ID NO: 1241492 - DNA, 4001 bp, Homo sapiens
caaagtgctctgaacgtcaaaccagaccaggtttgaaaagaagaggaataacctgaggtaagggccttgcttggtggtaagatgacctccagacaagtagatacgagaccatcctcctacttccctccttacctgcaatgtccttcagaaaggaggagctcaggtcctgaaggcgattcaaaaaggtttcagggacttcaaaatcagctggcttacattcctgagctggggtcttctgtgcttctgaaggaagattaagaacatgtgcagtggggagatcacaaactgccatccaggagagaaaaatttcacagatgaacaaggattccgcttggagatgcagaacagatgtagtacaactaaatgtctcttctggatgactgaactgagactacatttctgtcttaatttttctaagaaacttcaaccagcttccccatggtccacagaagacagttcaacctcctcagccaggtattcaagccattccaaaataaagcctcatttaaactcgctaactttatttcctagtttttcaaaatgtggatcacagctcaagactgtaccatgaaatcaagttagtggtctcaactagcattttttttaaatgaaatagagcagaatagttttgaaaaggaaaaaaaaataacagagtgggctgcatgtagtaagggtatagtttcctgaacttttgcttgagtccagtgtgtatgttacttttgcttaagtccatttgtatattaagtcatgcttaaaaaaaattctcctcctgcgtccattctaatagccttccccaaacacaactgtacatccctacctctgggcctccgcacacactaatctttggcttgctaagccctgttcagattaggacaggtcaagctaattcttcccggtcaagctcccccatgaagacttactcttctgtttactgtctcattctgaactttctaaattcttcttccccctaggtccactttcctcttgtaatacttaccagatgattgggaaccacggggcctggctctctcagactccagaatagtccctcctaacacctgaagcagagttctgaccacgaagctgccatgtgtgtctccacagtagacaagaaaatcatcacacacctcagcggctagtcccaggaccagctcctccagggtctccgtgggaccatcctttccatcctcctcctcctcctcctcctcctctgcagcactccccagcaatcgagggagctgtagcaaagcactttgtaatacatggaccccgcatcggtgacaggccacagtgcgcaagttagagcgcagagcagcccacacgcgacaaagcggtttcaagggactgaatcccaacagttcctgcagcatctcactgccagtcctgttcgtggacaaagctagggcctgagtctctacttccttcattatattgtgcaccatcagatctgaaaagggaagaaagacacactttgaagagacttagtagagaatacagttatgtaccctcgcttaaccaagggtcgtgggtcggaggccgaggaagaggacatgggaaatgaaactaagtccccacgccctgccgaccctagaaagtttccttgcctgccctggatttgatgctcttggtctaaaccccgaagttgctgcctacctcgttcttccccagtctcgggagcctctttcaatgctgacagcgcccggcggaaatatcccagagcttccgggctcaggtgcgggtgcgaatctggagccggctccgagcgcccatccggaggcggccagggttgccgcttacggcctggtaaggggcgccccgaccccttggccccgcgcccccgtttgccaccagctgggaaccggcgccccaccttgtgtggagagcgcggaccctgccccatgtgtgcttcgcgacctgtccggctgcaaaagcttccttaactgcggacggaccttcgacgtcgccaagcgtgcgccttatccagacaaagtttagaaacgcgggcgcgctcctgacgcagctactacgtcatagttccgcgccgccccagccgggcggggtgggtgtgtcacccagatcgctccgcccccatccgcaggttctaactttggcctgggactctgcccctctacctcagcacagaatcgccccgggtcctactacagaatcaatccttgaacactgcctccacgtcgccggctcaatctgggcgagaacccagacttccaccgcagccccgcaatctgcagacctcagcggcagcgcaggtggcaggtaagcggcgcacgctcgtcccacttagggcttaggatctccaggcttcgcgctcatccccggcccggaagctgcgcctctggctcagccggactgggtcaggccagggaccggagcttcagatagcccaggactctgcgtggacgcgccccgaggggctgccgcgccagattcccatatccaggcagccacactcagagggttgtagtagttgtccacctctggacagtcccactcagccccttcttcactctctgggcctcccaaaagacagtcagccttgtcctcaggcccgcacccagttgtcagcctctgactcctctcccctcaaaggattcttaccttggctcctcctcttagccctagtgaggttctcccctaccccccaacctcgccccaacacacacacagtctccaggcttccctcagagtaagtctttgcttccacagacctgcctcctttgcctgtgagtcatggcagctcccatgaatggccaagtgtgtgtggtgactggtgcctccaggggtattggccgtggcattgccttgcagctctgcaaagcaggcgccacagtttacatcactggccgccatctggacacccttcgcgttgttgctcaggaggtgagtgcttcctctgggaccacagttgcagaaaccacccgagagagcccttccacttaacagctcctttcctaatcccttacctgaaactataatactactcaacaagatgtgaatatttattcaaagtggaaattaaaaaccccgtaaataacttcaggtaaggtagaattttgccgccaagtgagttttatgaaaaaactttgtgtttgagccaggcatggtggcacgttcctgcagtcccagcagctactccggaggctgaggcaggaggatcgcttgagcctaggagttgagccatgatcacaccactgcactccagtctagacgacacagcgagacactgtattaaaaaaaagaaaagaaagaaaagtaaaaaactttttgtttgagagcagagattttggaattgcaactaaagggttgtggacctgtgctttcctctatttcaggcaagactttattgaactgcacattttttacttatttactagacttcagttaaataaatatttgagtatccatgatttgctaggcattggtaaaccactgaagttaccaagactaataaaatctaatttctgctcttcaaagattcagtccatggtggagtacagtggctcatgcctgtagtcccagcactttgggtggccaaggcagcaagatcacttgaggccagcagttggagaccagtctgggcaacatagctagacccagtctctacaaaaaatattttttaaataattagctaggcacagtggcctgcacctgtagtaccatctacttgggaggctgaggcaggaggatcgtttgagcccaggagttcgaggttgcagtgagctatgattgcaccactgcactccagcctggtgacagtgagaccctgtctctaaaaaaaaaaattttaattaaaaatgaagatagattccaacaggaagtcaggtacagaaagcagtcacttcaatgtaatgtgaatatggtaaattataagagggagatatgcacagaatactctaggggtgttggggagcatccagatgacataggagagtggctagggaaagtggtttgggaaagcgtcctggaggaggtaggtggttctt

SEQ ID NO: 1241493 - DNA, 4001 bp, Homo sapiens
atttatactttcaagcttggaattaaaatataaacatattctattattttgcagcactgtaaaaactgatgactaaattccagttgttattccaaacatggaaatcttccaattctatctgtggcaaaatgaaatgaactgaccctttaacaaaacttcagaggtttataagatgacaaaccttcacttaacatattaaaaaagaagaaaagcccaggactgtaaatagtgatgagctatatttatttgtcattagcagacacataaggactacaattagccattgcctatatcctacttaaagtccgcaaaacaaccattctcctaccaaataatccacccaaactgtggggtgtattccaagtcttcaataactgccaggaaataactcagtgtggtggactggcaaatctaactaatcctagtgcatttctttagcacttcttagtctaccgtgatctcgtttaagctcattaattaaaggaccttaagaagaattctgccaatactaaaaagcttaggagtcatttatattaaataggcttaaaagtgacaaaacaggtaatgttcctttcccaaaataatcacaacttttaaaacggaaagggggtggaagaaccaggaaaaataaaatgaaacgttttagaaaattaagccaactccacaaactttaatttccgtcaacttgatcacatcttatacaggagacaccccggtaaatccagctttcttaatgtgaatgaatgttccaaatgttgtggtgtgccactcaaaagacccccatccgtctacaatgcatatgctggagataaattcacctctgcttcgatgcattgggtgcattgttaagatgattccagtgcaaatgaagaagcgatatcggtcccgttaaaactcatcttccaaggaagcgcaggatgttaactaacaagtcaccgttccagacacccccaccctcgtatgcacccccctgaagacaaatcaatgaaatatttgcaccgacaatctaagtgcggtaagggcatgcactcatcaagattttgcatactacttgtggcccaaagcaagaggatggagagaggaaaaactctccggcgccccagtcattcgcaatccgctacccaagtgccatttatttatttattttatcagactgttaaacgcagcgcgcatcttcgggcggccatcacctcactccggggtcatcctcctcctcctcctgaatggaccttcttgcccaggtctaggatatttacatggtcaacctctggaccgattaaatggaaagataggtctattccgaaaaactggtcgccattttgatgaatgataaacacagaaatggaaatgtgtcggggacacctaggcgcggggcaggtgcaggggagggggcgcggggcaggggcgcaggggccgccgggttcgggctggaggtgtccgggccgcgggagggagggagggaaggagggagggaggacggcgagggagggaggcaggggcgggcggcgggggatggggccagcggggaggtggaagcgatacccaccgcccgtattggtcctcttggtgctgccggcttcagggggggcttccagcggccttttccgcgagtccggcgggtccaggtctatgggaaccccagtgtgggtcccgttctgctggatgggagctgccgccatcatgtttgcagttcctgccgctgctaccgggagaaggttctcccttttgttttggctttttcttttcttttttcttttttttttttttttttttttgcgtttggggtttcttaaggttttttttttttaatcggatcaatataaatctctttaggaaaaaaagcaatgttgctggtttgttctcactggggagggggcagggctgaggagcagctgcagtgcagtgtcagaaaggagacaggggaatggagggggtgtgagagacggagggtgaaagaagaagaagaaaggagacagggggagagagtggagaagggagaggggcgagtgaatgagcgggaggaggggaccggggaggacaggcagagggagtgggagagcgcgagggctggcggggcgcggggagaagccgaggaggaggggagagtgagggaaagagtgaatgagcaggaggaggggaaggaggtggatgccgagagaggagcgagcggcagaggagggcaggagccgggaaggagcgcggcggtccccgcgccgcgctagcgttgcgctcgctcccgctgctggtgctgccgccgccgccgctgccggagcggttctgccgttgcctgggctgctcggcgctgctgctgctgccgcccggtctcgctcattatttctcccgcttgttggggggggctggcggggagggaggggggtggctgtgaggggagggtagagaggggttgagttcgtagactcccacacacttcgcgctcgggtccctgcctctcagcagcgccgccgcctcccagcgccgatgcttcagccggcggggcggctgaggggtgagggggaactccgcgggcgggggcgagggagcgtgtgtgcgcgagcgtgtgcgcgcgcgaggggagcgcgtgcgcggtgaggacgcgcgccggcggttggggcgggggcgggggccggggcgctcctgtgggaagggaggggtgaaaggtcgctggtccccggcaacacggctcaggcaaacgtaagcggcttgtcgcagaaaccaaggggtccacgaaacgcgctaggctagaaggcgggaaggagagattactgacagccgtgccagccaataaaatagaaatgtgagaaaggttcttcgggccccttcccaatcaggaaacttgggtgatgaggggcagcgaaggggtggggtgggatcttggtccagctggtactggagcggcgacaattttggctagtctaagaagggcattcgagtgaccgttgacaacgggtgggacagcgtcagagctggagggagagccagcactgtatgcttccaggacttcttgctaggtgcattagtttttatttttaagagttgggtaaaagacattaattagttagcatctcactcatcggcgattttctacggtatgatttcatccaaagaggatttcttaatcgcactgtgtgacaccgttaggggacttagagtgtcactcgccgccttaaatcctttcgggaacaagccaggatataaataaataaagctaggtgtgggtcttcccttcacaaggcgctggtaggcagactaaagacaggcaacagctgagtgtgcacacagaactaaatattgaacgaaatacgagtgtcggaataaaattcattgccatgtgcacggcttatgattatacagatcttggacatatcacggacctgaacgtcaaccctgcaacaccggataaaacatctaatgtagctggaatagactctgaaaggacgttaggcattatctaaatcaagtccctcattttacagatgagtaaactgactcagtgaagtattttgctcaaggtcgttcatcaaattagtagtttaattaactcagtgttctaggaagcagggtagtagaaaagcatgggattcggagtctgaaatcttccttggtttctggtccttgtaggctgttttacaagtgtatcttgggcaaatcccttaacgtcttgccatttattaagggcttacttaccacgtggcaaacaatccactttgcatgctgtgtcaattacatgcagtatgtcgtgtagttattactgtccccattttatgaggtagtttaggtttaaagatattagaaatttacccaaagttacgcagttataaacattgtagtaatttcaaactcaggtcttcgtgactgcaaaggctgctgtcttaagtattgtaatacattagagctccggattccctcccactcaaaacagagactgagactccaaccaatttccaccattattgggagtcaaacgagagagactgtggcaatgtattctaagctgtacaaag

SEQ ID NO: 1241494 - DNA, 4001 bp, Homo sapiens
caatccctcaggcagcccccaaaaaggcagaacagtggacaaacattccatttttctttttccctccaaaggagaagccacaaattaggcattttctcctgatcacctgaggctggcttgaggaaagggatatcttaggtgaactgcaatggcttttcttacccctgtaaatgcagctgttcttggatttgtacctctccagggcactacaatttcttaagtgcttgctggaggtttcataaaggctttttggaccatatattgttgttaagttagtgtctcgaggttacagagtctggagcttcctatttcttcatcttactgataccaatctgagacagatgtcaatttttattgctattagatgtgagtgcattcctttcctacgatacacccactctttctagtttgctatttcaaatctgcagacttgagaaaccagataacttggctttttaagaaggttatgacttatacacataaatggtttataaaaacaaaacagtgttcattcagggtacaactttaaactacaaaaacaaaacaaaaaagaacagaactgagaaactaaggatgaagatttcagaccactatttccagaggttcacttactgttggtgctggatgtgtttccttggcgcaagattaacaaagtcagacttctgaatacataaggtatactttcgttgctatatgacagccttatatttgttctgtatttctgtaaaaaccagtgtcttaaagctctggattttgcttctaagcaacataagtcactctctatttaagccttctctcctggttgaaagagcattttctcttagtgcctgatccttccaaatataaaatgccacctgcaagtttcatatattgttttctcccagtcatattgagtaccaccaataggtttatgcatccttatcagtaagccagtcagtaaattcactgagaagcctgcctccttggacatgtgctgtatctataaacatgttcaattcaaatttggtcccaccatctaggaattaatctaacttcagagaaaaactaagaagtagagtgaggaggtgacatatgctcccagagtgacctggagttgcagaattcagaagcctaattataggtacctgcttcacacacatttcctatttaagtgtctgaagccatattgtagaaagatatcagaatcaagactggactgacagcttttctgcaaatcaatattcctggtttcaaggaagtcactggcacagggcctgtgaagtcccgggtagcttcctgtaagggagcattccactattacctcagccccaaaagaaagaactgattccatttgcattccttgccaatagataaggaatggctagacattagcaactgtggagggcaagctggtggtcatgatgactgagtgaatggatgaataaatgatcatttaatcaatccatccactaaaaggtaatcactactaatccatgctttattatgtaaccacagccaggggaccctggtatagattttcctgtccttttagaccaggagtcattgactctgggttggaaaagataggatgacaatccaccagccaaacttaccctccaatataaaaaaaatttaagacatttgaattctcagcagtgagattcttgtccatcttcctgaatttggatactcggcttacctcaaattatataatagtttgcagaagaaggttgcatgggcacaagcctcgatcatcagtccccgagaacggccctgcaaatacagccagatacgatcttcctctggaaccccatactcaaactgcagggactcaaggtcctggagcatgtccatttccaagccactatttcctgcagtgatagacactaatcaatttggctccctgtcccggtagaagaggggtctatgtaggaggtgtgtgtatgatggtgtgtgtgcccaggtcacaagcactcatgatgatgggcttcagcacctctctactcccagattctgaatttggaattcacctctcttgaattcacactctagagtgtgagtgtttgaggattcctaatcactggctgcccatgaatcctggactcatgaaaaacctgtacagaaacccaaagtattgtttctccacacaggttacaggcactgttttcggcagatgaatttacaacagcaattgagttttacaggtattcttgggccaggacgttttcccttccattccctcctgcgttttggaaataggactgaacacatagaaccacatttcaaagaaatgcttccctttcactaaactctgttctccacagggtacaaaataacccaaactaaatatcattgtcccctgtctagggcagggacatctagattttacaaactaaactcaaagtcatataaacccatctacatatatctatcaccaaacagagaagattggctctgctcctcagtacttctgatcctggaaggtaagaactacatttctaaggagaattaccaagaaacttgtgattatgactccttaactaccagattacagtctctaagtcttaaagaggccagccccacttagaggttttcctgagctgcgtatcaggacatgagttccttccactatttctaggagtactacactagagcagtatgagaccctccttttcccaacagaagattctggatttctaggggttttttttgcagactagaatatcttacagatcttagcactacttgagttagtttacaactccttctttttgtgttcaagaaaccaataaaattttttcaggtgaaatccacataacataaaattagccattttaaagtgaacaattcatcagtacattcagaatgttgtgccaccacctctatcttgttgcaaaatactttcatattcccaaaaggaacgcctacacccattaagcagttactccctatccctccccaccctcagcctctggaaccaccaatctgctttctgtctgaatggatttacctattccagatattttatataaatggaatcatacaatatgtgaccttttgtgtctggcttctctaatcccttttataggaaggctgttatatgacgacaccatctctttaaaagcaaagtctcaccctggcgtggtggctcacgcctgtaatcgcagcactttgggaggccgaggcaggcggatcgcttgaggtcaggagtttgaccagcctgactaacacggtgaaaccccatctctactaaaaagctgggcatggtggcagctacttattagctgggtgtggtggcacgtctgtaatctcagctactcaggaggctgaggcaggagaattgcttgaacctgggagatggacgttggttgcagtgagctgagattgcgccattgtactccagcctgggcggcagagggagactccatctcaaaaaaataaaaaataaaataaagtaaaagcaaagtctctgcacttgaaatgaggggcatggacgttctcatcaaacctaagaaacattttcttacaccaaaacagtcagtaggtcatcctaatgttgccaagtaatgcttcctgctccgaaggaaaaagaagctcaaaacctagattagcatgaccaatgcagcatacaagttgtacagacatgaattctaggcctatcctttacttatgcattctcaaaagtggggatcagttgttatattttgtattatgtcaccttggctaggctgaactgcaatttccagaatgtccttccctgtatgtttccagttaaggtggaccaccagagatatttctatgcaagatcaggagggtggaaatgaacagtaaccagtctgtgtttcagtgtgcataatcaggggaagtacttttgtagttcacacatgttgttgtttatctgctgagtaccttgttggtgaggggcaacagttgggcctgtaactgctacatcttccctggttccttcttcagttgctcactcctgggccaggtgtttttcatttccatgacaaaggccacta

SEQ ID NO: 1241495 - DNA, 4001 bp, Homo sapiens
ggggaaaggagggaggaggggaagggagggagggaggagggaaggggaggggaggggagggggaagaaaaccaattataaacctcagatttcaaaaagtattcatcttcatgttagataaaaaataatttttaaaatccttgcacaatgctctgagaaattattttttctactacaagagtaaagtgtgaattcttcatgaaacactgatacttcttaagaagtaaatactcattttagctgtatgagttgtcagattttctacagtttgggagcaatagttaatgctatacacatttaacatctttaaaaactggattatgtatgatttactctctgatatatgatgtttacagaatcatctagagttcagaattagtcaattatgtatctacttaacaaaagtatttccttaatcctgacaattgtgccttccctatcgtatgaaagaaataagcaacagtacaatagaagccttttaaatgaatggatgtctgaatatccccttatcgtcttctgatgtaagctataggttaaatattatgttgcatcaaaaataaaactatgttataataattaaatcttgcaactaagcacatcctttgtcttcttttcaagttcacttaagcctgtgaggaaaatcaacgcgcctgctgcgggtgggggtgcatatatcttactgtatttgttttcctcatgaatcagtgggtgacgtttcatacttcctactgcgcctttcctcttcggagacagaaagagatatccactttgctcaaaccaatatgctatatgcaattaatgtcattaacgttgccaattaatagtaaataggattccaaagaaagtaggctgggtggacagcaggagggaaaaccacgttggtggtgatggggagggggtgctgagttactctgaaaatctatcaatgctactcacgtagaacagttacgggtattttgaacacaaactccctttccctgtggctgtactagtttaactaacttcaaatagacatgctcgactgagccccttgcttggatatgcaattctcaccaggaactttttaaaacacagatccccaaacagtaactaacggggcatagatgctccaactgctgacacattttggatctcgctgtttgtttgcttatttggatttgagggttttcttctttatttttctttttcctttgggaggggtatggagaggaggggaagatgagagcggagggcagagcgggagacccacaagttgccgagcggagggcgcagcccgggaggcagggaggcggcggccgcgctcctctgggctcggcccggcctagctgctcgcgcggagacggagccggcccctccgcgacacattccgggcctggcgcgagctccgcgctccccgcccccggcctcctcctcctgctcctcgcctcctccccctgctcgccgccttccctccccctccccagcctcattcccttcctcgagagcagctgctaggggacctgcggcggccccggggatccccggccccccaccctcgctgctgctcccgtcacacggcagcgccttcgcatctgtttgtttctttttctttttctcttttctgtttctttcttctttttttttttttttttgtcagtgagtcactctattcgccgagccgaggaggtgcgactgctcagagagcccggccgccgccagagcctctcgctgccgcagccgccgcggggacaatgcgcggggccccgggcgagcgctgcgcccagacgaggtccccgcgggctcgcggcccaggaggcgggcgggctgcggagaggggccctcggcggcggaggcggcggcggcgggagcagcggcccggcggcaggttcaataaacagaaaagtgttaccgttctcgcctggaaggatcctgctgaaagctgggcttggtgggcgccatcttcctgctattttttttcctctcttactttttgcctctctcccccctcccgggtggggggcgtgggcgggcgggggtgtgcgtgtgcgtggggtggcgggagagtgcggccgtgcgcggcgctctgggctgcccggcgggcggtggccggggccggggccgtggccgtggccgtggcggcggcggcggcggcggcggcggccgtgctgctgaggtggggaggctacggaaaagtagtggggccggagcctcgcgggcggccggccgtcccctcgcgccgccggtgctcccagccgtgggtcgccgcttccgccgccgcctgcgccttctcctcccgctgctcgcccggcgccgccgccgtccatgcgccgcagagcgcccgcggcccgggccgccccggctcccgaggcatgcccggcgcggagacaggcgaccggcggcggcggcggaggaggaggagggggaggcggcggcggcggcggggggaggcggccgcgcggtcccgcgggcagcccggcccagggccccgccgcctccgggttctcacccccgcgccgccacccgcccccgcccccgtcccccgtcacccctttctaccacccggagcagcccggtggcaggtggggcgcacaccctccctgcggggggcgcggggtctaggccgggaggagcgggaagggggaggacacgcggggggttccagcttgaccgctgtgaaagtatttctgggcattttccagctgctttgctccagagcgctctctcgtacgcagacacacacctccccccccttctctctctctctctctctctctctctctctctctctcaatttctctctctctctctctctctctctttctcgttgggggactgggaggctcggctgccggcgcaacaacgccactcagttgcagtttcaaacacttcccttctctggagtattgcagccaggaggaaagaaagaaacagaaaaaggaactgggaggccacaggagcgagctggggcaggacacagtcccgggagctccttgggggcagcggaaatcaatacggatggggggtgcgctggcccaagcagatgggcccaagagccccgtgggcggtgcagcagcagcacaagcaccttgtggctctggcgctctcagcagcgttcccaaagccggagcatctgcatcagtcacggacgtacaggagtgcagaccccagggttcacaggtgaatccccgcgcgtttaaactcacatacagaagcccctcccgactcgggtcccgggacttgggaccggactgccaccctctgggatctagcccagccgcaccccggtttgacagttcagcaaggcctagagaaaggctggctactcagtgcagggcccgggctagaatcctgttacctgggtagaccctggtcagagcgttttctccactaaaccaatcagaagcgtgtggacagctttttacgcagagacttgggtcagtcatgtgtcaaccaggcaagtagaaaggactcccaaagcatttccactttgaatgaatgaaagcgcctgatggaaaacatcagtcctgtgtgaggttctgcatttgactttaagcttaagaaaaaaataaagacctgaaaaggggtcctccattcggtctctacgactccagtaaagtagggctgggagttggaaacttccaaaggaacacataaatgtttttcgtggtagaggtgtttaatctgcatgatggtgtttaagttctctttggagtacactctacaggtaggagagaatgagaaatgaactggagtggagagtgttatggacaagatatacatgggctggcagagaagggaaaaagttgccagttcaaagttttggctccaggacacccagtctagggggtttctgcccgaagatgacaaatgagagaagcttgtagtctcccaagaggccactctttgcttgaaaaaccccccactcctgtcactcccgcggcggactcctcaaaagtacttaaaaataattttttggtaaaatgatatgtcaccattcacttaacaaacaaatccagatggaaa

SEQ ID NO: 1241496 - DNA, 4001 bp, Homo sapiens
ttaaaattaatagtgtcttcatccaaacgctggctactaagtttaatggagggaaaggcagtaatttgaagcgataatagctttcaagtgccagtctcctaaatcaatggaatagcatttaagtgttaatcggccagcactccattccttaatcaatcctgtcccctaatccccaactttgcttttgtctcaacatgaatttttatgacataggggaaaaagatttccatctatgttttcaacacatttcattgagcagttactattacctgggcactggatataaagcagcaaacttatgaaaccgcctttgcaaaaatcctgaggaaattaagacagtgaaagagatcaggactcacctacccatcttccttctaacctctaaactgtctttgttcattcctgggtgtaggctgaactagtcttggagaggaatttatagtttaaactctgaaacgaaatggataatagccctttcctgaaaaaccccttcttgcctggggaccggtctgcctttgtaggactaacaaattagctacgagtttaggggccacgccgcctctggctgtaagagtctgaacctccccaaattgctcctggtaatgatatcactattgtaaaacctaaggtcagtgcttgagatattttgcagatcctgcattccgatgcagcaaatgacaccacccagaggtcagcaagaagaactcacttcgactctcctatgattttatcttcaacctgaccaatcagcactccccactttccaagcccatacccgccaaattatccttaaaaactctgatccccgaatgctcggggagactgatctgagtaacaataaaactccggcctcccccacagccggctctgcgtgaattactcttttcgccactgcaaatcccatcttgataaatccgctctgtctaggcaatgcgcaaggtgaaccccttgggcggttacacttactctggctccccattctgctgcgtgactttaggtaggctacccaacatccctggaattcaatgattgattatacgatctccgtgcttcctttccactcatagatcttacaaagtcagtttcatgcctctttcattgacagttctatctctctatctccacctctgaacaacattgctcgagtttctgttccgacaattctatagactcgactcaatgaaggcactcagaatttctaccacctgttgtattttccaacaaagattccaaccacagcggcgagagggagttatgtatcacaagctgtgattagagacacaatgagatttatacaaggaaaaactgattaagaatcacaagattccaaagcccaaaggaagtcctatttgtaacaataaatgatgaaaaaggggaattgacttttgacttgtcagcaaaaacgaaattaaaagaaaagcaaaaggagttggaagggggaggcgggattccaagatacaaagcataaataaaaagaagttctgtgctccacccctccaccagagctggatacagcccttctgttgtccgccctacaaactttaggaaacttcagcaaaaggcccacctcctggagttcccaggaaccccaaaacacgcgttctaaggaaagaaacaaagttgtgcgcggtcgggtttcatggaggccggcgccttctcccccgacccagcccattccagttaggtagggtccaaggctcagcctggccgcccgagggatccgcccagcccagccccaggggtctcagcgcgggggtccggcggggccttccacagagggcgcgggaaccttgggcgggcctggggctcaccgcagtccttgaactgcaccggttcggcctgggcagcggtgctgagcgccaggagcaggaatgtagctgccaggaaacgcatcgcggataacgaagttccaagctcgggaaagaagcagcggccgcccgcggtcacaagacaaacctgtcggggcgggcccggggaggagcccagtcaggcgacctgtcaccagtaaccacagctgaggcccgcccgcgccccgcccccggctccggaaagccagctccagccctctcaggcccagaagcctgcagtctccgcccatgccatcccctcagaggcctgacccgcccggacccacctccgccccgccccgcctcactcctccccgccccgttccttccctttagagcacctctccggcttcctgggtgcgtccccgccgctgccgtctggagcattcctagccaatcagacaccttctcctcccgcactacccaataggcatgttgggggggcggggcctccgtgaagtcccggcctcctgttcgttctctccgcctcccgaggccccgggtgagaaacgggggagacgcgaggggcggagcttgtggaggaagatggctgccgcctgggggtcgtccctaacggccgcgacgcagagagcggtcactccctggccgaggggcaggtaccaagactagaaaggcacctggaaagggtgtttggttctgcgcctctaggacaaatgggaaactaaggcctgtgggggatgcgagggtttggtgggaggccgtccaggtgggggtcgccaggtttagcgtgaggcgctccaggtcgagggttgcaaggtgccccttctgctcccgggctcaccctcctcccttgcgcgcaggctcctcacggcctccctgggaccccaggcgcgtcgggaggcgtcgtcctccagccccgaggccggcgaagggcagatccgcctcacagacagttgcgtccaggtaggaggccggacgcggagcggcggtacccaggcgattggcgggagcagcgggaactgctcttcactcagccctttaactcccgtttcccgctattcttgatcccccttcctgcatttcagaggcttttggaaatcaccgaagggtcagaattcctcaggctgcaagtggagggaggtggatgctccggattccaatacaaattttcactggatacagttatcaaccccgacgacaggcaaggaggaaggggtgggcccccaaaggaggtacaggagggacaaaagtgtctccagtttaaggtgcacttttattccaaatttaaagggtttacctgggatggttaacaccgcccgtctcacagtgaggatgcagtaaaggtttgttgttctgaatcaaagtaactaagttataggagcaaaattgatctgcccaggtccattgggtagtcggtagaaagtcaggccggactagattccaggcttaagtccctacacgtttcccagtatttattccattgaatcattttgcctcaaagaaaatcagcacctgttaaaggtaatggggaagctccctctgtactttagaaaacagaggatgtgcacctctgggctcagggggtgtcttttttgtgtttgcgatactccttaatgccttcctcctgtcttttcagggtatttgaacagggtggggcaagagtggtggttgactctgatagcttggccttcgtgaaaggggcccaggtggacttcagccaagaactgatccgaagctcatttcaagtgttgaacaatcctcaagcacagcaaggctgctcctgtgggtcatctttctctatcaaactttgatgtgatgactggtgactctgggattgtcaccagttgtaccaatttgaagaacctggaattagtagaattctagaagtttacttctaatcatgtccctctcaattttatttcccgcagtccaggagtgttatgttttgccactattattttcagaatgtgaagattttactcttggcttaatttttccctccactcagtgctaaggctgagcctccagatgctgttacctcagatttaatcactggttgaaactccgtataatctgtagagcctccatggctctaaaatttggaattaacttctcttgccttaagagctgcttgtacatatgtggatagctatgtataaaagcttcattttaaagaaggttcttattgtgttg

SEQ ID NO: 1241497 - DNA, 4001 bp, Homo sapiens
cgaaggctgcagtgagccaagatcgtacaattacactccagcttgggcgacagagcaagacttggtctcaaaaaaaaaaataaataaataaataaataaaaagaagtaattaatcctgcagttcacctatggtatctgtaatatcccaccttgtactatacacttcttttaggtgcactcatgcattcctgcaacacgtaattattaagtaactactatcgatctgtacatccagaaaatatttattgaacacctattatactttggacctgtgctaggggctaactatgctacaatgaatagacaaacactgcccaacctgatagagattacagtctagtaagggaagacaacaattttacacaagaaattactcacaattatgagaaataggacaagcgcagtggctcatgcctgtaatcctagaactttgggaggctcagatagagaatcgcttgagctcaggagttcgagaccagcctggtcaacacagtgagacctcgtctctactaaatattaaaaaaaattagccaggcctggtggtgcacaccagtagttccagctattcatgaggctgaggcaggaagttaagcccaggagtctgaggcggcagtgagttatgacagtgccactgtactccagcctgggcaacagagtgagaccctgtctcaaaaaaaaaaaaaaaaattaggagaaacgttacagaaagtgtaggaactatattagaggatataacagacaggtaagactcaattgcgccctgtcacatatggcacataatttagaattacttttttttcttttttttttagagacaaggtccccccaccccagggcaggatgcagcggcacgatcatggctcactgcggcctcaaacttctgggctcaagcaatcctcctacctcagcctcctgaggagctgatactataggtgtgcaccaccacgcctggctttttttttaagagacaggagtctcgctatgttgatcatgatggtcatgaactcccgggctcaaactatccttccacctacaggtgtgggccactgctcctggccaggattaattacttcttaaatgaactatgtaccccaattttgaacaatgcagctctgctggaaatgtctgggacttaagtaaaatgtgtaaagccataacctgatacacactaggccctcaagaataaatgttagttattttcactgggtgctgtgcccctccagagagaaactgattaggttttggatactaatcccctagctctaggccgctaagtaataccaatctaataagcatttcagaaataagtataacaggaaaggaagtaatatgtaataaaaacattctgcatttgcatcaagggtttcctcgagatgtcgagtatcattattcccaatttaaagatgaagtaactgaggctcgaaaagaagaacaggacctaacaacatcgtacagaagtcccagctccagggcatctgctggtctttctccacccctccataactctacaaccttggtccagaacaggcctctgggccccagacctcggagggattgagcctttcccagaaggctttgcagcgccgcggagaactctgggatacaaatggatacacaaatccaaagcaaaagtctagacctgggcccgagaaacagcctcttaagccccccaggtgccttcttcggctcgtttgtgtgcttacctttcctggagctcccgccatcgggagcctcactaagccccgcaaaggctgggaacagcgccatgaccacaggccgtacctccgttcttctctatagggatggcgccggcgagcgagcgccggtctgaggacccctgccgtcgcggtgcactctgggaaatgtggttttcgcggcgctctctggggcttgaccccgaagcgggaggggcggggcccagagaggagggtcgtcaagggactggggcgcggcggggcagggagaggcagggcaaagcagggtggggcggggccaaggggggcggagcgaggagtgacgggttcctagtggttgggaccctgtgagaaccggaactgcgaaaaccggagaagggaattgttgaccgcgaaagggactaaggaaattgggattccagttcgacccctaaattcacaccatccttgctaactgggtcaacttaaacgctctaagcattactttccttatctgcaaaatattgagaagattaaatgaacatatttataaagggcctagcattgagtccggcccatgaaaagcacttaatatgtgttagctattatgtgaattacgactgcaagttcggctcaaagtcatgtgagatatccgaacttcaatcaggttaccatattaaataccccagaacaaggaaaaatggaaagtcccatcaagttcaagggtctttgatagttaggaaatacctgtctgtgaagcattcttgaccccggttcctcccacccaaaatctaatcacacttgctaccagaaatatagagagtaaaggaacaacttagaagactttgtactaccaagaaacaattagccaaatctagaatatgggaaattatagaaaacaaccgtgcttccttaacatatcaagggctttaagagggcaggagattgtaatagatacgaagatcttacagacacatcaagcaaatacaacatatttgtggcctcattataattctgattggacaaactgtaaaaagacctttttaagatagatggagaaataagaaggtaggcagagtacaagcaattcacaagtaattcttgtgaattctgttagatgtactaaagtacttatgtcactgaggtgacccttatttatttattttgagacaaggtctccttctgccacccaggctggagtgtagtggtacgatctctgctcactgcagcttcgaactcctcgattcaagcaatcccctcacctcagcctcccaagtggctggaaccacaggcatacaccaccatgtctggcttaatttttttttttttaatagagacagggtttcaccatgttgcccaggctggtctcgaactcctgggctcaagcgatctgcccccctctgcctcccaaagtgctgggtgcctgtgcctgagcaccccccaacccagcctgagattactttttaaagttcttatatattagagatatatactgaaatatttgcaagtgaaaatagataggtaaatgaagatatatttattgggatcctagggagttaaagatctttagttaggaaatacattataaaccagagatgcaaatgtaatcatctaatcaaggaatggatggactctgatgaagtctgcagacctgcataagaattaggttctatgagtccaaaatagacacccttaatgctttgaagtccctggcagagtacttacaaaaaggagcttagtatgacaataggggcagtaattcctgtatgtcttcaactttaaatctcaggttctgccaaaatctttgactctaagttacctcaattaattggggcagcatttgtctttcttagcagatcacttcaggtaactgggatggaaatagtctatcccaatgcctcctatctttccaccccagaaaagtaagaattaatatggaagttttaagaaattaaaaccataataataatgtttctgtaatacaaaggaatctgggtatactaggtatattgtgtacttacaaatgtataagagaatgttgctcaagagaccctcctcataagaacaactgaaagtgtataatcaagtaactgatacagactcctggttttaagttaaaatctttttgtgtttgttttgtttttgagacaagatctcctctctcgcccaggctggagtgcagtggtgcgatcatggctcactccagtctcgaccatctgcctcagcaccccgaagtgctgggattataggtgtgagccaccatggccggcagtaaattgaaatcttaatgaggtttaagcagtttcaggatatccaagagaatctaaa

SEQ ID NO: 1241498 - DNA, 4001 bp, Homo sapiens
cagccagtacagctcctccaggcctggccgggtgccctcggttgcccccaccatgcctggttcactgaaggtgggtgaaggaggcactgagctgtaaggtgtggagcccagtgaggctgtaggggggccaggtcggccctcagagggttcccgctttacctcaaacttcatcaagtcaaagtcattgacatattccatggccagggggctggggggcagggccattctggagctgggctgggaggagtgcacctgcaaagaggaggagaggtctggagcacatggaggccacctgccatcccctcttcaccaagtccctcttccctcaaagcccaagtgccctggagcaagagtttgggaaagccagagggatggtgcagctctgttcactgcagagtccccaccaggctgaagagtaacctttcagagggcaggggctcctgacaggggacaagcagctgaattcctgaaggaggaagaggacagcacagcctctcgccccactgatgcctcaggatctatgaaaagcaagagcagtatggcagtgctcccaaccctagtgctgagacatgccgagaggtctgtcatctcaagaggcatcattccatttccaagccatttttttaaattgcttaattaactgtgacaaagtgagtgtatattttaggacagtgggaaggcatgtatgctgtgaattttaagagccaaggataatgtgttcttatagctctctgtctctcaaagcactcagggaagtgccttgcctatagaagaccctcagtgtacatttgttctatggattaatcaatcaatgaatcccttttgtaggggcaagaggctttatatggaaaaaagaaaggtcctagaattagttctagaaagatcagaatcaactggccaccatctttcctcaaggccagtctctccaaggggaacagaccaagattgattttccttctattcagaacttgttacgttgtgtgaacttggcagatcaccttcacccttctgacccgttttcccttctgttcaatgagggcagttagactttgtaacatataccaaagagtgttctctagaacactgattctgaacaatacctatgaagaggtctgtgctcagataactttgagaaatgttgcctcctatccctacctcttacagatgcacatagcacaagagcatattaacctgagcaatcctttagtaaaccgtctgttcaagttcaacaaaaagtgtcctaaacttatgtcaccaaggaactctcctgtctgttatcaatcatggggcacatgttcacctgaggaacttctggctgggtgacctcagatacccttcccagccttgaagtccaagctctagtccagctcccaattccagtaactcccaccccacccccagaaggtgcgcggcatggagtgttcatccccagggcttagacttcggctccttctagatgccccaagcctaggtagccttctttccaaccacatgtcagacccccaggctctacccagagaggcaaagaggaagacccaggcctctctcttcctgttccagggcagggttgctgccctctctatggaacctgtcacccttgagaggacagaggggatggaaacagacacagattaaaggaactgggtcttggcagaaaggagatggtgagacactgagagaggtatccagaaagaactggatgtacagaaggagtagtggggaaggttgtttatctttctgacgtgatagcagtgagggacacaggccagtcagggtgggagtggagtagggtaccaaggtgttaggattcttgaaaacagacaacagagagcaggtgttaaagagggggttctaggtgagcggcctgacacccaggtaggccctggatatactcacttcagaaatggccgagaggatgtggtcagtgccagagccagacaggcacagcttcccaggagactgaaggctccatggagcagggcctggtgcctctgctcagctccagggggctgtgggcacagagcccaaagggcattcttaaagggccagctctctgaggtcatctgtggtcctgaggcctccaaccaataaggtaaggagatcatttgcatatcttattggcctggggttgggggaaatggagagagaggagagtacaagtgtgcttattctcaaagaaggaaagggagcatcttccccaacaaagctcctcactgatgatccgactcccaagtgctcagtttcccagttcggacagaaacatgggtctgaaccaccacccctctatgtgaacacaaccctcagccctagccatgcatagcctgggattggaaaaagaggaccagacaaactcccagcacccccaccttccaaggccctgcagcccctcatctgtctttggagactataagctctcccacgcccactctcaccgggccttttggatctgtttcctattttcaagaatcctcacatttctacctctgccccatcttcatgctgactggtcttatgcccctcatagccgtcgcatcagaaaggaaagcaacttttcccacaggggatctccaggacttgaccaccatattttgtctctcccattcttgctaatccagcttgggagaaagagtaggaaaaaagagaacagggaactctgttccttccttctgggcctcaagggacattgaaatctaatcaccaccagtccgtcggagacacttttgtaactggcctcatatgccctctgctttctctcaccttttccctgtgtgtgtctctgcccctctctcctctctcactcattctagttcccagatggctgaggggtgacctacattttcagcctaatcccctaacacctcttagagctatcatccctgagtaggagtgggaacagggatactaggaattatccaaggagatgtttaaacctgtccgaagctgtttaaatagggtctatggagttaaaggccacttcctaccttctgaggccacccaaatactcccatggggttaatagttcctctttctcaacacagaggcctgggtgtccatcagaccccaaaggtcatcacttataaaacttaacctggtcccagccttatatgttggggaaaagctggcagatacagattatctaagaaggtggtttctgaagtgtggtccccagagcagcagcatccatatcacctgggaacttgctagaaatacatgttacctgatctcaccttaaatctactgagtcagaaactccgggggtggggcccagaaatctgtgttttaaggcccttccagcaagtctgacatgcttgaaagtttaaaggccaggcacgcctgtaatcccagcattttgggaggccaaggtgggcggatcacttgaggtcaggagttcaagaccagcctggccaacatggtgaaaccccatctctactaaaaatacaaaaattagctgggcatagtggcaggcacctgtaatgccagctactcctactgaggcaggagaatcacttgaacctgggaggcggaggttgcagtgagccgagatcgtgcccctgcactccagcttgggcaacagagagagactccatctcaaaaaaaaaagaagagaaaagaaagaaagtttgagaactgcacagaatgcctgcagtctacccagcttccctggggaggcatgtatatatgtctgtctgtgcatgtgtatgtggtctctcctaccatgctttccatacacatattggaaaacctagatcagatgacatcactctcttcccacacctgggtttctgttttaaggagcagaaaccatcgtcaccattcaagcttctctgtgtgactgcctggatctactgctgttttctcaaaagaataaaaaagcctaaggcctaggaaccaaccacaaaatgggaatgaggatcatggagaggcaggaccccacacacatgcccatggaatgtagctctccaaagtggacacccaggaaagagactctacaatttccctgg

SEQ ID NO: 1241499 - DNA, 4001 bp, Homo sapiens
gtaaaacccatcgtacctgtattgtgtgaacaagcccatctctgctacctaaagatgaaataacatttgcatacacggggaatccaagttactgtcatttacacttgggtaaattataaatgaacttagccttatcttacatattgcttcctttctgatagcaatagtagatgtgtagttttagagatagctgctttttccactagatatgtggacaaacataaagctgccaaattcaacacaaatggccacaggttgttaattatattttctgccttcttatgttcggctacttttccctgaccattaccacacaggctactttataacagttcaatcaacttcaggctgaaaacctgattcctgttgtcagctattcccaccccacccccactagctcccaagcaagaccacagcaaagaagggtgaaagcaaggtgaatgaatatttctccaagtacagcactgggactcacctgataagttgcctgtctccgtgggggtggagagagtagaaggttgcaaaagagagagtgtggtgtctgtgcagctatgaatgagggagctaaggggaaaagaaccctttagagaaaagtggagatggttgtcggaggctaggggcagaaaacactaacctttatgagaaagtagaaatttgcttccctcatggacatacgatgcttttcatcattttaaattcattttttttaaattcccttcccacctttgacactacctgcaaggctagtgggttagcgaattgctatgccccattaaaaggataaagagcagagagacctaccgtgtcctcctcgaagggaaacaggggaacgatagatagaaataggcactgagtgatgcttgctgccatggaaatggtgctcgtgctgagagtgagaccccggcgaggaagaggtggaggaggaggaagctacattagaagaactccatacagagctgacgatacatccccagaacaggaaccagatcccaagcgtccaggccggccggcgaggagggctccgtctcgcgtggattctcaggtgcatggtcaacgcacgggaccactacagatgggcagtttgaattccagccagtgaggagtaatgaagttcatgatgcccaagggcccatcatagcaggaggaagagttgccagaattcggggaagagggaagcaatatgcgctttccaaacaatgaatcagttaaaaaattactacttaaagaaagaaaaaaaaaagataaaaggcaaaaagccccttctctttcccggagctgaaatttagaatgccagggtcctcccaggtatagcaaacctcctacggagccccggcatgccacgcatgtcaggggaagaccggcgcggcttcctccggatctctaggcacttcgagtctgatgacttaaccgcacactcccgggagccacacagaggaaaggtggcaatgaaggaagagaaggaggcagcccgaacccaagtgggttcaggtgagtttatcccaacatccaaggagtttgaacatttttattttcctgtttccacttccatgagatgcaatgcagaactgccaggcaaaagggggctgcaggtggaagagttcttcgggtgttcctgggagtctccgcggaagggcgcgaggcttttaaccctgggcgtgctggactagcgccacggagcagccgccggcttcctgggtttcccaactggatgaaaaccagcagcagcagcagccaccgcagccagaggaagagaataagaaggactggagggaaagaggagaggaggaggaacccggtgcggagcagccacccaaaccaacgtggcacggggtggagggaggtgggtgggcgaaatcagcgagagcgcaagaggaggtgcctggcaggctgcagaggtggccgagaggcgggcgggcgcctgcgaagtgcgcggaccagggaggcacaggtgaagtgaagcgaggagttggggagccaaattcacaaatgggcaagtcatatgcaaatagcgcactcccgagagcaaatcagtgcagccccagcgctctgccgagggactggctggctccggaggaaggaggggccagagcgacccggaatcccggcccttcccattcaagcacaggctcgtatacacccgcgcgagcctccagcacacgccgcccgccctcctctcgctcgcgcggctcccgccccgccgtgtgtgcgcgcgtgtgtgacaccgacagaccgacactgcgccttctttatcacccgtgccctgctcttctcccaggcgcgtgaaaccaaactccagccatgaaggcaccttctcacaatttcggaggaaaagtaagggcggcggctaaggccgaagtagctccaaatagaaataaaaataaaccccttgaggcagcgcgagcgctggagctgctgcacgcggtggtgccgcacgcgcgctcctccctgcctggcggtggcttgggcgaccactctccaggcgcgtgtgtctcccggggttaaaatgcccagggcccctcccgcagggcgaatgatgggaatctgagtccggactcccaaaagtgaaggtggagcggtggcctggggactccaaagggtgaagggctccgtgattggcagtccttccagaaggtggctgccacccccggtggtggataggacactgttgggattcaaaatccagaggttatcgtccgcgcctgtagtcctgatcaaaaaacttcagaaggggagagggccaagtcggctggctcaaagagaagtgactggcgcctgtccggaactggctgcagaagggctgccccaggtgggtgaagtcccctgggcgctgggcatcaaagacagcacggtgtttacctcacgactgaacacgcaggggagagccagaatggcagcacctgtcctctgtcgtggccatctgtgactccaggaggggactgacccaaggctctgccaggacacggtaacactgtggactaggcggcatccacccctccagtatgtctcatgcgcaggaaggacaaacccaacaggctgccctctcaggccaggttgttgtccacacaggtcttgctagctttgactccctcctaccattcaccttgggtaaaaagcccattacatttgcagggaggaaggggaggtgagtgaacaatacttgctggttaaaacatatatatgttgtatttaggaggcttttttaaaaggagcttatagcacctattatatactccactctcatttcaaaccccctgaggataaagaacagggattaagacagccctattcatccttgagacaccccaaggaggtgttgaggaaacagcattatgtctctctaacaaaaagaccaaacctacaggtgatttgccttcaaggtcatacatcaagtccatttcagaatttatggcagtgaactggtattctggttctgaaattggtgtcctccaaaagcttcaagctgcccgtagtaaatgatgcacacagtcaccctaactgccctggctctcatttgtaagggtggtccaggatccacagccccccaggaaatggccctctgacaaggtcttgcatacttttgggtgtgcccccacgcagtgtcttaaaccagcagcatgctctcagggacaccacagcaaggggaaggggtggtttatggacattccattgaaacctcagtttcctcctctgtaaaatgaggaatatgcctccctctcgaggttgttgggggtttaaaatgagaaaatatacagtatctggtagagcacctgacaaacagtggcaatattctttgtccactagaaaaataagctgaagctctaaaaaggtgaagaacaggttaagtacatggttagggtcttatgctattattgctagaaaagccagaaaaaattcttaatatcctaaatatccatgataatttccactcaattcaaccactccttgatttagtccccaggtggatttccactgcacttttggccttaaggcggcctagatga

SEQ ID NO: 1241500 - DNA, 4001 bp, Homo sapiens
atattagctgagccaggtcgacccagcaagcatagcatctgtccacaatccccttggctccccgccaggctcccagccctgcagttgcaggaattcatcagatacccggaacccccccgccccttccccagcatccactctaaagccaattcaagttccaggcagcctgtatagcttgtatataaactgtggccagtgacaaacactctgagatgaggagggaatgatcagtgataatagtgtacttttgcagctgagaaaataatagaatattttattaagcaggatcggaagggaaatatgatcttcctgattcagtttcaaataggggaaagaaaaagtaagcaaagcactgtgaagctatgacagagcagcccagcctatggaatggagaagagccacccaattatctgctttatcacctccaaagggcaaaacattcaaccctccatgtatgactcaatcccctgcatgactgttatctgccctttgctagttttacctcactgggacccacagcagggccagaacattcatctactttactctaggtttgtagcatcaagcatgagattagtggaagaagaggttaaaataaatgcttaaatgaagttacagtaacccttacatttcagttatctgtagtccatgtcactgtagaaccacagaagatcaattgctggatgaagcctatatattttgtcatttttatccctaatgatgttaattttcattaaacttgtcccataagctgcctgaaattcttctggaatcaagtgaaacacaagacagagatgaaagtagacagacgataggcaggcagagagaccctgtgtttgtgtgtccttgtctaataattccacttgcagatattaatctactatttaacagaactcatttcttcataattatctaccaatcaacattactctcccttattactccatcttatcattctaagcagaacccagaatatcaatccgagcttatcccaaaagtatgtattttgatactaacatttaatcattgtacatttattgagtattcactctgatccaagcagtgaattgaatgaggcacagtccctggtctcaagccgatcactaacagcataataattatctccagggtgacattatgatttctgttagattctagagcagtaaaacagttgtttttcccatcatagtttccaattccctcattcctgacctttccttggacattcccttgcccccaagaaagccgacccaggtgcctccagaaattgggaggctgcaggcaatatctggtgcactaggggaatgtgtttgtctcagcccagctcaaaatagtatctgacaagcctgaatcacacaagttctgaaaaactcacaagaaataacctaagaaatctatagctgcctcctccaatttcattccctgtctggctgcttattgacttctgcagcctgtattgacaacatgcaaccctgtttctgtctgcctgctcccatgcagcgacaacttaaaaaaaaaaaaaaaaaggaaaatagggaacatcacagctataactcatgccaaagaccctgttctggggccaggcatcggcctggaggcaaaatttccaagaaaaattagagatttattaggagaaaaatgcctgagtccccttccctttcttttggttatcctttctcttctctcagggccacagagttcatttggctacttcaaacctctgccccacatttaagcttccaaataccactttgcaccaataaaatacatccaatgtaaggcaaatggggaacagcccacccccaccgcagctcacatatcttttctttttaaaggtgagccgaaagacttacctgccaagctcgagttaatttcactgcaggaatggaagtgcagagtgcatatccctgagaaagcacaacctcagggggcagaaacaacgaagagagggaccaccacattcctcaagccctccagtcctgtgtctctcccggagcaattgataatctcactaacacctacaacagtgtgcaggaagctgccttcctaacaccgccctcggtgttcgtgattttgcaactctctcacccttcaaatcttagtgcagcaccggcaattagaaacctgcacacatctggggcccgggacagggtgttttgtgcatacactgggagcttcagccagcaaagaggactctcagcagcctcatcctctcccaggggatttatttgaatctgcagattgtgtcatgccaaacctatctcttttctcagtgtgaatcactgactcaggaagtcacatggacctaagattcccagaatgcgagctctgctctgggaaataccaggggtatctactctactattagccacaatctttaaataactactttgatcagaatgcatgactaaagaggacattttgaagctaagttgctactgcagtgagcagaaaagaagtcagggcgaaagccggcagtgtttctacagcagttacctggggccccttcttcctattggctgattcatagtttcaaggtagctgcaaaagtttggaatattctgtagtaaatacaggagtcttgaaatccccttatttcagatccaaaacatagccttcctaaatccttcacccaatcccacggttagctgaacaactcaaagatattttggattgaacctgtcatttctttgctcccacctcaaacaagaagcagaaatccgggggcagaatactatatatggagttgtcttcttatgatgccaacaaatatagactcagttgttacccataacctctcacagggagagagcatcatttgtaaaattactccttaatagtgttaatattaataatagaagcagctgatctttattatgttgtaaatatgattcatagtacttttcatgcattatcttatttagtagcccccaaatcgtataagatatgtctaatcagtattctctccattttagaaatgagcacaggtgatgttagagatactaggtaacctgtccaaagtcacatggttaagaggggatttcaggattagacctatgtgatttcagaacaaatgacttcaactgctcagctctactacactaagtaggtgctcagagtagaccctaaactgtttacatcttcatatttgaaatatgtgaccatttatgtgtgattccactttactcctctgctatatacaatggcttgttaaggacatcaccaaacgctccaaagtcttagaaggaatggtaaagattcttaaaagaacaaacggcttttaagcacttgggcagcacctactcacttataattcatataaataggaatttcctaagaattattatatattcaataaaagacccatcaatccacttagtaaatctttgttttcactactgaatgttcttgaaggtgattttttaaaattccaagtaatcacttattctgacttttcactaattcagacttcttgctatcaagtgaaaaggtcgttgcatgtggatcttttcttcaaagatgctagtttattaacacacataacatcctcaagggcagatagaaagtaccattttcctcattttttcaatattcagaagaacacacatagatcctatgcaggttagtggtgcatagcacacaatgtacaatgtgtaataaaccgcaccattcagaacagttaatcatccattcagtgattcatcactcaccacatgcagtgagacagaaacaccattttaaagcatgcaataattccctttttaaagctgtacaacattggaattcagcaaacctggaatcgaatgcaggctctgtatcttactagtttgatctagtcaaggcattaaaaattattaaaacttagaaactagtgagtatgttcctctattgtgtattgcctttttaactataatgaatagtttagctggttagatcaagaagttaagtatgagttatagattgaatccttatgtgggccagccagctttatacaagttaga

SEQ ID NO: 1241501 - DNA, 4001 bp, Homo sapiens
actctatcaatatgaatttcacctcaattttttaaattaactaattaagaaacattcttctatcagcaccaggtaacaccctagatattaatagtttctgctcagatcttcctcctctgtgccccacttaagggaacaggagggactgccaaaatatggacatctaaagattaccgtaagacttcttttccctagctttagctacggactggtgattctggaaaatgtgctatgagatgtctgcaaaataagaataattaatgctttaattgctcacagatgcttttaatttttatgtctgacaccaccactgaaactgcatttcacttggcaatgacatactaaaatactacccatgtcttcatttctatgacaagttcctttccatcactaagtaggtaaacggaaaattagcatttgttattctgttgcatatatcagcttgggggctaacagacaacatcagaaaccagtggaattatgcctatccagaatgatagttttcattaacgtttcttggccgggatacccttcagctgcacacaatgttttaaatagcctaatagaaacatgatacagatatccttttcctccttaagtaagctgtatttttaatcatttttaaagaaaaagcgtatgtggagaacaggattagacgcattggtcatcctttatttaagccaccccaaatagcccaaaggacaactagagccttcatcagtttccatggtgactggcaaagggctccatcacactccagataacattccagcacaaatttgagagcaaaggcttttccagggtttggagaaggcttatgcttccttatctactcagaaaaaagtgaaacagcaaccctatagccatgcagggaacctagacttccttcaaagactacctgagtactttccttccttaattcaagaatgttacattgtttaagagccacaggcagtaatctaactcgtcagttattgctctgagaaaatcctagcttgttatttgtcctgacagtaataaaatcatcttttaaagcaacagtaggatacagttcttcctcccaactcaactgaaaaataggcggttgtactttatcattcactgaattacaacaagctgcccgctctctttaagtggccattttaagatttttacagaagtacaaaggagacttatgtccttttggaagacaagagagagagactttctgaagaagcttcttcagcaatccattttctgtaaaattagttgatgtggttaatttggcaaagcatttgagagatgaaggagaaagcaagaacatggtgagagtttcaagcttataatgagttttgtcttattacatcagcaatatataaaggttctttaaaagtgttttccctttcatctgaacgctcattgacccatttctgcacagtggtgctgacccaagccctttcacatagtgcaattgccaaaagtgaaccatcacacattcctgaccagaaagaaacaggctggaatgaaatctgtcacgtgaaatatttcacagccaaaattaaagctttaaaatgccacaaccgaaaacaaaactgttctgatttcaattctcagagcccttaatcttaccaaagcttgttttaaatctaatacttgcccactttcctaaattttctggcatattagaataagagttcaaacaagtttttggggttttgctgtatatgttttaactgaaataaaaatgttgaagcacaagatataaactcccttacctaaaaccttctctaagcatagttctcccaagtcaaaatgattccttggtaatattatggacattttagaaaacccagtaatgcattcaaaactttggagaattctgccaaagtgtaatctgttttcaatcacttaccatttactgagttcataacaacgggccaggcaatagtggcagatgatttaagacgcagtccccgaccttgtgaaagtcatggtcactctaatggcatgagataaacatatgaaccaatagaggaggaaatgacattacttgaaaccactaaggtggctccacagaggaagtgacatccaatccaagacctgaaggatgacaggagctgggcaaagaaggcaaggaagacagccagtgtaaaggagcagtgccaacaacatcaagtacagagtgcaaaattaggcagaatccaacccttaagaactaagccaagcagccaggtgcggtggcccatgcctgtaatcccagcactttgggaggccaaggtgggtggatcatgaggtcaggagttcgagaccagcctggccaacatggcaaaattcatctctactaaaaaatacgaaaattagctgggcgtggtggctggcacctgtaatcccagctatttggaaagctgaggcaggggaatcgcttgaaactggcaggtggaggttgcagtgagccaagatcaggccactgcactctagcctgggccacagagtaagactccatctcaaaacaaacaaacaaacaaaccaagccaagcaatctcagcagaggcctgtaggccataagaactaccctacaatcaatatgaagaaccattatttaattcaaggtggatgagattaaacagaccaattaagaggttatggaaaactctcaagtgaaagatgataaaattcttagctaggttcacgacagtggagagaaagagatacttctcaaataaaaacccacttagtgactgatatatagaagtagagtgggtgagatgaaagagatgaaagacaaggatgatgttaaggtttcaaggcttttgatacccctcccatcaaaagggaggtctgtctcctccccttgaatgtgggaaggcacataactacttcaaccactaatccagcctgactaccaaggcaaggtcacaaaaagccatacagcttcctccttattcactgggacactaacttttagagctctcagccaccaagtaagtccaattacactgaggctgccatgctgaggaaggccatgcaacatggaacagccatgcaaaagcactgcaatcaacaatcctacctgaactaagccttcatgtcatttcagggcagctaccaaacttgtgagtgaaaagcctccagataagttaccaatgaaaagtccatttttcacatggaataggaagcaagaccatgtgctaggaataaggaaattggaattggatagaggacctgataaaagtgggaacgatttagaagagcatctgtggtaaatgacaagaagactgcagatagttaaggaatcatcaagccatatagagagcctggagcaaactggaaacaacaatctcccaaacagtctctaggctatacattaactaagataaaggtaggcctagtggtgcatacctgtaatcccagcactttgtgaggctaaaggaggaagacgacttaagcccaagagtttcagaccagcctgggcaacatagtgagatcctgtctctgccaaaaataaaaaattagtcaagcatggtggcacatacctatagtcccagctactcaggaggctgaaccaggaggattgcttgagcccacgggttcaaggctgcagtaagctataatcatgctactgcactccagcctggccaacagagcaagatactgtctctaaaaataaatgaagaaaaggacaaggacagggctctttccattttgtatcccccatgccaatcagagcacctaagagatgacaggcccttagcaaacatttggtaaatgaatatatgaaagtgtgtgtgtagatgtcacaattatcaaatattcacgacaaaattaaacaattataatgagtatttccatttcttatcctgaaaatattcttagttttagtaaacagttttgctttataattacaaatatagtttctgagcccctctctcagtgaacatgaaatgtgtgaattcaaatgcacttataaatataaaacacatttcttaccaagaattgcctttgaattgacaagcaaaaagcaa

SEQ ID NO: 1241502 - DNA, 4001 bp, Homo sapiens
tggtcaataatgggccacataggcaatggtcccttaagattataatggagctgctgaaaaattcctattgcctagtgacatcatagctgttgtaaagtcataactgtcttaacatcatagcacaacaaattactcataagtgtggttatgctggtataaacaaatctactgcactgccagtcacataaaagtgtaacatatacaattaggtacagtacataatactgggtgatggtgatgatgataataaaggaccatgtcactggtttatttactacagtatactttttatcattactatagagtgtattccttcccttattaagaaaacaaagttacctgtcaaacagactcaggcaggtccttcaaaaggtattccagaagaaggcattgttatcataggaaatgacagcttcatgcatgttactgtccctgaagacctttcagtgggacaagatgtggaggtggaagacaatgatactgctaatcctgacccatgtaggcctagcctaatatgagtgtctgtgtctaagtttttgaccaaaaaaaattttttaagtaaaagaaaaaaaaattttaacagaaaaaaaaagcttacagaaaaaaggatgtaaagaaagaaaatatttccgtacagatgtataatgtgtttgtggtataaatattatgagtcaaaacgttttttgcaacttaaaaagtttatgaagtaataaagttacagtaagctaaggcagatttataattgagagaaagaaaattttttaaataaatttagtgtagcctaagtgtacaatgtttataaagtctacagtagtgtacagcaatgttctaggcaatcacattcactcaccactcacttactgactcacccacagcaactttcagtcctgcaagctccatgcatggtaagtgccctacacaggggcaccatttttcatattttacactgtatttttattgtacctttcctatgtttaggtatgttcagatacacaaatatttaccattgtgttacaattccctatagtattcagtacaataacatgctgttcaattttgtagcctaggagcaataggctatgccatatagagcctaggtgtgtggtaggctatactatctaggtttgtggaagtacactctatgatgttcgcacaatgacaaaattgcctatggacaaatttctcagaaaatatccatgttgttaagcaaaacatgactgtacatgaccttagcttatttagtttctaagcctataaaagtggaataattatacccatgttaaggactgatatttaagaaatgagcagagaaaagggaaactataaagcagaatgagaaagagaggataaaaggtagacgccacaagagaatgtagtattagggaaactttacgatcagtagatcaaatagtataaagagatcatttaaaataagaattgaaaagtatatacaggaatttttaaaggcatctctggtgacccaaccctgactaaagcatggtagagctgaatataaacagaagtatatggtagatgagggagtgagagactgatttagtaaattctttcgaagagtttggcttaagtgagaagaaagtttaggctggtgtttagtggaagtcatagagtcaaggcagtgttacttatttctcgtttgttgttttttaaaactgggaaaaacttatacatcataacttaagatgactgcagctgcaagtaacagaaaacctaacaatgcttaaactattagggcatttattatttacttttttaaaaagtctgaaagtagacaactctgggactttttatttgtggtatggtgtggatgtttctcccctccaaatctcatgctgaaatgtgattcccaatgttggaagtgaggcctgatgggaagtgagtggatcacgccagcagttccctcatgaatggctcagcaccatcctcttggtgataagtgagttctcgctcggttagttcacgcaagatctggttgtttagaagaatctggggtctcccgcctgtctctcttccttctgctgtcaccatgtgctgcgcctgctccccacctttgccttccaccacgattgtaagcttcctgaggccctcaccagaagcagatgctggcaccatgcttctttgtatgccctgcagaaccatcagccagttaaacctctttgcttaagaaattacccagtttcaggtattccttcacagagatgcaaaaagactaagttgttgtttttttttcaaagtctcagagatatcatcaaaggccaaggctttggtctttctatcttcttgttctgccacaaaatggctaccactgccaagttgatcatgtctttatattccctacaaagaaagaggaagaacaaaacctgcctttctattaggaagcaaaacatcttacatagaggctatctccacagactgttccttgtgtctcattggttagaactggttcacatggccacactcagctctaagagcaactagattatcttttgactttctagacctacttttaagcagtaaagagacaggggctgggaatagtttctacatagccaatcagtactgtcttccacatgcatgtttaaatgctgatggaaaagagttagtaaagactaagaaccagatacagaagggaagagggcaagaatgaattcagatacagatacatttttaaggaggctggctggtaattgagaaagtttgcaccatataaatttaattttctttgtgaaacagaaaatggaatcatgcattaaaagtaaagggagaggtagaaggacagaggtcttcagaataacaaagcagattttaaatagttcctacggagaataaaagagagggctgcctagaataacaggtttctaagcaagagagaaaaaaaatagaagaaaaatttcctacgggttgttgagcaaggctagaaatcattaattcatagtgccatccacatgccacttaaaaggacatctctagcagcacccagcagcccaagcgtaagaatagagaaagtcgaatgctgaatccattctaaactggagtttatgggtttagagtaaaaggaatgtaccaatgggtttgtggcacaactgaaagggaaagatacgaaggagctgaaattatcagcaagccagtgacataatgtgccatatataaacatgttaggaaaaaaatgaaaggtacagaaagagtgaaacagtcaaggaatctgacatataatggccttaataaaagaactcaaagacgaaaaactatggtaaggtaattaagatgaatacttcaaggggataaaattcctggtgtgccatgagagtggagttcaagggcactcaagttgagaaagggaagaaactaaaaaggctagtgaaaccaacccagtagttttttaaaataaatatagaaattgacccttctggtcttaaagcttaaaactaacgtttgtcttatttaagttcctttctcaggaaatgatcctcagccttctcaaaaagtatcaaagaactgaaactcaccagatcaccacatccagacaatgagatggcagacccttcatccatcaggttgctcccttacccctccctaattcctatgttcctaagtggtcacctgcttctcgttaaccagttcctcttccttacccctccctagttcctgttttcccacacataattacatttcttccctgctataataaacccccaattttagttggtcaaggagatggatttgagactgatctcccattgtctcagctgctgcacgtgattaaagccttcttccctggcaatactcattctctcagtgactggttttctgtgcagagagccacaggacccagaccaaacccctgatgttttggtaacactggtgagaggtgacaacatgctaccagccctcactcactcttggtgcccccttggcctcggcatcctctctggctgcactcgaggagcgcttcagcccgccactgtgctgtgggggcccctctc

SEQ ID NO: 1241503 - DNA, 4001 bp, Homo sapiens
atttcatggcaacaatcatcttccaactaaaaataataaacaaacaatcttaaacaagtgccagcctacagacccaacaaattacaaaacgcaaagaacttatggctacaatcatgaaaacaccttccatccttatccagttcaagtaatcacagagcatgcaaaaggattcaaaccactgaaaactgaaaaatgtactccaaaaggttctagaaccaaaaactaagagcttctaaattttaaaaacaaccagatggattgtaaacctttaggaaagaaaggaaaaatgtgcaggagagcacatgaattcattaagaacagattattaattttttttaacaatatggtatctatcaaatagtaatggattagtgatccaccacaaatacaatatttggtaaatcttaacttttccaaaacatctgacaaattcttccagaattcccttctgataaaaatggggaaaaatgagctagtaggcagggcgcgatggctcacacctgtaatcccagcactttgggagggctaggcgggcggatcacgagatcaggagatggagaccatcctggttaacacggtgaaaccccgtctctactaaaaatacaaaaaaaaaattagccgggcgtggtggtgggcgcctgtagtcccagctacttgggaggctgaggcaggagaatggcgtgaaccccgggaggcggagcttacagtgagccgagattgcgccactgcactacagcctgggtgacagagcgagattccgtctcaaaaaaaaaaaaaaaaacaaaaaaaaaaagttactagatgttttaaaaataacagcaaccaattattgaacactagtaaacactaagctaagtggttagcttgtgcaatttgaataaccatcttatgaaagaagttatctccattttacagttaagtgaactgaagatttgctgtacaatctgaccactttttcctgagttaaggggtgggagacccggctagtacctacttttgtctaactccaaaatctaagcgtctacccgctaccaactcctgaaactaaggaatcacatgttaggaacttcacaaataaatttttaaaacacaaaactataatttcaatagtgtgcacttgtctgttggcataagttcttaatcaggaatagaattaatatcctataatacctgctgtagtagattttccgactccaccctttccagaagccacaactataacttgtttaacaccttctatcggtttctgctttggaagtcctcgggacatgatttgtgttcttctttgttttagggtctcactcccggcgccagacaactttaaaaaataataataataaaaagccgttttaaataagccatctccatcatcacactgtaaaagcaaaaacaatctggggtttgcaattaagagggctttcttttctaattctgctcatcttcactatggagacatttacctactactactgataacaattgtaaagacacattgcttaaattgaaatttttctagcaggatacgctgaacgtttaaaaatgtaaaaacgctgcctctttacggagataaggcttccacgtgttttgcttttcttcaatctatttgataaataacccaaagccaagaaagcaatgtagaataccacatctacgttctaactgtgtttcaagtcccgccacgcctcagcctgggcctgcctgaaaagtaggcacgtccagcacactgggggtctcaggaactgaggcgagtctttggcaagaagcaatgccagggcatctgcggccctgcagcccagcatctgtcagcccgcttccccctgccctgcagcaccacggacctggcgcccacaaaccatcgctcggcttcccccaagcggggcagtggccccgccaccagcccggagcgacaccccaccaaaaagcagcagacgctgccaaatccccatgacgcggaacgctgctgtgagccctgctgggaaactgtcgcgggtggcgcggagtgatgacgtcacggagcaacgctcggctttctcttcctagcaaccggtcttctttgggtttgttggctcaggaacccaatctgcatgatcttgtttatagccagctacaaacattttgcagcgttttactaaacgtttgtgaagtgttgtcatataaaacatctcttatgatacttacagaagtcccgaggtagacagaagacttacctagtatactctttttatggacaagaaaacggagaaagtttaaagagacttgacccagcttaacaaaagtaggaaatgggggaccttgaaaatgaccccaggatttcttactaagcagtatatggtcatttaaatactaccaccgttaaggattttacctttttattttattttttcccgtgtgatctacagtgagagtctgttttgcgttggtattcatggcttgtgttgctgacagttccctgaaagaaaggtcaggttgctttaccagcaacctggtaaagaactttgcaagttcttccagacttaagactcatttatttaacaaatattcgttgagcaactactatgtaccgagtactacagtagacttaaaatattcagcattgagaccgacataattcctccactaaagggctttataatccagtgcaaaagacagaataagttaacaacaaaattgcggtataatatgataagtacaggagaaaagcattgagggatacaggagaaaggacaaagtgatacaaagaaagggcactcaattcaatcaggggaagcttctaaattaggtaatatctaagctgaatgctgaatctgaataatgtgtagaagttagctgggagaatggcaaggagattgttgtaaagaggttagaaatggactgctaaggctaggcatggtggctcacgcgtgtaattccaacactttgggaggccaaagcaagaggattgcttgagccaggagttcaaggatgcagtgagctatgattgcaccactgcactccagcgtgggcagcagagtgacaccttgtcagaagaagaagaaagaaggaaggaggaaggaggaagaggaaattaaaaggagaagaaagaagaaggaagaagaaagaagaagagagtagaaggaagaaagatgaaagaagagagaaaagcccccgcccggccagctgccccgtccgggagggacgtggggggcagcccccatccggtcagccgccccgtcccggagggaggtggggggcagaccccgcccggccgccaccccgtccgggaggtggagtcacctctgcccggccaccccgtctgggaagtgaggggcccctctgcccagccgccaccctgtctaggaggtgtacccaacagctcattgagaacgggccatgatgacgatggcggttttgtcgaatagaaaagggggaaatgtggggaaaggaaagagagatcagattgttactgtgtctgtgtagaaagaagtagacataggagactccattttgttctgtactaagaaaaattattctgccttgggatgctgttaatctataaccttacccccaaccccgtgctctctgaaacatgtgctgtgtccactcagggttaaatggattaagggcggtgcaagatgtgctttgttaaacagatgcttgaaggcagcatgctcgttaagagtcatcaccactccctaatctcaagtacccagggacacaaacactgcggaaggccgcagggtcctctgcctaggaaaaccagagacccttgttcacatgtttatctgctgaccttccctccactattgtcctatgaccctgccaaatcccccgctccgagaaatacccaagaatgatcaataaatactaaaaaataaaaataaaaaaataaaaaagatatcaaaaataaaaataaaaaaagaaagaagagagaaaagaagagagaacacaagaggagtagaaaatacatttcttttctggattgttaagaactgtaaatgatctgtgcaacttaggacaaagtg

SEQ ID NO: 1241504 - DNA, 4001 bp, Homo sapiens
acgcagcaaaaagctgagggctgcagctgcccctgggtggcagccagcgtccagcccaatgtcccttggccctgaggagatgccgcccagcccgagcctacatccgtgtccaccacagccacagcccgaaccagctcagctctggtcaccagaacccttcagcagagctgtgccggcgggctgcccgctgaggctgcaagggctgccctgaggcttcacggggagtgagggagagagtgctgccaccagggccacagagggcacctgcctgggcctgcacctgctgcctgagacccagccctgtggggactgtgcagccacaagcaggcatcccatatggccaacgtcagggaaaagggcagtgaccccatgtctccacctgctgtaccccgactgatcccagctgccccctgccagcaccaccagcttagcttcgccttggggagagggatcccctgtcctccagcgccaacaggactcccgcaacagggaaagtgaggggcacagggcctctctcaggctgggggccaagagggcttctccaggatggcgaggggcagagtcctggatgtgatgggggggacaggatgccccctgagggagggaggcaggcaggcagagaggcactgcgacctggaccacctgacctgataggctggggggctggactgactgtgaccaggaaggtggtctttgccttaatggcatgaaggagctctggcagaggggagatctgctgggggcaggtgggcatgcaagcaaaaggtggggccctaactggacagggctgggcttggaggaagacggcccgggactcagtgatccactggatgtgggaaaaggatggcagcagctccttcacccaacacatatgcctcatgcctgtaatccccatgctttgggaagccaaggcaggaggatcggttgaggccagaagttcaagaccagcctgggcaacagtgagacgtcgtctctacaaaaaaatttaaacattagccaggtgtggtggtgtgcacctgtggtcccagctactggggcgggggctgaggcaggaggatcgcttgagcccaggaggttgaggctgcagtgagctgtgaccatgccactgcactccagcctgggcgacagcaagaccctgtctcaaaaacaaaacaaaacaaaatattccttgtgaacctaccatgtgcctggtgctaagtgaggcaatacagcctcttgtgccgtggcctggcatgggagaaggtgacaccctaggaggtggggaaggctgagcttaggcagatggagactccaaggaggtgccctccctggaaaaaaccccaaggaggaagcctgctttgagaggctctctcaagttctcactcagctccttctcctacctccctgcgcccggcctctgcgctccttgctccctcctcctcggcccagctatctcctccttcaagtggtagcatgaaagccaccacttccaggaagccttccctgatccccagggcaaccaaggagttccactgccaagagggtcggattgggcgggcgggaaggatggggcccagcaatgcttccttgaaaggatgagtggtgccccctcagatgtccctcccgcggcccctccccggcctgggggctcactgggtctgggaacccgcgatccggcgggcggacaagcggccgcccgggagatcggcgggaggcgggggcggggctccggggcggggccggcagcgcggaagatggtgggcggggcgcgggtcgtgggccgggccgccggcgggggcgcgggggacgcgggggcgcgggctcacctggcggtaatgcagcgtgagcggccgcaggtagggtgaggcggcgcagcggcccacggacgccccctcgatgcgctccatggcggcgcccggacaggcgggggccgcgagctctgcgggggccgacacggggcggcgccctgtcccgacaggagccttcgggcgggcgcgtgaccgcggctctgagcatgctccgtgggcgcgcggggcggggcggccgaggtgggcggggcggccgaggtgggcggggctcgcaggtgccacctgtcgggtgccgcgcgcctcggggcgctggtcgccgcggtgccagggaagccgcgcaggcacgtgggcgtcgcccgggggaaggactggccgggtcgaccccggccgccgggcggggccagccgggccggggtacagtgcttgggtgggactcgggacctcttggctgggggagggagggcctggcggtggttggagctaagggcctgcagctttggggtgcgatgggccgagcggatgcctccccactctggggatggaccacaaccccgagattaagttactccaggggtccgcgggcggggccgggggcggggcagccccccagggagggagggactgtgggcccaggaagaaaatcacaggagaccaaagagagagggccctggaaggaagctaggggagaggagagtagggagctggaggggccagagcttgggccgagggggcctcccctcgaggttcctggtggcgagggtggctgggagctgccacgctgtctctggagctgtccctcctccactcaaaagccagctgcccttccctccccctgcaagtcctaccttgatgacggcccttcctgggtgtgggagggtcccaggcagcttcagtgcttccttgggcatggattccaaggaccccctccaaatgccaccacggcctccacgggggcaggaaacaatattgaggcccacactggccctgaaccctgacctgcacctgctttctgaactatggcccaggggacatgctcagggtggactggccatgtgagcttgaaatcgactcccagttccctgttaactattgccgtgtaacaaaacactcctccaaagcttagtgccttaaagcaccccgttatcgcctggcctgtgggttgcccagctcagccaggcagccctgtcttggggtctctctgcagttgtaatcaggtggcagctggggctggagtcgtctgaaggccaaacggggtggaccgtccaggatggcctcttcgcccccgccctcagttgggtggctggaacagctagggccggctggcctcccatgtggctggcgtgggcttccctgcagcatggtggtctcggggtagttggattctcccgtggcagctggctccctccagagcacgttcaccaggccaggccaagctgccaggctttgtgtgacctggcctcagatgtcatatggtgtcattcctggggcatcctgtgggtcagaaagtcctgggcctccggcagattccaggggagggacatcaccaggtgggaacgctggggagcacggtcatgaagccagcatccaagtccagctgtcaccgccccagtagctctacaggggcctgtgtctccctgctttagccattccgcctggtgtcccggaagccagagcgcccagcccagaagctggccccaccctaccccacagccaggcaggcctcttcctccggtgcacgaggggcccagggtaagcgcgcaccctggcatgtcgcgtgcaggctccttcctgcccgtggttgcatggaaaatgaggatgagtctcagcttccagcagcagcagccccgggacaggcagaggcaacaggagccccatcaaggagcccctgggagagccagcagctcctcaaagcaccgtgctcctcagactcactcgggtccaggtgtctggcagtgcagactgcagagctgagtgcctgaaaatatcagcaaggagcccactgtgggacgcagcctggcggctcctcaaaaagttaagcatagaattaccctgtggtccagcaactgtcttcctgggtatccacccaaaggagttgaaaacagacactcagacagatgcttcctcacagcagccaaagggaagaacaacccaagcatccgttgccaggtgaatggatccagaaaatgcagtgtagacgtgtaaggtagcacaact

SEQ ID NO: 1241505 - DNA, 4001 bp, Homo sapiens
tcaatgcaggtaaaaactcacaacattgattttataaattactaataaatcacaatccacagtttgaaaaacacaggctaaaaatgagtatcctttataataggatcttttaggcaatttgcctctacctgtctctttagcaggtattttaaagttgctaccattattaccggtttcattaaagtaagtggttcttaaagtgtggtcctctgaccaacgtgatcatcatttgagataaatataaattattgggccccaccccagacctactgaaacccccaggtggggccaagcaatctacattttaccaagccctccaggtgattttgatgcaagctaacatctgcgagccaggtctttaccttctatttaagaagtcaggtctttatcgtctattgaacaatccagtacacacgactatgtgccagtcactatcctaaaagctctacaaataccaactcacatgaaaaaaaaaacaccaccaccaccttataaagtaggaactattactattagtattctgatgaggaaactgcacagaaacttagctaagtggtggaactagaactcaaaacttcttttcactttagccgagtatgcctaccctctttctgataagtatttacttctactcctttagttcagctactcctccccttttccctcccaaattccccaccctgtcaatgaacctatttcctaatattactgccatcatcctaaaacaaatttcttttctaaaacaagtcacttaaccttgcttttaggagctttgctttggtcctagatgtcatcttgatattaattacgaaactgaagtttcttctatttgtgaagacctgtgaacctacatggctccactgttaatttctcatatatctactgtcctagccagttccacgaaaccattactctctcctcgggcaactttctttctctaccttatcccctcctatagggattctctcccacctccgcccatctccgtcccattttgcatgactcctctccgaccgagggaacttccactcccctgctggctcctcaccccggtctcaaacgcgagccactcctcgaggacttctttcctggtcccttagggatcctcagagccggagcggccaggccagttgggtctcccatcccagctcagctatgggggcgcagggagctccggttcttcccccaggcggtgcaagatctctactcgtccgaccctccgaagacctgctgctcctcatctctccaggagccccctcccttggacagccgcttttctcaggagggtccccaaccccctccgagcgtttcctcagacgcccctacttggagcaagtctgctccctgtcacccgggaccctggccaccctcggccttcctacctccctcggaccggggccactcccagttcccctgccccccaccccgctctctcctcaccggccgctgccgggcttcccggattccttttctccctggcacccaagccgtcctgggtattcccaagacaccccgcccttgaagcaggtcgttacaggtcaccccctctctgggaccctggccgcttccgtttcctcagatacctactcctcacacagtggccgccggtcagcgcgctagaccggagcagctggacgtcccaagggacctcctggcctgacccgcgcgggtccggccgtagcctaccttcctcgggagaactccgcagccagaagcccagcccctctccccctagcccagtcagcgcgaactcgccgccgcccccgccgcctccgccctggccccggccccggcccgggccccgacccgaagtccaggcccccttcctccggcctccgcctccggagtgctgagctggagattccgccccgcgacggcccccagatctctgacccgcgttaccggcactcacctgccgctgcccccgaccaactcaagcgccactgcctctacctcggccgccagtggccaccaagcgccaccacctcccccatgacaacaggcccaccctctttcatacttctaacctatccattggatagtggggcggcagctctcctctctgattggtttagtatacccgcccgtcatcgctctttaccgccccttttcctaaacccggtattcgcccccgcccggacctggagcgtcctagcccaagctttagttgtaattggttgagggttgggcaattcgaagttatgataggctgctaaaagtgtctgttaagctaactggcaagagacgtgacggttaaggttgattcacgcttgtgcacagtttggttgcgcagtagaaagcaaaggaggggcagacgctcacattcgtggttacccgggaagggttaagtctttgttgtagagttttctctgtaaacttttccacttctccagctcacttcctgcaaggagaagcttatctctgctagctttattcataggggtagtacttacaaaacaccaacattagaggttgtgtttaagaagtgtttccaagccctggggagaaaggtatcagagagataaaaatgtccccttcttttctttggtctcaatgcatccaatttcattgaagttctttccaggagcctcaatgctaaagggcaaagcgcaaactttcatttagcagaaatcagtcaacttcggttgcaattataaatgtcgtcaataaactgaagtggcgtattgagagttctccagcttccagatccactcctggctgacccctgccaattgaccagacagccattagcaactttttttttttttttttttttctgtgagacggagtttctctcttgttgcccaggctggagtgcaatggtgctatctcggctcatcgcaacctacgcctcccaggttcaagcgattcttctgccttagcctcccgagtagctgggattataggcatgagacggggtttctccatgttggtcaggctagtctcgaactcccaacctcaggtgatccgcccgcctcggcctcccaaagtgctggtattacaggcgtaagccaccgcgcccggccagcaactttctaataagcgggccacattataccctttatgatgctctggaaatgagaattctgctttcccccacctctcactgccactttgtttttctgttcagcagttcttaaatagccctactagctgtgtgtcagatactttaaaagcttctctctctctctctcttttttttttctaaacctcttcctagcagtctaaattagggccattgaatgaattgccgggttgtgtgtgtgtgtgttttttttttttcctcacttggcacaatgcacaagaataaatgattgcattttttattcacttgggtacaaatcacagtaggcatttttgagaaatctaatgttgctataaaaactcttgtgctcctagaaatatattcatcattagctttttgtttttccttttttttcacccacttttcctgctcctaaataacaaaatgctggtctgattactctttcagtttctaaatcagatttaaatgtactttctcacaaccccacctatgatacatatacccatgggccatgaaacaacacccagggatagtttaagacactgtcaggccgtgcggtggctcatgcctgttatcccagcactctgggaggccgagccgggcagatcacctgaggtcaggagtttgagaccagcctgactaacatggtgaaacccctgtctctgcagatggtgccactgcactccagcctgggcaacagagtgagactctgtcttaaaaaaaaaaaaaaaaaaagacactgtcaaggaggcattcacctcaaggatgtggactttggaaatgtgctttgtctctttcttctttctgctaaccctttgtctcatatttcttctatttactaacctccttgttctttgcagagcaagctacaaagagtctaaaactgtatggtttattattcagaaaaatattgtcttttttctagcctatatttttagtcaagtttaaataaagt

SEQ ID NO: 1241506 - DNA, 4001 bp, Homo sapiens
agaaaaagaaagtgtgagtcccctaagagggtgagctgctgcctttcaaagtaacaaaaagattaagaacccaaagaacccaaaacactcctcttgttagcctaccctaccccggcttctaaatgtcttcctctcaaggcctccagtacatatgttctttgggaagacaccccttccccctcctagcacctctgtcaaaattggaaaaactgctgacctagcagctccacagaggggttgagggaggaacttcccagcctgcctgcctaccaggctggctggccgagttctgggcctccccacccatggccttgaccaattaagatataggtataaacccatctgcagtaggtgtgcgtggtgaaggggaaggtggtctggggcagagggaggctgtggcattcctacaaagaagaagtaagataaaggaatctaagggaagaggtaaaccttgggggacagtggaatctgacaggcccaaggggaggaaaagcttgtgagagaagccagggagattgcaagagaggcgcactgtgatctggcctgtccaaggtccagccccacatagcaagccctttcatctgaaaacccatagccctcctcccagactcccacccatctccaagggctgggaatctgggaagagggctgcaccccactctgaacccctgcaagaagctgagtggcatcaagagtgtggggcagggagcccagagccctgggttctggtccaacccccaccacctcacctacctgactctgagcactcagccaggccccttaccctctctggccaccagtacctcatctgtaaaatgccagtatcactctagaagcatctctaaaggcccctccagtcctagtactcagaggctccaaggggcagcccaggatttaaggagacttaaaaggagacagaaggacctgggcctttcagtcttggtggagaacaaagaggtgtgttgcagaggccacagaaatacagcgccttgagttgctccccagatggaaaagtgggactgctgatgctggggccctggccagggaagtctcatgggggacacacaccgaggaggtgctctcagtgcacttgagggacagaggtgacacgtagggaaggggtggggcaggaaaggaaggaaccagagggaagaagcgggcatggaaggagcgcaggctgatctggcgaggcaggaggatggcccactacctgcctgccacactgccaaatccaggcgggggcagggtgggtggtgtctctgcggaccaccatctccccaggggaaggggagagagtgatctggctggaagagatgggtgggggtggggagaagctgtttaccttggctttgcccatgttctctcggggcccctcgagctgtagccagaagtagggggtgtccgggcggctctggaaggcgttcagcttgaccctaaagatgcgctgcacttgcagccgctgccgctgcacccgaggcttcgattttgtctgcaccatgaaccattcctgcgccggaggatcgcccccagacaggagcatggctgccccgcccgctcctggaacgaaggagacgatagtgtcacccgggtctcggggcggcaggcgccccagcccccagccccaggcgcctaagccacgccccctcctccccgcggcgcgccccccgcacggcctccttcctccaggcggcgggacccaccccgcacggctcgggcgcccgccctctggagcttggtccccttcgaccgctgctaccgcgacgagctcttcctgcccggggttgtagctaggggtgggaccggtcgggctcctgccgcccttccctccgcccccagccttccccctccagcactctgccagcccctcctggatcaactctgtctccgtctgctggatagcttaaaggggcgcggaggagagggcgggggagccggcgggggggaggagggggcggggagggtcccggaggcctctgccttccacccaagttttgggcccagagccagaatccaggggtcaaagttagtttccttccacgttcccctcttgctagtggaaggacggggaagaggaaggaggggaggattggtttccggcacccttttttgagatttggaacaaggatctctcccctttacccccacctcccccctacccccaacagcctctcccaggcgtcccaagagaacggggacctcggccactccttccctgggaggaaagggttaaggtagagtagggtggggagcccagggaggccggggcctaaggaaactctgggctggagaccaagcaggaaggaaagggtaacagcactgactccccaccccccactgaagtctagggacagcttggagctggcgggcagcccagaccctcctgaagccccccagggctggaggggcgggagagctgccagagttttcagacttgagttgtttatgaaagccctttttagcacgtttgagttatgctgtgaggggaaggagatagagggtccgggcagtaatgtaacctccgaggtctcctgcaacccctgaccagtcagccaattggcatcagtggtctgggactaaccctgggctaggggaccaccttcaacacccaggctctgctcacatccccagcacaaagaacaccttatacagccttgggcctgaatagaacctggccctgtggagggcagggcctatgtctcggcctcaatgatcttattttgcagactaaaacgaagagccacagtctgatagacacaagtatacctatgaggtcaaaaggcatcagactttaaattaggcctgccctggaacatctggtctgcagggtcgttatgtgtttgtgtgcaggcaagggaccaggagcaccccactgcaaggaaggggcccaattgggggcagggaggggctcacgctactcctggtctggactggactcagcccaccacaccctacttcatcctgcacacctgattcttctccctagattggaatccagaaaaggaaaaaatgatctgtgttacttctggctccaaagccttctgctccaccctgcctggtcctcctgtcctgcccctctctagtaccttgaagcagaaggcctttgggctgaatctccatctcaggccttctttccacctctgactgctctccttttagcaaaagagtctcctgccttattgtgcttcagtttctcttacaaaacaaggtgagagccacataaccctgctccccactccttccctgaatgaatacttaactcttactgccctcctctatcagaccatgaaccccaggcatggtgatcatcttcatggagaactcctgggtttaattctatgttcaaagaggccatgttgagggtcagaagaggtcaatcttaggaatcaagttatgtataaatggataaaagcagacaatttatttaaactattgtgtccctatttctttagctcatgaaaattgggataataatacatacagcggagggtagaaatcagactacatgtaaagcgccaggtacagtgcttagcacagagtagatacccaatatatgttaattccccatttcaagagcttgtctcttctcccccacctcagttctggccaatgtgtcaccacatcttcctagaaatcctctcctcacccttcctactaacccattccccagctcctgcctctcctggaggtagagattttgttagctagcctggttttaatcccagctatgctcagttctggatgagttacatgagttaatgtggactcaggcaggtccctaagtcccttgaactccatgggcttcctcatctaaattcattcataggaccaaattcattcgcttattcaacaaatttaacacgtattcactgagtgtctactatgagccacgccctaagagtatggcattgagtaagatggagatctccctgcccccatggaatacaggaggaagaagaaagaaagagtatgatttcagagaaggggaactactctcctggaaa

SEQ ID NO: 1241507 - DNA, 4001 bp, Homo sapiens
gcaataccagggaagaggagttaagtcctgcctgggaaaaacagatgaggaagtatttaatatggatctgaaggaagcataaattgtcacttggtcaatatggagagggaggacttatattccaggcagagaagagagcttgagcaaaagagtacaggcaagtatagagcatgctcacggaacggcaataaatcagtgagggtgggagagggaagcagaggaaatggcttaagagaacatgtatgtgaagccaagattgcattggattttgaattccagattaaggagcctggccttattcattctaccttcgccgaagagtcctacagattctgtgtttcagagggtaattttgattgtggtctagatgaggaagaactagtcaagaattaagagagacagtctacactgaatcagtttgagctggtttcatagttttgaggagacagaatctgatgtgttagcacatcacgagggcgagggacaggaagaaaacacaaataatccagaattttcaagttcaagtgcttggaaatattcatgccatgcacaagcaaagaaatggaatttagaggggtctaggattaggagcaaagacaatgaaacaaggggttatggagccccctttttactcttttcaaattttctggcatgatatactttctaagacattgacacattctcatcttattcaacctttggtaaggcattttctcatctcacaagatagaggtgatagaaataatgtatccatttatttctaaaagattatgtaaaacaacctgaaccagtttaattaggggaaaagattttgggtcgaaataattcagaattttctgccaaagaaaatgaaaataaattcactttaaatccttagcagtttattgggcatttgtcacatgcagcagtagctgaagagagtggcagtgataatgatgcagatgtagttacttattttcattcagtccttcaacctgctgttatcctcttcagggcagacttcacttcctggttcctcagtgtatagatgagggggttcagtaatggagtgacaacagtgtaaaacacagccgctgccccatccagggggtctttggagccagccctaaggtagatgaaaatacaggggacatagtagactgtgaccacgattaggtgggagccacaggtggagaaggcccggcgcctcccatcagtggtgcgtatcttcaggatggcatttactatgttggcatacgagagcagaattaacatgaagcaactggcggccactaccccgacgtccacaaaggtcacaagctcattgacagttgtgtcagcacaggccagtctcaatactgcggggatgtcacagataaagtaatccacctgattgggcccacagtagggcaggcggaaggtcaaggtggcctggatagacccatgcatggagccggcgacccaagctccagccacaaggactgtgcataacctcccattcatgagcactgggtagcgcaggggctgacatattgccaggtacctgtcataggccatcaaggtgtagaggaagcactgggtgctgcccaggaagtgaaagaaatacagttgagccacacagccaccaaacgggatagccttgatggaaggagtaaaatccaaaataagcagaggaacggtgactgaggagagccacatgtccaggaatgagagcactcccagaagaatgtacatggggcgagcacagagcttcgggtcagcccacatggtgagcagaatgagcaggttccccagctgagtgaggatgtaaatgatgaagaagaccaggaagaggaggcttcttagatttggggggtgagacaaacccagaagaatgaaatctgtcaccacggcatccagcgatgtgtttttggtctttcccatgtctttttgtagtctgctaagatgaatggtgacgtttgacaagagaaacacagcacaatgatgttgtaagtgaatgcttttgtcggatgattgatgcctaggaattatgagataaacaagatagagtcaaattgttttttaaaagaggaggtggtgtcaccattagttatttaggtttacttaaaaggagaagtcctccagaggctggttagtttcctagatgggaggaaactcttgtccattgagagatactgaaagccaggatttgccagatgaaggaagagggacacatgagagtgatagagaagtaccgaaaattccaaccaaaaagtgagttcgccaaggaggggctaaagttgatgcagagcagtgtggaacaaacaccctataatgaccacatctactttttcttcacctactatcattgtcccctttttcctcagctaaaatctcatctccttaacatatcatgcaaaaatattcctcatctggcccttatttatatcgctattgtaccacttgtaattccttcttattgttgggaggcatgacactcttcaagcttctcacagtagtgtgctctaacttgggacttacgcacacactatcttttctgctcccttcacataggtagtgcccacttttccttcaggattcagtttgagtgtcttcaccttcaagaaggctttccggatccctgaggacaatgcttatacttttctgagcacgtacattatgttgcattgtctaatttctgtttttctctcttaataatcatcccgtctagcatgctaaaagtgataaataccgtaattattttctgaatgactgagatagatagaatggatgttgccaaatccccctgactgaatacattgtttctcttgatcttttttgtctgacccctgtgctcacatggctgggacttttaggtcaagggaccacctcattcaccatgtaatatgggtataatttcattataaaaaactccaagaaacatttatgcctgtttttgctccaggatatcatttagatttatttgttgatttatatggttcattggtttgggattgggttttttttttggtatgaggtcacagaggaatttttattgtttgttataaaatcattgattaatgcaggacttgatctttagtgtgcttgtgtgtaatatctatgtattgcagtctatcaaacagcaactctctctaaagacatttacagattttcaagtatctgaacaagatgataaaatagagggatggaatgtgtttgtttcactctttttgttaaataggttgcttgataaagacttttcgctctatatatggtttgagatgcatttatctttcatttaactacaaaatatctttgtaatgcaaatgactactttcataaagcaattaaaatgacaatagattattataaataacatgtgaatattaataagtttaatctctatcggaaattctccaaagagattttatcttaagtattctgtgaaataacttaattcatatgttaacattcaagagttattagtagtaataataataatactgaatatatctggctcttcgaagtctggaaaatgttaaacttgtcctttgcccaccaagaacgaagaaatatcagatttttattgcctgagtttcaggaggacactttgatttatttgaaaatggatgggaaaactaaatcttatttttgtggttagaatatagagaaaagaggctgggcgtggtggctcacgtctgtaatcccagcactttgggaggccgaggcaggcagatcatgaggtcaagagatggagaccaccctgaccaacatggtgaaaccctgtctctactaaaaatacaaaaaaattagctgggtgtggtgtcgggcgcctgtagtcccagctactcgggaggctgaggcaggagaatctcttgaacccgggaggcggaagttgcagtgagtggagatcgcaccactgcactccagcctggtgacagagagagactctgtctcaaaaagaaaaaaaaaaaatgaatatagagcaaagatagaaagagttgagattaaaatggtgcataaaatactaattatggccaggc

SEQ ID NO: 1241508 - DNA, 4001 bp, Homo sapiens
ctgtcgcccaggctggagtgcagtggtgcgatctcggctcactgcaacctccgcctcccaggttcacgccattctcctgcctcagcctctctgagtagctgggactacaggcgcccgccaccacacccggctaatttttttgtatttttagtagagacggggtttcaccgtggtctcgatctcctgacctcgtgatccgcttgcctcagcatcccaaagtgctgggattacaagcgtgagccaccgcgcccagcgttagggttttctagacggacagaactaatgggaaaaaaatatatatatatttatatatatataaaggggagtttattaagtattcactcacatggtcacaaggtcccacaataggccatctgcaggctgaggagcaaggagagccagtccaagttccaaaactgaagaacttggagttttatgtttgagggtaggatggttccagcacaggagaaacatgtaggctgggaggctaggccagtctttcttttcacatttttctgcctgcttatattctagcctcgccggcagctgattaggttgcgcctgcccagattaagggtggatctgcctttcccagccttcaaatgttaatctcttttggcaacaccctcacaggcacacccaggatcaatactttgtatccttcaatccaatcaagttgacactcaatattgacactcaatattaaatatcaaatataatattgggaaatatcatattgaactctacgttttggtgtgggagaatttattactgagacattggaaaatacactattgcattctttcttctggattgtttaatgtggtttagtttgtgagaatttggtctcattctctactcttgcagtggctgagagttatcttgagaggatactaaggaactgttagaaagttagtattttaccttaaactgtgtttgatcatacagtatggctatataaaagagaaaaaacaagaagaaaagaaaaaagttaccgaagcctaaacattataataaattctaattgtggcagcttccctagtgggagaaagacactttcaaacctcactcggagttcttgggcttctgagcattcttttcagggccagcttcacctcttggttccgcagagtgtagataagggggttgaggaaaggagtgatggccgtggggactagggcagctgccccatccagggggctgttggtttcaggcctcaggtagatgaaggcacagggcacatagtacacggtgaccacggttacatgggctccacaagttgaaaaagcccggcgccgcccatcagctgtgtggattctcaggatggcctgaatgatctgtatgtaggagaggaggatcagggagaagcaactggcaaccaccaccccaatgtctacaaacgtcaccagctcgttgactgttgtgtcagcacaggccagtctcaacactgcagggatgtcacagaagaagtaatccacctgattgggcccacagtagggcaggcggaaggttaggatggcctggagagccccatggatggatcctgccatccaggctccagccacaagcaaggcgctcagcttagcagtcatgagcacagggtagcgcaggggctgacatattgccaggtacctgtcataggccattagggtgtagaggaagcactgggtgctgcccaggaagtgatagaaatagagttgagcaacacagccaccaaatgggatgggtttgacacctaaagtgaagttcatcatgaggcgagggacaatgatggaggagatgctcatatcaatgactgagagaacaccaagaaagatgtacatggggcgggcatggagccttgggtctgcccagacagtgattaaaataagcaggtttcccagctgagtcaggatgtagattagaaaaaagaacacaaaaaagagtgtccttagcctgagtggatacggaattcctgtcaggataaacgcagtcaacagtgtgctgttgattctttccatatcccagagaatcttacctagagaatggacaaaacaagaattaacatagaggtgagaggaaagtgagggggaactagaaagagattgtaaaaactaggggcagtggcagagaagtttctttcttacgtggaaagatgacaagtagggagaaacaatgttctctggcaggtgttttgtaaacaagatcttattggaacacagccttgctcatttacttacatattgtccgtaactgttttggagctactatgacagagatgagtggttgcatttagcttgcaaaacataaactatttactccctggacatttatagaaaaagtttgcaccgagggttttgtacttagagcactttttccaataacctttggaaaataatcattgactgttgtgttagtacaggccaggatttcctggaaacatgatatatgtgagaaagggtatttgtttcattaggtgctctgcccgctcagaatcttccagaggccactggctcactcttatctctgccaggacataaacttacatagagtggggaatatgcagaaaggaaatgcagaaaataagtggctgatttttatgtgtgacagtgcttgatgctgtacagatctactttccaagttctttaccattaaaaggaagagaatgaccatgaagctgtaagtacataaataaagtgaggactatcgccactatgcactgtggttggtacttggtgctatataattcagttgctttgcatgtgatcatttagccttaagacacagtaaagagaggagagaaagaagaaatgagggctggctctagtgagaagtcagagatttaaggaaaattaaaggatgattggagagaatgagaggattgctagaccagaacaaaccactctcagtgtggaagaattattttaagttcttagtccaactccttgattcgcatttctttttttttttgagacagagttctctctgtcacacagcctggagtgcaatagcatgatctcagctcactgaaacctctgcctctcaggtttaagcaattctcatgcctcagtgtccgggtagctgggattacaggcatatgctaccatgcctggctaatttttgtatttttagtagagacggggtttcaccatgttggccaggctgatcttgaactcctggcctcaagtgatctgcctgccttggtctcccaaagtgttgggattacaggcatgagtcaccacacccagcttacttggcattttttaacctaaagaaaagggttggcgggtgggctcggtggcttatgcctgtaatcctagcactttgagaggccgaggagggtggatcacctgaggtcaggagttcaagactagcctgaacaacatggtgaaaccctgcctctgctaaaaatacaaaaattagccaggcacggtggtgggcacctataatcccagctactcgggaggctgaggcaggagaatcacttgaacccagggggtggaggtgagctgagattgcaccacttcactccagcctgggcaaaagagtgaaactccatctcaaaaaaaaaaaaaaaaaaaaaaaaaaaaaaaggccaggtgtggtggctcacgcctgtaatcccagcactttgggaagccgaggcagatggatcacaaggtcaggaattcgagaccagtctggccaatatggtgaaaccccatctctactaaaaatacaaaaattagccaggtgtggtcgtgggtgcctgtactcccagctacttgggaggctgaggcaggagaattgcttgaacctgagaggcagaggctgcaatgagcagagattgcacggctgtactccagcctgggtgacagagcgagactccatctcaaacaaacaaacaaaaaaaaaaaaaaaaaaaaaaagaaggaaaagggttggaataatgagcttttaaaattccttctagtcctataattttcagatatctaaattcatggcttggaaacttttttgaaaattaactgaccttaaatgga

SEQ ID NO: 1241509 - DNA, 4001 bp, Homo sapiens
aatcctggagagggaaggaccacagaagctaggctaaaaatatgatgcaattccccttcaaggcatttttggatttctaagctgtgtgtacacggtgagaccccaaaatagctagcagaaacaaaagctgagagtctaaagagcaaagcggaagtttcaggagtcatggggttcaagaagtactgaaataggaggctaggatcagctgaagcggagggaccttctaaacagtccagatttgtccctgaggtctcagaaaggctatgttcctgcagtaagagccacaccctaagagtaaaactaaaacgagcacagatcattttaaaaacacatacaagtagtgcttaaatagaatcaatgtgatctgcctctactccatctacttgctagaacaaaaccttcattactgcatatattgtctttatagtttttaaaatacaatgcccaccagtcaattaaaaaacattgaggcatgttacacaactgggcaaataatcaagatctgaaaggagaaataacagaaacatgctcacaggtattttagctttggccaatagtaagatgaacaattaactgtataagaccagttttttttttttttttttcctgagacagagtctcgctctgtcgcccaggcttgagtgcagtggcgcgatctcggctcactgcaagctccgcctcccgggttcacgccattctcctgcctcagcctcccgagtagctgggactacaggcgtccgccaccacgcccggctaattttttgtattttttagtagagacagggtttcaccgtgttagccagggtggtcttgatctcctgacctcgtgatccacccgcctcgggctcccaaagtgctgggattacaggcgtaagccaccgcgcctggccaagaccagttttttttttaaaccccaaaattaaagacaagattaattacgcaaggacctttttgattaacattttatgttccccaaaatttcttcagagcttttctcatatctttgttcctaagactatatatcacagggttaagcagtggggtaacaacagaataaaacagagtcacagtcttctgctttccagcttcattcttagatggtgggctcccatacatgaccagtactgagccgtagaacagtgaaaccacagccaggtgagacccacaggtggagaaagcctttcttctcccagctgctgaagggaccctcaacacagctctcacgaccagagcataggaccccacaatgaagagaaagagcataaagacaggcagaggacttaagacagaaaagacaagctctatcacagggccttttttgcaagtgagagttagaagaggagctgggtcacataggaagtggtcaataatcctagatccacagaaggacatttgggagatgttgacgataggaatcaagaaccagatgaaaccaagtacccagcaattgaccacaagattggtacagagacgtctggtcataatggttggatagcgtagaggccgacagatggcaaggtatcgatcaaatgccataactgccaggaaaaagcattctgtagagcccaaggagaagaaaaagtagaactggaggaagcagccagagaacgagatgatcttggtgtcagagaggaagttggccagcatgctggggactgtggaggtgacataacatatctccaagaaggagaagttggcgagcaggatgtacatgggggcgtggagtctctgatcccagtgcacagcacagatgatggaaccattgcccatgagggtcaggaggtaaacaacagtgaagagcacaaagaggaggatctgcccctccctggggcaagggaagcccaggaggatgaagccagtgaaggtgctggagttgctggggctgttgaagattttcatgtgcctgtgaattgtaaaagcaccagcaattactgaatgacggtgcaaacatagatggggaatcagatttatatttaaatcattttgggaaagaaaatgcataaatttactattgaaataaaagtaaaaagtaaaaaacagaatgcagatatgtcaatagtcactttttttcttttaaactgacgtattgatctggattgattctttgctcgcgttcacatttttaccataggctcaagaaaacttttgaccaaaattgataagctgtcatttacattttactaggtgtaaagccattataattttcaggcatgtttacaacactttccttcaagagcctttgtataaatatataacagaatatgtatttatggatatattcttacacaaatgaatttcattttcagacggtgaaatcattgcagctttttgtggcagagactgagtgaaactgtgtagccatgtaatatgagaccataaaactgtttgaattacttcttttatgtcacttttgacactggccttattctaaattaaatggttaacttattaacttaataatatcattcacttgtttcatgagtaacacagtcaaatcaattagaggaaattagctgttgtcagtttcttttgtgttaggacagcagtcctagccatcctcagtagaccaggctgaaagaattaactggccatgctgaaacacgtctgtgcttgccgtgaagaatatataaatttgcctagactatagttaaagatataattctattccaataatacaaattatggatacaattgataacatgcaattctaaataacagtgggtttgtaggcgatattagactaaagctgtggtccatctcccagtaaccacttaggaacatctcaaggcagagtggcttttgaaggctgaatatctgcatgatgcctttcatttgttttaaatgaattagaatatctttgtgaaacaatcatgtaatcaagccttggaattagttagagccctttctaaataagcgcataagtgagcaaactaaagaaagtttgtgtccctccttctatgtttagatccacattttgctttttgaagttggcacagggacccaggaagttttaaggtagcagaatctgctgcccctaaacatgccactttggcataagattatttccagctgaaggcaattgagaaaaagcagatacaagaaaagctctctgtcttccccctattatttgcatagaaacaggataactttgcaagggtagccttcctctcctctctaccagggaggacgaggtaaaattaccagagacaactgtaaaccctttccgcctggagatggcaccagaggaatctatataacaatttttaccaactttagtctgtatcttccattagtttgtccataatatttattttcccacagtttcccaccctagaaatgcaaagtcctttttctttgtcttgtcacttctctaaaaaaattattattctttagctgagatgctatgtaagcctaacttctaaccacacctttgagttactcatctcccagtgctcccatgtgtatttatgatgcgtatgctcataaacttatgtttgtttttctcttgttgatttgtgttttgtcagtcttacttataaggccccagccgaagaacctagataggagaaaaaaaattttttcctcccctgcagagtctactaatttcttagcagaatatttaaattctgtataacttataagaccaaaaacaaaagatgccggcagcaagttgacatccttttcaagtacagatgtgagtacttagaggtttatgttggaagaattcagttttgttggtgatggggtgaactgagggagaaattttaacacaatccataatgatttatttatttattgagatggagccttgctctgtcacccaggctggagtgcagtggcacaattgcagctcactgcaatgtccgcctcctgggttcaagcaattctcgtgcctcagccttatgagtagctgggattacaggcacaagccaccagcccggctaatttttgtatgtttagtatagataagtttcatgtcatgttggccaggctggtcttga

SEQ ID NO: 1241510 - DNA, 4001 bp, Homo sapiens
aatgttcatctcaccacataaaaattcacaattcatggcacgttagttcaataaaatattatgctttctatgaatgataattataaaaacttgctataaatggaagcgagtttaacattaaatcacatgaaacagacatattaacaaaaatagatacattagagcaattgaattatacatgcttttttccttcaaaaattttccttcatgttattttcacattcttttagcagcaaatgacaatgaactgccattgattttattttattttttgaacttaagtagtgtatccacaagtacaccattgccctgtccaatctttaggggagatattctattatctaaaactcggtaaattgacctatcatgttgttggtgatatcttatttaggtaaaaatattaggtatttagaacaatgcatttctgaatattttgactgatattattatagatggatttagaatctgccctttaggggtccagaaggaggtaatgtttggatatcattaggctagaatattttattgtcctacaaaaatgttgataaattgcttataagggcttatgtattagtaatgaccatgtcaccaaaataataaacccaaatatgataagaatcacaatcagaaaatatattttttcttcttttatttacaaccaaccaaacaaaataacatagctataattttgtcaatctcagaacaataaatttaagtaaaatagaacataaagaatttttatcacagatgaatcagatggaaactatccagaaaacacccaaatatgtgtattcctcagttaatactcagtctaggtgccaaagggaaaccacacgcttccatttatctatatgatttggcaactttaatttgtaaggggtccaacaggtgtttaatttcataggctgatatagtcaatatcactaggtccatattttttagatttaaataactatataattctgatttctctttgttagactgtactgatctgatcatggaggaataatctaatatgccttagattatgttggaacttcccagaactttcctcagggctgcctttatctccttattctggaggctatagataaggggattgaagagtggggtcaccatagcatagaacaaagtttcaattttctgcatccctgtagaatgtccgagtcctgggctcacatacatgaccataagagagctatagcacagtgataccacagccaaatgagacccacaggtagagaaggccttatgtctcccagtgcttgaaggcatacccaacacagctttcaggacaagagtataggatccaataataaagaggaagttaccaaaaataactaatgagcttagagtgtagcaaaacagttggattcttggggcagaaacacaatccaatgcaaatcgtggccctgggtcacacacaacatggtcaataatgtttgggccacagaagggcatctgagagatgagaacaatggggatcaggaaccacagaaatccacaaacccagcacagtatgaccagtttggcacagagatgcccagtcatgatattaggatagagcaagggacggcagatagcaaggtactgatcaaaggccatcacagtcaaaagcaagcattctgatgtacccaaagagaagaagaaataaaactggagaaaacatccagcaaaggagatgttttttttctctgaaaggaagttgaccaacatcttgggaactgtagaagagacataccatatctctaaaaaggagaaatttcccaggaacatgtacatgggagtgtgaagtcgccagtcacaccacaggacaaaagcaatggctccattccctgttatagtcagtgcatatgttgtagtaaagagtgagaagaggaagatctgaattgtccactcacaagtgaaaccttggagtataaattcatttacaaaagcaaagctggaatttggctcagagacattcattaggccagtgacctgcaaggtcaagggacacattatcagtcaggactcttttataaaatgtgttccttttttaagaatgaagagaagataatgaacatgaagtcatttttcaaaagaataattaggaagagaatgtagtttactttttctcggctatacagtatatgagttttgggcttcgtaggtagctgattgaacaaaaacaaacttctgccatcttctaaatctctccttaatatgcaatcgtgatagaactaggtaaagttaaattccttttgtaaggtcattattttgagacagaaatgattgaatatagtttctggatagcatacaactcaaagttagtactttgagaaggcacaaatgtgttagtttcttactgcaaacccaacttatggtgcaatagactcagtaaagaaagttttgaccatttacatttcagctaaacatattacttaacattatttacatatgcaaaagaaatgcacatattttaaaataaattggtagcaatcacgttaaagccattatctctgaatttcttttgctgctgttgttagcttaagtgattatctaatgttactcaccaatattgatttttaatattaatattgtaaagctgcaatgttttctgtagaaagcaaaggctttaagcttctgattaatcttttaccttaatttcataaactgatatagtgattattatattgataaaatcaatataatattgatttagtcattatgtacaaaagtttgcaaagatctagacattaaactttacttttgaaggcatttcataaaattttgagattgatgttccttatatgcttttttttaaaattgaaaatttttaccagatgacagaaatcaaacacttattttgttataggtaaacttccttcttcctacattcttataaaaatatattagggatttgcgttacctggaaaaaaacttttcttttcctcagaaatatggagggatgtgagtcctagatgtcaagaggacattttgagcagaaacacaaattttcaaaagtttttcttccaacttgctctctacaccagtgctctgggaagtcttttggtatgactagttagaagttatgtttgtgcttcttttagtaatatatgtctctttaataggcttccaaccagaatcattaataaaccaacattaagaaattatggaatgaaaagggattgacacaggagtgtcatgattctcagcagtgctcaaaaggtgaagccatcatcgttttgacaggaaccaaatctctaaatgatttattttataaatcatattatgtcttcagctagacagagttttattgtggccggccccaaaattaaaaatgcactttatgaaactcacattctcctgggatgtagcctctatagcattaggaaagttatcttccaagatgaatctttaaaaagttaatgattacatattctctgaagaatcagtaaagagtaatgacaactattctaaggcatcattatttacaaagagcttgcccaccagacggattccagaaaatcttctggaagacacagtctgaggagaaataagatacaaaatgttaccaaaacttttgacataatgtttaggaacatttcaagtgttactgtgcatatattggaggatatacagcccagtgaggaaaatactgaggttccaacattgtcacacattgaacaaaaacttacagaatttagaaataacttttagaaggatggcacttttttgccagaatcctttagatatgagaagaaagtataagaagtagcaacatttaagttaattaacagaaatacttcagaggaacatgtgacttcccaattaatagagagaagtatttacttgtatttattagtatctcttctatttttactttatgacatttaggggccaacatagtgtaactaaacactcatgtgtgagtgaatgctcataccaagtgctgtgaagtagttgaggatatcagggatgtatgccctaggaccacagacatctgtctaaaagcaaac

SEQ ID NO: 1241511 - DNA, 4001 bp, Homo sapiens
tgcatttctgaatattttgactgatattattatagatggatttagaatctgccctttaggggtccagaaggaggtaatgtttggatatcattaggctagaatattttattgtcctacaaaaatgttgataaattgcttataagggcttatgtattagtaatgaccatgtcaccaaaataataaacccaaatatgataagaatcacaatcagaaaatatattttttcttcttttatttacaaccaaccaaacaaaataacatagctataattttgtcaatctcagaacaataaatttaagtaaaatagaacataaagaatttttatcacagatgaatcagatggaaactatccagaaaacacccaaatatgtgtattcctcagttaatactcagtctaggtgccaaagggaaaccacacgcttccatttatctatatgatttggcaactttaatttgtaaggggtccaacaggtgtttaatttcataggctgatatagtcaatatcactaggtccatattttttagatttcaataactatataattctgatttctctttgttagactgtactgatctgatcatggaggaataatctaatatgccttagattatgttggaactccccagaactttcctcagggctgcctttatctccttattctggaggctatagataaggggattgaagagtggggtcaccatagcatagaacaaagtttcaattttctgcatccctgtagaatgtccgagtcctgggctcacatacatgaccataagagggctatagcacagtgataccacagccaaatgagacccacaggtagagaaggccttatgtctcccagtgcttgaaggcatacccaacacagctttcaggacaagagtataggatccaataataaagaggaagttaccaaaaataactaatgagcttagagtgtagcaaaacagttggattcttggggcagaaacacaatccaatgcaaatagtggccctgggtcacacacaacatggtcaataatgtttgggccacagaagggcttctgagagatgagaacaatggggatcaggaaccacagaaatccacaaacccagcacagtatgaccagtttggcatagagatgcccagtcatgatattaggatagagcaagggacggcagatagcaaggtactgatcaaaggccatcacagtcaaaagcaagcattctgatgtacccaaagagaagaagaaataaaactggagaaaacatccagcaaaggagatgttttttttctctgaaaggaagttgaccaacatcttgggaactgtagaagagacataccatatctctaaaaaggagaaatttcccaggaacatgtacatgggagtgtgaagtcgccggtcacaccacaggacaaaagcaatggctccattccctgttatagtcagtgcatatattgtagtaaagagtgagaagaggaagatctgaattgtccactcacaagagaaaccttggagtataaattcatttacaaaagcaaagctggaatttggctcagagacattcattaggccagtgacatgcaaggtcaagggacacattatcagtcaggactcttttataaaatgtgttccggccgggcgcggtggctcacgcctgtaatcccagcactttgggaggccgaggcgggtggatcatgaggtcaggagatcgagaccatcctggctaacaaggtgaaaccccgtctctactaaaaatacaaaaaattagccgggcgcggtggcgggcgcctgtagtcccagctactcgggaggctgaggcaggagaatggcgtgaacccgggaagcggagcttgcagtgagccgagattgcgccactgcagtccgcagtccgacctgggcgacagagcgagactccgtctcaaaaaaaaaaaaaaaaaaaaaaaaaaaaaaaaaaaaaaaaaaaaaaaatgtgttccttttttaagaatgaagagaagataatgaacatgaagtcatttttcaaaagaataattaggaagagaatgtagtttactttttctcggctatacagtatatgagttttgggcttcgtaggtagctgattgaacaaaaacaaacttctgccatcttctaaatctctccttaatatgcaatcgtgatagaactaggtaaagttaaattccttttgtaaggtcattattttgagacagaaatgattgaatatagtttctggatagcatacaactcaaagttagtactttgagaaggcacaaatgtgttagtttcttactgcaaacccaacttatggtgcaatagactcagtaaagaaagttttgaccatttacatttcagctaaacatattacttaacattatttacatatgcaaaagaaatgcacatattttaaaataaattggtagcaatcacgttaaagccattatctctgaatttctattgctgctgttgttagcttaagtgattatctaatgttactcaccaatattgatttttaatattaatattgtaaagctgcaatgttttctgtagaaagcaaaggctttaagcttctgattaatcttttactttaatttcataaactgatatagtgattattatattgataaaatcaatataatattgatttagtcattatgtacaaaagtttgcaaagatctagacattaaactttacttttgaaggtatttcataaaattttgagattgattttccttatatgctttttttaaaattgaaaatttttaccagatgacagaaatcaaacacttattttgttataggtaaacttccttcttcctacattcttataaaaatatattagggatttgagttacctggaaaaaacttttcttttcctcagaaatatggagggatgtgagtcctagatatcaagaggacattttgagcagaaacacaaattttcaaaagtttttcttccaacttgctctctacaccagtgctctgggaagtcttttcgtatgactagttagaagttatgtttgtgcttcttttagtaatatatgtctctttaataggcttccaaccagaatcattaataaaccaacattaagaaattatggaatgaaaagggattgacacaggagtgtcatgattctcagcagtgctcaaaaggtgaagccatcatcgttttgacaggaaccaaatctctaaatgatttattttataaatcatattatgtcttcagctagacagagttttattgtggccccaaaattaaaaatgcactttatgaaactcacattctcctgggatgtagcctctatagcattaggaaagttatcttccaagatgaatctttaaaaagttaatgattacatattctctgaagaatcagtaaagagtaatgacaactattctaaggcatcattatttacaaagagcttgcccaccagacggattccagaaaatcttctggaagacacagtctgaggagaaataagatacaaaatgttaccaaaagttttgacataatgtttaggaacatttcaagtgttactgtgcatatattggaggatatacagcccagtgaggaaaatactgaggttccaacattgtcacacattgaacaaaaacttacagaatttagaaataacttttagaaggatggcacttttttgccagaatcctttagatatgagaagaaagtataagaagtagcaacatttaagttaattaacagaaatacttcagaggaacatgtgatttcccaattaatagagagaagtatttacttgtatttattagtgtctcttctatttttactttatgacatttaggggccaacatagtgtaactaaacactcatgtgtgagtgaatgctcataccaagtgctgtgaagtagttgaggacatcagggatgtatgccctaggaccacagacatctgtctaaaagcaaacttccactttgagagactacagaggaaaatgtttattcagacctttattatcacttagtcataatacttagaaacttcta

SEQ ID NO: 1241512 - DNA, 4001 bp, Homo sapiens
aaaatgaaaaattatccaggcgtggtgggtcacgcctgtaatcccagcactttgggaggctgaggtgggtggatcatgaggtcaagagatcgagactatcctggccaacatggtgaaaccccatctctcctaaaaatacaaaattagctgggcgtggtggcttgcacctgtagtcccagctacttgggaggctgaggcaggagaattgcttgaacccaggaggcagaggttgcggtgagccgagattgcaccactgtactccagcccatcgacggagtgagactttgtctcaaaaaaaaaaaaaaaaaatagcctaagaaaaggtgaaaagatgatagaatggaataaataaagtaactggccagactagagccaagggctcatgtggcaaagaaatggaaaacaaatgaaatagatttagtggggatgtattacgaagggtgtcgagtgccagacagagggatttagatgtattgactctgaggagcagataggaaaattggtgaatatgggagtgaagatggacattcttctgaattgcttgaatttattacaacaatcacatattattgttgtaagtaaaaaaaattgagatagagatatttaaaaaacatgtctgaggccttaccgtttgctgggtattgtgccactattgattcccatcagacaaagactcctaggagcatacctgtagttgaacaaagttgggtttattgtcttgttgcaatgaggaagaagatatacaatgatgaaccatggggcatgtcagcaggagggcatctcatgtagaaattccattttatcattctaataaagacaggctttgaaaacttttaagtggatgttgaagaccagttaattaaggtttaaagagtcagtgctggaaacatatttaagctgggcacacttccaggtaaaatatacaacctctaactactcagactgaggactgaaagactgctaaagaactgacaacatctcgaccttgttcttcgttagaacttgtaagtatggcacatctttggctcacgaattttgacgaattctcattccaaacaggacatttctcagagcgagtttcatgtccttattacgaagagtatagatcagaggattaaaaagaggagtcgttactgaatataccagtgtgaggatcttctgcaataaagttgggatcccatatgtaggacttacatacattaccatgactgtcccatagaaaagagataccacaaccaaatgagaaccacaggtagagaaggcttttctccgaccagctgcagaagggacctgaaaaacagctgttagtaacaggatataggatcgaagaatgtacatactagtgaaaaagaggacaagggagctctgagtatagaaaatacattcagttatgggagctggggcacaggatagagccatcaatgggtccatgtcacacaggaagtgatcaatgatattaggaccacagaaggggagttgggagatgtagaaaatgggaattgggtatccaaggaatccaataagccaacagaaagacaccagcttaccacagaaccttacagtcatgatggcagggtactgcagtgggtggcagatggccaggtatcgatcataagccattactgccagaaagagacattcagttgttcccagtgaaaagaagaaatagaactggaggaagcacccagaaaatgagatggccttggtcttggagagaatgttgactagcatgttaggaatagtggaggacacataccagatctcaaggaaggcaaaatttcccagcagaaagtacatgggggtgtgtagtagtgggttgcatctcactgcatagatgatggctccatttcccagcaaggtcaagacataaatcaccaaaaacaatgagaagaggaaaatctgaatcttccagcaaccagggaatcccaggagaataaactctgtcacgatgtgtgttgctgacctgttcatgggtcttaagtctacaaagaagaaagacatgagtgtaatccaagtctcttggagtgtaatccaattgcttgctacgtatctcaaggattttactgagacgagaacttgaggtatacaggaaaatacatgagataatctgagaccaggtgggaatatgtcctaccaaattttgaattgattgtggttctctgtgttattttgctagaatccaatgcaatccaatgcagctagaatttttgacactgtagggaaaagagagatcagactgtcactgtgtctatgtagaaagggaagacataagagactccattttgaaaaagacctgtactttaaacaattgctttgctgagatgttaatttgtagctttgccccagccactttgccccagccactttgacccaacctggagctcacaaaaacgtgtgttgtataaaatccaggtttaagggatctagggctgtgcaggatgtgccttgttaacaaaatgtttacaagcagtatacttggtaaaagtcatcgccattctctagtctcaataaaccaggggcacaatgcactgtggaaagctgcagggacctctgcccttgaaagcagggtattgtctgaggtttctccccatgtgatagtctgaaatatggcctcgtgggatgagaaagacctgaccgtcccccagccggacacccgtaaagggtctgtgctgacgtggattagtaaaagaggaaagcctcttgcagttgagatagaggaaggccactgtctcctgcttgcccctgggaactgaatgtctaggtataaaacccgattgtacatttgttcaattctgagataggagaaaaaccgccctatggtgggaagcgagacatgttggcagtaatgctgccttgttattctttacttcactgagatacttgggtggagagaactatatatctggcctacgtgcacatccaggcatagtaccttcccttgaacttaattatgacatagattcttctgctcacatgttttttgctgaccttctccttattatcaccgtgctctcctactacattcctttttgctgaaataatgaatataataatcaataaaaactgagggaactcagaggccggtgccggtgcaggtccttggtgtgctgagtaccggtcccctgggctcactgttgtttctctatactttgtctctgtgtcttatttcttttctcagtctctcgtcctaccagaccagaaatacccacaggtgtggaggggcaggccacctctccagacactagtggcagaaccagacaaatttattttctttcttttccttggatgcttgagaagaccttttcagcttttgatttgtttttccaatgttgattatgggttttctagcacaagttcatcaattttctcttatttagcacaagttgttagaaaagacattttgaggataactgaaaaaaataaaattggtttagatgtttgaacaaaacaaaatagattgactgctgcatggagatacaactccatgataatattttaaaaacatctctaacgaacggcagtgtttatttttatgttttttacacatactatacaaaaaggaactatcttactttttgtaatcagataccatgtagatgaaataaggaaaatgatgttttctatacaaaaatttagtttatttagtgagctttttcggtggtgaaaacaaagggattttctaaaagaatctgagatgaaatggggcttcatctgcaatcctatgtattagaattttgtttactgaaaggaaggtaaggacattttcaaatatttgactaggtatgtacttttcagtagcaacaagtttatgtatttaagaattaaataaaatacacaaatgtgtttaaacaacagtaatcttatacttgattaatacttaaaatgtgctgattaagtcttaaaaaagtggtagttttggctgggcgtaatgtcttatgcctatagttccagcaatttgagaggccaaagtgggtagatcgctgaagtcaggagtttgagac

SEQ ID NO: 1241513 - DNA, 4001 bp, Homo sapiens
gctcacgcctgtaatcccagcactttaggaggtcaagggtaggggggtggatcacttgaggtcaggagttcgagaccagcttggccaacatggtgaaaccccatctctactaaaaatacaaaaatgaccccatctctactaaaaatacaattagccaggtgtggcggtgggcacctgtaatcccagctacttgggaggctgaggcaggaggatcacttgaagccgggaggcggagattgcagtgagccaagactgtgccactgcactccagcctgggcaacaagagcgaaacttcgtctcagaaacaaacaaacaaacaaacaaacaaaaatatgtatattttctgaattgaaaatatctcactttttttttttttttttttttttttttttttaagatgcagtcttgctctatcatgcaggctagggggcagtggcgtgatatcagctcactgcaagcttagcctcccaggttcaagcaattctcattcctcagcctcctgagtagctgggattacaggtgtgtgccatcacgcccagctaatttttgtatttttagtagagacagggtttcatcatattgcccaggctggtctcgaattcctgatctcaggtgatcctcccgctttggcctcccaaagtgctgggattacagtcgtgagccaccgtgcccagccagatctcactcttttgaaaggtttcagtacacatgcaattgatttcttctgtcagctaagattaaaactagcaaagatacatcacagaaaaataatatacgtatatatacacccacccaccacataactactcagtgaggccacatatgtttaaaatgttttattgagcattggcatttatcattaatgagctgaatttaactgctaaggaactgtgaaagataagtctgtctacctgagtgtgagccagaacatactactgaagctactctctatagttataaaaaattaaggtcagaagtggccaatttggcttctttttcaaagatatctcagttttggctaactgttaaccccaggactctctttagagcatctttcatgtctttgtttcgaagactatagataaggggatttaagaatggagtcattgctgtgtataccagagtgatgatcttctgcattcctgctgggttccctgatgttgggctcacatacatcaccataagggttccatagaatagagacaccaccattaggtgggacccacatgtggagaaagctttagttcgaccagcaccagagggaatacaaagcacagctctgatgaccagagtgtaagatcccaagatggagaggaagggcccaaagataatcatcgagttgaaggtgtaacagataagctcagtggaaggagcagagatgcaggccagtgcaaacaatgggcctgggtcacacaccaagtggtcaatgatgttgggcccacagaagggaagttgggagataagaacaatagggactggatagcagagaaatccgcctacccagcatacacagaccagaattatacagaacttcccagtcatgatggaggggtagtgtaatggacgacagatggccaggtaccgatcataagccataactgataaaaagaaacactctgttgtacccagtgaaaaaaagaaatagaattgcaggaagcaaccagagaaggagatggttttaatctcagagaggatattgactagcatgtttgggacagtggaggaaatgtaccagatctctagaaaggcaaagtttcccagaaggatgtacatgggtgtgtggagccgcctgtccaatttcactgcacagacaatagctccattccctagcagtgtcaggagatagagaaccaggatgaatgagaagaagcagctctgcatctccctttgaccatggaaacccaggaggacaaactcagtcacaaaatgcattgttctgttctggggtcccaaagctgttagaaaaacagaagtaaccaaagaatgaataataaagaacatttggagattttgctaactcatgctggatgatgtactaagtatttttacatacattatctcatttggtcttcctaatgactctttgagctgcgaggaggtattctttacccttctctttcacagacagggtaattgaagttcaaagagattagaagggttcacttaaacatatgtacaaagccagtaacgcccagatacactggcctatttggagattggtttggaacaaatcatgtttcacttcaaattttctataaccctgagtctcagtaatgtttcatctttaatggtaaaatcactgccccttagatactctacatataaatataaactttggatatattcttttactttaaagcaaaattgagtataaatctgaagcaagaatagttgctatattaaaattgccttcttagagcctcatatgtagaagtccaataaaaagcagataggaattaaactttggggagtcttcagctcccttccttttgctactctcagggaggtgctgcagaacccttaggaatctgtaaaatggtctgaaagctacaaatctagttccccccagatcacattctccctggtggcatctggatttgctgaataatccagcccctttttctcgtgaggagctctagttctctcaaagcccttctttatggtgagcaaactttgtatcctttattacttttacccattgatcttggtactccccaagtcagcaggtaaactttgactttgttgaaactacacaaaataagtctaattcctctcccatgatggtggtagtgaggtcttaaataactgaaggcagctgttatgtcccttacctatgacttctttggcaggccaccattttccctgcttgtcagcctccttctccaacaaattgtactattctacatcatgacttagctcttgagggagcttgctgttgggtaaatcaatttctctagtaataaagccatgtgcctttatttttgctagaaattaagtcctaaactttataatttgtcccttcattatcttgcttttccataaattaaataatgaataaaagagtcacctcaggatgtgcagagaacagaaagatctttctgatattttctaaatcaggagttgagacaagataaataacttagatattttgctaacaattttctagaaactattggtccagcaggcttatttctgtgtcctcaaatatccttgttaaagttcagaatatttggctgggtaagccactatcaatattttaaatttagcaatataatgactttaaaattaggataatttattgtattattagcgtcactgttaagatactcacaaaattccatctttacatcatttatatgatccacagagagcgagaggcctgcctttcagtacttgatcaaacctggagcaaacccaaaagcataaatgttttattgccgaggtaactttggatattcatgttaacaatattttaagaataatacaacaatttctctaataaacatgatttttaggaaaatgtaaattttgtccaagcagttcagtttaatgaataataattatcatgatcacatgcatcagaatttttaggacagttgtaattactctcaaatatactctccataactgcttgtatttcccacactacatgctatgtcattcttggaaaatataattactgggcttgcaatttaaaaaaacggttggcagttagaatggcgatcattaaaaagtcaggaaacaacaggtgctggagaggatgtggagaaataggaacacttttacactgttggtgggactgtaaactagttcaacccttgtggaagtcagtgtggcgattcctcagggatctagaactagaaataccatttgacccagccatcccattactgggtatatacccaaaggactataaatcatgctgctataaagacacatgcacatgtatgtttattgcggcactattcacagtagcaaagacttggaaccaacccaaatgt

SEQ ID NO: 1241514 - DNA, 4001 bp, Homo sapiens
atcctacttatttcagtcacagaatatcatcatcattacctaagaaatttgtcatggatccctcttcatatggacttgcccattccacaataaactgatatacttcagcccaatgagtgatagtagttaatgattagctgagaggggcaggtggcttgaactcaggagttttgagaccagcctggccaacgtggtaaaacctcatctctactaaacatataaaaattagccaggcatgatggcatgcacctatagtcccagctattcaggaggctgaggcaggagaatcacttaaacctggaggtggaagttgcagtgagctaagatggcgccactgcactccagcctgggcgacagagtaattaggaaaaaaaaaaaaaaaaccacttggtattttctacctttttaatttttactattcttgtgggtgtatagttttgttttgttttaactttttattttgacaataatttcagacttacaggaagttgcaggaatagtacaaaaaattcctgtctcaaaaaaaaagtacaaaatagatctagacatgagagaattacattcaaaagcaacaaaagtttaattcaatataaataagtaaaggcttatttatacacttgaaaatatattggaaaacaagattgaaactactataatgtataaatcacaggagtgatgtatagcttcccagaggcaatagcccacagaacagtataaatcaagagagtcaattctcactctacctgctcctgaaactgagactgaactgagttccccaaattgtattcttttactgatgaaatcaaaagctgtctttaaactttcccacgttatttttccttataacttccactatgatcttttgctttatttaaataatagttaataagttcttatctttaatgaacagaataagttcttatctttaatgagcagaaatctgacctgctctatgccattttacctaatttaccaagttatataagttgattttgactctttacttttgctctttcattaaggatgtggctgcaattatgtctgcaatcccagtgcccattatgtatatgatttcgtgaaaaaaacttgtctctgcctgagctgcttcatggcactttttacctcctcattcctcaaggtgtaaatgaagggattcagcaaaggggtgaccactgtgtagaagacagacaccaccttgtcaatggagaagctggtgtctggccgagtatagatgaagatacatggcccaaagaagagggcaaccaccatgaagtgggccgagcaggtagacagggctttccggcgcccttcagctgagtgttttcgaagagaaaccaggatgaccatataggaggtgaccacggccaagaaacaggagagggagatggttccactattggtcacaatcagtattcctgtgaggtatgtatctgtgcaggccagcttgataacaagaggcacatcacagaagtagctgtcaataatgttggggccacagtaaggtagacgaatagtcaagaaggtctgccctagtgagtgaacagtaccccccaaccagagagcaaagacaagctgtatacagactctcatgttcatcacattggggtagtggagtggagtgcagatagccacgtaacgatcatacgccataatgatcagcagaaagatctcggcacaggcaaagagatgtaggaagaagagctgtgtgatgcagttgtcaaaggaaatggtctttctttctaaaagcaaaccctccaacatcttaggcacagtgacagatgagtggcagatgtcaataaaggacagattgctcaggaagaaatacatgggggtatggagacttggagtaaagactgtggcaatgatgatgagaatgttccccgaaagcgttagcatataaatggctgagaatgccatgaaaaacagcatttccagcacccggttatcagtgagtcccaagaagacaaattcagtcactcttgtttggtttagactgtccattcaatgagcttaggggggaaaaaatgaaagctaatttagttttattattataggaatagaactaattgaaatgactttgtattcttatctgaattgcttatttatcatcagagcatatagcttatgaaatcaatttaacagtagttgttacagtatacccactacttaccaggagccatgccaggcacttctatttaaacacaaccaccctatggcacatgaatcaattgtttctgccttgcagatgagatcagtgagcctttacaagaataaataaatgcccgaaaccttacacattagttatttggctcttttcacttcaaactaaagcactgataacattaagctaatattccaatacaactcccaactaaataatttgactcttctatcaaattagatatacattcaaagcctgcaacagtctgctgcacattttcattttttcaatgtgagtgtccttttattctccctattaattcttctctctgaccaagcaagtcactgtcctccaggcatcctacctccacctacttaccttccaaaatctttgtctttactttttcttttccctctgctcagaaaacatacactctattcaagtgtactctcctcacctcattgtttactattaatatacaaacaactccattaaaaatgggcaaagaacatgaacagacacttctcaaaagaagacatttatgtggccaacaaacaggaaaaaaagctcaacatcactgatcattagagaaacgcaaatcaaaaccacaatgagataccattggctattatgaaaaagccaaaaaacaacagaagaacagatgttggtgaggttgtggaggaaaagggacatttttacactgttgatgggactgtaaattagttcaaccattgtggaagacagtgtggtgattcctcaaagatctagaaccagaaataccatttgacccagcaatcccattactgggtatataaccaaaggaaaataaattattcaattataaagatacatgtacatgtatgctcattgcagcactgtttacaatagcaaagtcatggaatcagcctaaatgcccatcaatgatagaatgaataaagaaaatgtggtacataacaccatgaaatattatgcagccataaaaaggaacaagatcatgtcctttgcagggacatggatagacttggaagccattatcctcagcaaactaatgcaggaacagaaaaccaaacatcacatgttcccatttataagtgggagctgaataatgagaacacgtggacccactctacacctgtggaggtctgggcttaatacctgacgatctgtgctgtaaaccaccatgccacacgtttacctatgtaacaaaactgcacatcctgcacacttatccatgaacttaaaggtgaagaaaaaaatactattcatccttcactttgtctttgactatttcaaagaacactacctttaagaaaactttcctgacccagtcaaagcctatctattccctctcaggcttcttttatggtccttgacctgtaaaataaagtaaaataagatgttcatttttgctctccactaaatcaaaaaaaaaaaatttttttcgagacggagtcttgctctgttgcccaggctggagtgcagtggcatggtctcggctcactgcaagctccgccttccaggttcacaccattctcctatctcagcctcccaagtagctgggactacaggctcccaccaccacacccagctaatttttttgtatttttagtagagacggggtttcaccatgttagccagggtggtctcaatctcctgacctcgtgatccacccacctcggcctcccaaagtgctgggattacaggcgtgagccaccgcgcccagactaaaatttttttaagagtagtaaccacacaggacttatcctttgcagcacttagtaggtgccttgtacacaatgggtatgcaaaaacaatttttacttgaactgaacctaacttc

SEQ ID NO: 1241515 - DNA, 4001 bp, Homo sapiens
tttacttttctctcttctgttttcaaacaaatatgaaagaacaaatttcactttggattttcagtagcaaatgatttgtgtcattctgtacatttgtatgcgttagatactttactttttctttgaacttaaatattcaacatctgccatatttgcaaacagtttcaaagatatttgaaattttctgtgaataatgtggaattcattatagccaatttattctactttaaaaataagtaggcttctgacaaatatatattatatatttttatatatattatatattttttatatatattatatatattttatatatatatatacacacacacatatatatatatgttgttgatggcaccaaatacctagaaaattttgtaaaaagcaaaaatttatgtcaaataatctaaaggaaaacagaaaaaaataggaataaaatagtaaatagggaaaactataaatacacaaatatataataaccaaattataaattactaaaataatacataagataaagaaaagctaaaaatatataacagtaaggtgaaatccatgttgtaaaatgtgatactttttctactatgtcaatgtatgttgtaatgttatgaataaattgggtaaagatatcagaaattcagtatgactgtacattttgattgtcaggtctaaatttatgatgtattcaattgaagagaatcacaagcttagtaacatgaataacattttatgcacattggaatctctaaatctttataaaatattttaaaatattactaaatattttcaagacaatttgtacttttgaattataaacaatgaaaaaatagttaacattatatttaaatagaaccagagactgacttgatgcaattcccttgcacttaaaacaaaaagccaattctgtaactcaataacccatatgtctggcaaagatggttggcatgacactatgatacactggagggtcttcattctaattcaggattatgctccttcgtaatgatccctagtttttccaggagttcacatgacggtttctcagcttccacatggctgctttaacatcttcattcctcagagagtagatgatggggttcaacaagggagtacaaacagtgtagaacacagaaagaaatttgtccacaggaagtctgctaaaaggccatatatagaaataaatgcaaggcccgaagaaaagaatgaccactgtgatgtgggcagttaatgtagaaagagccttagatgacccactggaggacctgcatcggacaccgatcaaaatgatggtgtaggaaataattaaagccaggaaacagctcaatgatatcaggccactgttcgttagggtcataatttccatttcatatgtatccatgcaagccagctctatcaccaagggaaggtcacaaaagaagctatccacctcattgggaccacagaatggcaggtccactgtaaaagccaagtggctcacagaatgaagaacgcccaccgcccaggaaatagacacaaaaattacacagagcctccggttcataattgtactgtagtgcagaggcttacatatggctataaatctgtcatatgccatagctacaagcaacatcatctcactcccaacaaaactgtgaagaacgaatatctgggccatgcaaccctcaaaggagatagtcttgcgctcaataaaaaagtctacaagcatcttgggggtggcaaagttagactgacagatatcaatgaaagaaagattactgagcaagaagtacataggagagttcaaatgggagtcaaaagaaataatgacaataattaagacattgcctagcactgatgtcacatagactatagagaagatggcaaaaaagaaaagttgaagtccccaggaattagagagtcccaaaagtacaaactcagacaccatcgattcatttgtgtgagccatgtatccaatattcagttacctaaaaaaaagaaatcagaaaaatgtcacaatgattggcattacaatacctctagtttataaacaaaagaaatatagtcaattctaaacaaaagaaatagtcaatttaattaggttacatatatttacgtatgtaaatactcagttgactaatatttaacatccatgactgctatgaaagttgaaagagtgtgaaaaagaggattagatatgaatccctgtcataattagaaaaaactacacatactaaagaaatgaaaatataaaatcagaaacaggaaagtataagtgaaatacatgaatagtataaatgttaataagattaaagagattatgccaaagtggtaagataagttttagctcgaataatttctatttgtgctaaaacttctctaaagtttgaaatttgctagccaaaagtgaaggaaaagtcttttatttcaagtgaaatgaataacatgaataaagaatcaaaggtaaaaatataaagatgtacttcattcaggaaactgttagttgagtggcctggctggagagtgtgctaagaaacaataaaaattaaattaacgaatggtagatcaggagcaaatcgtgaatgcaattagccttaagcacaagactaaatggaactgagagtcataatgttcttggaagtattttaagaaacaaaagaagcggccaggcacggtgggtcatgcctgtaatcccagcactttgagaggccaaggcaggtggatcacctgaggtcaggagttcaagatcagcctgaccaacatggtgaaaccccgtctctactaaaaatacaaaaaaattagccgggcgtggtggtgggcacctgtattcccccctacttgggaggctgaggcaggagaattgcttgaacctgggaggcggaggttgcagtgagccgagatcacaccactgcactcctgcctgggcaacaagagtgaaactctgtctcaaaaaaaaaaaatgttaaaagaagaaaaaagaaaagaaaatgatagaaacaatttgctataatagagaaggaagagccaatggttacactctgaaaatttctctgaaggtcaagaacacttcctttcaaccttttaacaaatagttaatcaaagttcaccttctgtcacatagaaagcaattaacaataaatgaaacaataaccaacaacatgttttcagtctctttcttctgactgtgttttatctttctatacacacctgacaaacttgaatttgtcaaaatctctaacacctttcaggaatggtcctttaagaaatatctcatatagttcatttcaaaggcataagacattctcagaaaagttaactagtaagtaaatttgctcttaaatgttttttgacattttgcttaatacatgtggccacttggtcacagagaaaaccctacacacccttcctgaagtggttcaggaaacatttttgaccttagctctgtgtatccaacagtacacaacagatatttatttgtccttatactaactgaagctctgcacccctccatgttcttcagtggtttgttagaaccaggttatttagacatgaccaaaataataaatattttatattttaaaagttaaaattgtataggtaatggtaaaccaaattaaaaagtgtttaaactgttttcaagctttcattatgtagttttaacctggatgttggagcactatatcctacactttcagggctttccgtgtttgcattggttatgaagaattgaattggttttaagaagaatgcaggccgggcatggtggctcatgcctgtaatcccagcactttgggaggccgaggtgggcagatcacgaggtcaggagttcaagacctgcctggcaatcatggtgaaaccccgtctctactaaaaatacaaaattagtgtggtggcacacacttgtagtcccagctactcgggaggctgaggcaggagaatcgcttgaacctgaggggtggaggttgcagtgagccaagatcattccactgcactccagcctgggtgatggagtgagactccatctcaaa

SEQ ID NO: 1241516 - DNA, 4001 bp, Homo sapiens
actttttttccttcctgtctctcttttaaatttcagcatgacacagttttgaattccaaagagtgtcctatattttctattatatgatcagactacatttgacctacctctctatctcatctctcaacatcatagcccatgacccagctcaatgaaattatgtataggttctccactgtgtcatgcttctatgcattctcaacatactatttctttctcgtggaatgtctttcttttccatctagctgatgctaactataagtggaaaccttcctgccctgccctgattgagatgccattcctgcactctcaaagcaccctgtccatcatgtaacagtgctgttcgtgccatggaacaactgccaatttagtttgctcgatctatccataggctgtaagttccttgaaggcctggctatatcttctggcattctgtaggctcacaaaatatgtgaagaatggtgaacacactgtgtttatggaaaacaacttagtataatttaatacacactaatcagggattacccagaacatgcagttttctagcctgtaaggcacttggataaataaccgtgatgagatgtcatctgtgtgctttctctaaacatagattaccaataacaacaacaaaaaacctaacaataataatgtgttttctgaggtttaagagcatgctaaaataataatgaaagatgcatataaacaaggttgtatagacgaaaaaactaaatcacagggaacttatttattttcttcaaatttgcaccagagaaactgataaaggtgggatttaaatgtatacaagccaaactgtagatattatgtgtttgaccataaaagatcacaaaaaggtgtttgctttttaacaattacatctactatttcctcatatggaacttgaactgttagctggtacacaagttatagtggtttttgccattactttaattttgtcatttactttaatggcaaaaaccgcaatgacttttgcacgaacctgatacattaaaaacgagtttcttaaatgttcaaacaaacaagagagtgtctcttcaaaagtctcatctaaaaagtatgctttaaatttatatgcagagtctttttttaatggctgcttttacctcttgatttcttaatgtataaataataggatttaagagaggtgtgaaaattgtgtaaaacacagaaagaattttatctaccgagtatctgctgaagggccagacgtagataaagacacacggagcaaagaacagagtcacaactgtgatgtgagctgagagagtggagaaagccttagaggatcgactagcagcacggtacctaactgagaatattatgactccataggagacaagcaagaggaggaagcagaccagtgacaggagcccactgtcagcaatgaccaggagctgtaggatgtaggtgtccttgcaggcaagtttaatcacaaggggaaggtcacagaaaaagctgtctataacattgggaccacagaagggcaaagtcaacatgaaagccatttgactagatgagtgcacaaatccaactgcataggaggataacagtagcccagtgagcacccgtgggctcatgatggtcatgtaatggaggggtttgcatatggcaacatacctgtctattgccatggctacaagcaacatcatctcactcccacccaggaggtgcataaagaacatctgggaataacatccccaccatgagatggtcttacgttctcggaggaaatctacaatcatcttaggggtagcaaaagaagccaggatcatatcaatgcaggagaggttgctaagcagaaaatacattggtgtgtgaaggagcgaatcaaaggtcacagtcaccaagatgagcaggtttcctaacacaatccccacgaagaccacagagaatcccaagaagaataaaatctgaagattttgagatttggaaagtcccaacaaaataaattccgataccactgaatggtttgctctttccatatcgtcaactttatcccataatgatcaaaataagtgagaataaggggtagggaaatgatgcatattggaaagaaatgttcatgttgatgtccacatttggtactcagtcaaggcacttgaacttacaaggacccttacttttgtggaattttgtcagtcagtgattttactaatggcccagagaagtatcccaaatagtcagtagaattcagaatataagtttctggaagacaaaaataaaaacattaatagtacatgaaaccacaaaactataggtcatgaattagaatcagaagacctctacaggacacctgggtaagctgctcactgggtgacacaggacaagtaactctccttttgagggttttcttctcagtgaaaaaaagaatttggactatatggtatcgaatgcctctttctgctataaagatctctatgaataagataatgattctggtgagttttatagtcacagaataatattgagttttattaatgtggaaaggatatcaaaaatacatccaggattctcaagaaccatgttttgaaatggactctggtaaagaaatatgaattaggtcctgagaaacttaccttatttcctccatgctccattcttgcatgaatccctcacagatcagtattagcagtagtcactacacacttttgaagtgtcaagtatatgtatagtatatatatattaaacatgtatattacatacatttcatatatttatatatatttatataattcgttcattcaacatttcatattattcacatcaaatacctcctctagatggttagacaatgtgtacaaacaacccacagtcaaatgtaattgactaatttcactttcagcttgcattcatttattcatttacctggttattgctatgtagtggttagctggttggcctgtgtatggttgtcataggtttcaaaatgacttagcttgatgtaacatttatgttggtaaaagaaatacagttctttcagtataatctaaatttatgacaaaatttgtcatcggctcatgcttattacaaactggttctattggttcagcttttaaaaaaattgcctccgttgctaatagttttaaattaatctaggtcttacaaaacaccttcagtaaataaagtatttgtagtcatctttttgtgctgttattacttacaagacaggggaaaaaaactttcgtgatggcgtcgtacgtgaatcccaggaatggccttttatctccttttcctgtatccccatcagttatctgcaatttactcttccaatcatcagaaacagaaaaaatagagaccatagtgctatatgtttctatgagataatcccataggaacacttatccaactagggatgtatttttttccctatgtaaacatatctgttggccaatttcccactctgagaaactttgatgcaaaatattaaatttcatcaaatatgtaattagagccattcatttatatgtctataaaggtaatagctctcttcagttttatgactaatatttaagaattcctactaatgcttctttttgaaacccaatttttgaagctgcatttaaacagaagagaacaattttcaaatacatacaaagaagtttataaatcctccacatctggaatagtgcatatcaaaaacactaagtgaatatctgttgaatgaataaactatgtagtgcatattcaggatctagattaagtcagctgacttaatccacagaaaaatccacaacattaggaattttaacaatatttatttttaaatgtcaaattgaatgttgaagtattttaaaatcagaaatagaacagccattcttaaaaagctggttaaaatatgtttttttcttttaattatcttttaaaaaaaaaggtagtttatgccaatgtgaaaaaagcacatcacagataacagaaagactgactgaacattttaagagcttcttagataactttccagaaaaataatacacacttcagtacag

SEQ ID NO: 1241517 - DNA, 4001 bp, Homo sapiens
ttcgatgttaaaatgaatttctgtaatgaaaatcactggaatgtattcattttttaaataaaagcgttcagtataatacacatctactaggaaaagcatatttttaaaatcaataggatcttgaaatggtgctgtctttttcctcctttcaagcttccaaaattaggacaaatatttgctgggcattatttaattccaggcttgcctccctgtgccaaatgtctcctgctttgaatgatgcaatttccagtattgagctatgattagaaaataaaaattccttttcatattaacttttggggcagaataaactagtaagataaatctggttttagaaaatgcagagttcattccaaaatatatgtgtggagttgaagatacatatacatacgtgtgtatgtgtgtgcgtgtgtatatacacacatatatacatcttcacagatatatataccattttatcttattttacaaacataatcatacacagatacatacattacatatatacatatgtacatacatgtatgtatatatatttgtaataaaatacatgtatgtatatataaaatacataatatacatacatatatgtatgtatatatttgtaatataaaataaaatgatatacttttgttgaaattaactatttctctgtataaatgatatatatatcatttctctgaatatataataatatatcgtttctctgaataaataaatgacatgtatatcattttattttacattacatatatacatgtatgtacgtatatatattttaagctttgtatatatatacaaaaatatatatacatatatacttacatgtatatatatttgtaatataaatacatacattatgtatatatgtaatacattatatatacatatttgtagtataaaataaaatgatatattttttcttgaaataaactgtttctctgtaatataacacattacaaattatatcaatgtagtgtcagaatgaaatctttgagcagaattatattaaagaaattatatctgctgaatgaatagaaacatctaacactatggaaggctggatttcattgaaaagtcacccgtcggttttgcagtttcttcatagctgctttcatctcctcatttctcaatgtgtagataatggggttcaggagtggagtaaaaatggtataaaacacagacagcagcttgtccacagagaacctactgaaaggccgcacataaacaaaaatgcaagggccaaagaacagcgtcactaccatgatatgtgcagagcaagtggagagtgctttggatgtgctaccggcagcacgctgtctgatagcgaggaggatcacggtgtaggagatcaggaggagcagaaaacagctcaaggaaagcaacccactgtctgagatcataattatacccaagacataggtgtccatgcaggcaagtttgatcaccagagggaggtcacagaagaagctgtctacctcattggggccacagtaaggcaaatttacagtgaaagccacttgactgatggagtgcacaaatccaacgacccatgaagccagcaccagcctgatgcaagtctgccaactcatcaaagtcatgtaatgcaagggtttgcatatggccacatatctgtcataggccatggaaaccaggagcaccatctcagccccaccagtaaagtgcaagaagaagatttgagccatacatcctccaaaggagatgagtttttgatcactaaggaaatccctgatcatcttgggagtggcaaatgaggccagccacatgtccaggaaagctaggttccccagcaggaagtacataggggaggagtgcaggcagggatcagaaattacagtgaccaaaatgagaaggttacccagcataatggccacatagaccccaaagaaaaatataaagaaaaaattttgaagatgtcgtgaagtgcagagtccatgcaacacaaattctgacaccaaggaatagttctgtgggtccattgcctcaggtttcagactttgtttgtaatctaaataaagaaaaaaatcctgtcatttgcagcaacacctcaaggacattgtattaagtgaaataagccaggcacagaaagacaaatatcaaatgatgtcacttaatatgtggaatctaaaaaagtcaaacttacagaaatagaaagtaaaatggtggttaccagaggctgggaaggagaagggtgagggataagttcgtcaaagaacaaagtttcaattagacagaaggaaaaaattcaagtgatctattgtacatcattgcgattatagctaatagcaatatattatacacttgaaaatcactaagagagtaggttttgcattgtcatcacagaaaataagtatgtgatttagccattccacaatgtttacatatatgaaaacatcatgttgtacattataaacatatataattttcatttatcaattagaaagaaagagagagggaggggaaggaagaaaagaagtaagtgaaaatgcctgtcaactgcctggcacatgaaagtgatcaactaagtgttatctatgtataatttttaacttgcaagtgatactctaaaatatagactgttatatactaacaagcatgtatatttgcctttttcaaacttcagtgattcctgaggggcagttagacattctggaagacttctgcataggtgagagttgtaggaactttttttttccttctttccatggcctttgtccatataaaaacatggatcaatcaagtgcagtaggtgaaccaaaattccttaggaggattgagaatatgaagattttttcagggattctatcttctcaccatctctgtcgatatcattgcccaatgggtaattaattattgttaagcactaaatattgaaattaaagcttcacttaaaaataatgtcaacacgtaagacatgggaaactgaatgtacattattaagtgtctcttcctcttcctctctctccatttacacacacaaacacaaaactaaacctagcaaaggcatgttgataggtagatgtatctatgtatataaatatgattaacgtgtctttctcctgaatccaagagaaggaaattttgttcctcaatgacaaaatttaaaggagaaaaattactttaagctaaaacgcatgttttggatataacgactatgggcggggggtgatgtataaatacagatgagctcccaaatcatgtacccaacttatgtatgttgcttagtaattttataaaagtctcatttattgtgttatatgtgggttgtagaatggcttttctgatattctcagataatatctctgaggaaaatttgatctaaataatggctcgtttacataaagttttaatctaaagtgttaatctgtgctatcagggaggacagcctataattgcaaaacgtgggactctttcctctttcttgcccttcatcaataacctggatatgtataatttgcaagtttacagatagcacaaatctgacacgatttacttacagacttatagaatatttcaatatgctggaaatatgggccgtaatcagcaaactagagagaaaaggtgaaaggaggaagagagaagagtgtagactgataatcagcctaacagagacatagagtattatattattaatatatttcttcataatcacgcttttaatttgttgtaattataattcattttttcttaaaaaatgaataaaaatatttatggtaaaatgtgttgtaatgcttttgattaaatgagcgaaaaagtagatcttcttcaaggcatttgcatcttattttccagttaaatttcaactcaagaaattgcttcctatagagccataatgttgagatttcttccatatttaatctgcttggaatatttccttttttttcccaaccactttattaaggtacaatttatataatataaaatcatctatttaaaatatttagtcaatcattttttaattattttaccaacttggttat

SEQ ID NO: 1241518 - DNA, 4001 bp, Homo sapiens
aggaggggtaaatttatgatgaactctaaggtcttgaaatagggttctgtcattttcagagcctacactgggcaatttaaaaatgaaatatcaactgaattaaaaagtccacatagaaaagttataatatctaccaaatactaatataaaaatactctaagaagataagatcataaaaatctagggggaaaatattttatactaagattcagactcctactatcatgaagataagtggtagagaattataactcgtctctggtcccccagattattttatcagtactaaacagaagtggacataggccaatataaaacataccagtaaataaatttgttcaggtggttgtttttcatgaacaacatatattaaacagccactgtgatgaaggctttgtgaaagtgtgaaatgtaaatgccttctgctgggtagtcatgcccttttacattttactgtatctttcacaccattcatagacgtgtcttcatgtgctgtcagatatatagtgcagtataaaatgcattcgtatctagatctatcacatactgtatatcacatatcatatacttataaatagatctattatatctgtggcttggagatatgcacctatcattactccaaagttggtgtgagtagtactgttttcaaagggagagacaacagtatattaaccatttataaggtaatgtcattttctcaatgtcatcaaagtctgtatcttaagaaattttaaaataaagaatacaaagtaggatattaaaaaatatacaatggagaaagaatatttaaaatcactaaagtttatttcatgagtttttattatcattacagtttgcttcaaatcgatcaactgagctttcccacaggccaagttgatttgctttaagattacagtgaatccacttgtaagtgtatggagacagggctaaagtggtaacagtctcataagtttactttgtttctaggaaaagaacatttcttatgactacagaaacctgactaggcttcagataccgactcttcagttttgacatagctgccttcacttctttgtttcttagcgtgtagattacagggtttaaaataagcgtgaagatggtgtagaatacagcaaggactttgtcaactgagtaactgctgaagggccacacatagatgaaaatgcatggtccaaagaataaagtgaccacagtgatgtgagcagtcaatgtggagcgggccttcgccatgcttgcagaggagcgattcctaactgtaacaagtattacagtgtaggagacaaccaagaggagaaaggaactcagagaaagaaagccactatctgcaactattagtaagctgacaacataagtgtctatgcaggctaacttggtcactagaggaaggtcacagaaaaaactgtctaccttattaggaccacaaaatggcagattaacagtgaatgccaactggctggtagtatggatgaagcccacaaaccatgaaatgaggacgagcacaacacatacacgacggctcatgactgtcatgtagtggagaggtttgcatatagcaacataacggtcataggccatggaaactaggagcaccatttcactgccagtgaagagatgaacaaagaaaatctgggccaggcaggcatcaaaagaaatagtcttgcgctcaaccagaaagtctgcaatcattttaggggtagcaaaagaggcaacacatacgtctataaatgacaggtttgcaagcagaaagtacatgggggtgtgaaggcgggaatctgaggtcacagtgaggatgatgagaaagttgcccaacagaattgctagataaagtagtgaaaatgtaagaaacaagaaaggttggagctcccttgaactagacagtcccagcaacacaaattctgtcacccgagaatgatttgtctcattcatcgattttggaagggacttaatttcagctacctgaataggagagaaacagagatcagttaatgaagtgagcatgggtttgattttccaattacacttaaacttttcagaattccaattcctattgctatgtatgtgtctgggttttcatgagttattacaagttatacagctagtacagctaagtatggaagattgcgttaaaggggagggttgtcaaggagatgttcaaccaactgggatatctaaatacattaatttaagaaataaaatcaacaatctaaaaatgaatttgagcatctgaagtttttgtgacactacagaaatcagtctaaaaatctacggagacaaaatctaaaccaattttttctaaagtaaatgatataaaaattttttgaacatctgccacagaggaagataatttcacaaacttgatgacttaaaaagttagatacggaagagtatacactgtattggtctatttaaatgaagttcaaaaatggcaaactaaggtgtagaaaaacctcctagcagttatccttaagggacaggaagtggtcatgggaggggcttctgaagtgctggtaatattctttcttgatgtggttgatagttacatgggagtatttactttatgaaaacttactgaaatatgaacttttgcttttttcacttttgtatacataagttgcataattatgaaaattaaaacaagagagaaagagagacagcattagatttgcataagagagctcacaggagaaatcattgccttaagtgattataccttatttcttctctacagttaaaaattatataaactaaagtacagaaccctggcaaaattgaaaggccccaatattattggaactcttttatgattcagctcttcatggagttctactttatcatgaaatctagcacactggttcctttcaattaatccctgaaggtatgaagcttctttaaacttagccattggtgttactaaccatagacattttattgagctatgattgatatttcatttgatgtgatgtggcttaaaaacttataagttatattgcttactataaatactaatataactaataagttatattacttattactaaggaattcagaccaggaaaaaaatgatttttcttttctattcagttactctatattctatgttatcagagctttcttccttttgttatttttatttgtagaagctatttagaacttataaaagttttatggaaaataggaaaaaataaaatgtgaattttaaaggagcattacattatctgattttgaagaatctttctctacatcttaatcaggtcttgggagaggatgtcttttattttaatcatttctaaccacttgcaacttttgatattaatgtcttcttagatcatagctgcaaattgcttagtctctctttgggttagattggagggtttatttataagaacagaacacgtgataaataattttaactctcagaaaccaaatttggagtcacctctgtatttcaaatctccaattctccccccaaaaatacaaattttctcccttatttgcagataatgtgttccaagaaccccagtggatgcttgaaaccactgatagtactgaaccctatataagctatatttttcctatacatgcatacctaagataaagtttaatttataaattaggcacagagagagatgaacagtaataactaacaataaaataaaaaagtataacaatatactgaaatagcatttatgtgaatgtgtttcttttttttctttctctcgctctcaaaataggttaatatttttggaccacagttgacctgaggtaactgaaactgctgaaaacaaaaccatggataagggaggactcttgtattatcacagattatatcaaaactatggctctaggctttttggaagagtttaacaagtggagcttgaaggtaaagcaggctaccgaaaaaaattatacaaatctctctttcttctcacttcccagaagtcctgacccttcaatcctgtgacataaatactgcattgaatccctaaggcatgaatgga

SEQ ID NO: 1241519 - DNA, 4001 bp, Homo sapiens
ccccaatcaatactcttgtgatttcctatgcctgtctttactttaatctcttaatcccatcatcttcttaagctgaggatgtatgttgcctcaggaccctgtgatgattatgttaatggcacaaattgttcataaagcatgtgtgtttaaacaatatgaaatctgggcactttgaaaaaagaacaggataacagcgatgttcagggaacaagagagataaccattaggtctgactgcctgggagctgggtggaacagagtcatatttctcttcttacaaaagtgaataggagaaatatcgctgaattctttttctcagcaaggaataaccctgagaaggagaatgcattcctagggggaggtctctaaaatggccgctctggcaatgtctgtcttacacggctgtagataagggatgaaataagccccagtctcctgtagtgtccccaggcctattagggtgaggaaattcctgcctagtaaattttagtcagaccggttgtccgctctcaaaccctgtctcctgataagatgttatcaatggcaatgagtgcccagtggggcataaaacttcattagcaatgttaatttcaccctggtcctgtgatcttgctctgtccccatttgccttgtgatattttattgccttgtgatgcatgtgatctctgtgacccacaccctattcgtacactgcctcccttttgaaatccataataaaaacttgctggttttgcagcttggggggcatcacggaacccgctgacatgtgatgtctcccctggacacccagctttaaaatttctctcttttgtattctttccctttatttctcagaccagtcaacacttagggaaaatagaaaagaacctatgttgaaatattgggggctggttcccctgatattcctcccaaagtgtggggattacaggcatcagccaccatgcccggcctctaccattatatttttaatctaagtatcttctctagaattcacaaaagctctccagagttttttcatggatatcttcatttctttgtttctcagagtatagataattggattcaagataggagtgatgatggtataaaacacagcaaggaacttatctacagagtggttgccgaagggccaaatgtagataaagatgcatgggccaaagaagagaatcaccactgtgatgtgagcagtcaaagtggaacgggctttagattgcccagtaggagagtggttcttaatggttatgaggatcagactgtaggagataagcaaaataatgaaacagctcagggagattatgccactgttggcaacaatgactacctgtacaaaatatatgtctatacaggcaagcttagtaaccaaagggaggtcacaaaaaatgctgtctaccacattgggaccacaaaagggcaagttcacagcaaatggtatctgaaaccctgagtgaaggagacccaagagccatgaggtcactacaagcaaaacacataccttcttgttcatgatggtcatgtagtgtaggggcttacaaatggccacatatctgtcaaaagccatggagaccaacagtaccatttcaaccccacccagtaagtgaaggagaaatatctgagtgaagcacccagcaaaagaaattaccttctgcttttttaacaagttcagaatcaccttaggggtggcaaaagaagcaagggtcatatctacaaaagagagattaccaaggagaaaatacatgggagtattcaggttaggggtgttaaacactgtgactataataagaaggttacccaaaactgtgaccacatagataaccgagaagagggcaaagagaagaaactctacatcctgggagctggtcagtcccagcaaaatgaattctgacacttgagattgatttaatagtttcatggcctccatcctacagctcgctcttggatgacctgtagagagaaagaaaagatcactcataccatggagtatgagtgaaaaataaagagccatatgaaaaaccaaacttatgcattcctttggatctttcaataaacggaccttgaaatttagtgtcagtatctattaagtctgaaaaaggagacgtatagtctgagctgtccacttccataaaagagcaatgacctattgatgctgttggtttcccagaagcaaaccacaagctctggagcatataagtgtatcttcataggacaaaagagatagaaccatcttcaggaaatctgtgactttctgggttgaaagatggtttagtctgaattccttggagaacaaagggtttcagcacaacctctactctttcaaactcaaaattttaaatttgagtgaatattggagttgttattttcccataatgaccttaagaaattctgttttagttctgaatcatccccagagttttgaagggactctgactcagcagatttaaagctgctctagataagtgagttagcgaggttgcaagtaatgcatactgctgtgtttttcctccttatcttccaccagtgggcttctagtcttgtaactctcttagaaagtctttttggcaaatattatttttttctgatgtgactgctactactcatggcctcctgtggctgaaacccatatttctaaataatttctataaggccaaaggaggctgagattaagcaacacggatgaatactctggggctatgtggccttgtcacattctaacaagagccacatattacagaggaagcaagaaagacaccgtgaacaaaagtggcattacttgtgacatctaatgtcttgattcttgcttccagttcacatatcacatcccctttatttataaaattgtataccttgagcaaaccaggtttaacaatttatacctgaaccctagtcttcactagaactccattcacatttatttacataacactgatctggtgatgagtggcaacagcccccatactggagccttcaggctgaggatatgactgtaactactatatggctaaaactagtagatcactatgttccaatctggaaaataatataatgtatgtgtgtgtgtctgtgtgtgtctctgtgtgtgtgtgagacagattatgcagaaaattctgattaagaagcagaataattaatctcataaaaaagataggtcagattgaaagtcatgtattctgtgcttctgtgagttacaatgtgagaagaatcagtaggctatttggagagaacattcaaatgaagatggcagactgggactgagagccacctttgtctccaacagctgccttatctttccctctgggtctcagtttcacgattggtaaaaccaagtggttgcgttcaaaccctgagttccttctcaggcccaatacttcataggcctgtttttaatgtgcctattattatcttttatgaatctattattctatccccatttcagagttttattacttgttagctaatttgattttaactttgaatcaactcaaatacaaatatcaggtatagctgtgtgaaaaatagttgtctaaaatttgtctgtgatatatctttatctcctttcttagtaagtttttaaaaattgtgacattatctttgctccagggccatatgaccccattttgctccctagagctcatgtcacttggtcactttactatgctagtcctcccccaaattaatattaatatagttaacattaactttaagccctaatatatttatttactatgtatgcttcagaaagtttaaaatatatagaccctttgagatctttcacctctcagaatttatcataaggattatgagtgtgctataaaatcttcatggtaacagtactgtagatacacaaaagttgaaacattccaaatgttctaaattgaggcttactttcttattatttctggattatagaaaattataggatgtaatattgcatctttaatgaaatgatacttgagaaaactatataataacatgaaaatatttacattattttaagttaaaaacagt

SEQ ID NO: 1241520 - DNA, 4001 bp, Homo sapiens
ttcctctttcaatacttgcaattccagttagtaccagcaggtggtagtaatactttgtatacattaaagctaatattgaacctaccagatttatttataacagtaataaaacctatttgtgtacaaaaacatacttattacattgacaatgtattactaaatgcagattcattatttttacatccaaatatttcaagaaaaaaataaccaaaatggaaagcaatataacactttaaaatgaaagcatggactccccataaattcaactgttataaactgtgtctctcaattctagttttaacttcttaggaactaagcaaccatcgtgtctgcacaaaacaaagtgtactgatctgcaactcatttcatattttctgatttgcagaattctccagcctccctactcattccgcattatcagaaagaaatatcatgactgtattgctttgatgatgaactaaaagtggttggtaaagattgctacacttacggcaattttatggacgtcattaacattcgaaataaaatatatctagagttttctttaatagaagagatcacaaattggtttaaatgttaagtaggagtggcttgggaacgtatgtggaaaatcattgcttctctgtcagaggctaagatcctacagcagtatggagttcctaaggattataggaatcttgctagcttgtcatactttaggagcatctcactaagtgactcagttgctcactgtgggtaattgtcattatctcctagttctgctttaatctatatttcttctcctcattccttggtcctcttttccaataaattgattattgatattgaatgtcctaactggaactgtcactcctgacatttttatagtctttatttcttttaacttgcttttctgaaatttcaaatgtattttgaacacattcacattcatgagaatagtttcaaaatgcactgaacttgagccctcacaaattcttggcaattacaatttggtaagaaccctctagaaagaaaagcctaacacagcattgtgtctaatgttctgtgtcacaaaaactatgaaggcattgccttattaaaatttagaaacctatttttcagtttcctcatggctatctttacttcttgattcctcaaagtatagattattgggttcagagtgggagtaaagatggtataaaacacagacagaatcttgtctgtgagaaagctgcttagtggccacatgtagatgaagatgcatggcccaaagaacaagaagacaacaatgaaatgagctgtacaagtagaaagggccttagatgatcctctggaagaatgatgcttcacagtaaccaggacaataacatatgaattaaataaaacaataaaacaggacaacgcaattatgccacttgttgagatcataaagaggcccagaacataagtatccacacaagccaactggaacaccacaggaaggtcacagaaaaagctgtctacctcatagggaccacagaatggtaacgtgagggcaaatatgacctgactcattgaatgcataactcccataatccaggaagccaccacgagagcaacacacacctggggactaatgacagaagcatagtgcaggggcttgcatattgcaatatacctatcaaaggacatggccatgagtaagatgatctcagttccagtgaaaaggtggagaaagaatatctgggtaaggcagccatcaaaagagatggttttgtgacctgttaggtaatctgtaatcatctttggggtggcgaaagaagcaagagacatatcaatgattgaaagattggtaagcaggaaatacataggagagtgtaggtgagggtccactataactgtgatgactatgaggctgttacccaccattgttgccacataaagcaatgaaaacaccataaagaaaaacatctgtagttcccaggaattagagagccccagcaaaacaaattcagacatggtagacttattgcccacatccattgtcttgattcataggcagaagcctgtatcacgaaaaaaaaaaaaaaaaaaaaggaaagtcagattcaatagaagcaaaagattcatttccaattatctactttcagaaattttatcttctcataaaacttaccttgactattctttccatccttctcatttggtatattgttttgaatggaaattatgaaatattagagcttatagcaaaatgttccttaaatcataggtattgaaaagaacactttcttttctgatactaatggcaatccaaccaagataatatcattctgaacagacatacctacctatttgtccatctattcatctgtgtaagtctaacgataacagtaagaacttactttatgctgacaatgtgtgaaacacacatacacatacatgtttagtcatttggaatttgtccataaagatatccttactgatgaaaacatataaaaattatatcacatataagggctcttaagcacattatagtgaagtttcgatggacagttgtagagctcttgtaaatttccagagatgaactgttaaagtattcccagataaagtttcctgtttgaaactcaaaagaaatacatagaaagttagttttgctgatattcatccagagagactaatttattacaatacagtcatacagacaaaggaaaggcatttaacttcttttggtcctttctttttaattaaaatatgactgtgttccttataaatatttataattctatgatttaaaattttatatcacaaaggatatataacaacattttcatgggaaagtgctcaaagatcagtctctttcatttcacctctgtttgaattcttcttctgtaaatgttaacatatgtaaactgttgtattgacctaagcttcatggaatagggattaggaaatgggagtgggaagggcaaacatttaaaatatttcagtagaactcatttgtaaaacacttttacttatcagatctatagaagaaccagggctttagattattcagtgttaagtaggcttctgacagagcatcgaaggcaatttaaaatataaataaatgacctagttgaatcattagttgtgtatcagctgtggataaaatggatgttgtagggacatgggaattgaacaagaaatcaccttgcaatgggatttattaaacaacaaagatggcattattgagttgacaaaggaaagatatttcaagaatcttatgggaatttacaaagattgttttcacctggacctgagagagtcagggactagaagttgggaaagtcctaatttcaaaaagcagcaggaaatatcaaatcaactaattctaataagcactcttggttctctaatgctatattagaagcaacggagaacaaaatccaaacattcatctctgcttcaagtaatttacagttatttggaaatattaaacacctataaataaaacaattggtgaaaaataccaccaaataaacctcatgttcagtcaattctcagagaccatggatgaactagactttagttaaaaacaaaaacaaacaaacaaacaaaactggtaatgtgcagaatcaatcaagcaagtgttcttgcaggagacatgtcatgaacttgacttagaatgaaaactaaaatattaattggcagaagaaaaaaaatgcacggggaaggaaaacagtgcagcttatttgccatgaaacaggatatttagttagcagtttagaagagcaagactgcctttctaaaaatttaacttgatataaaagataacgggtcattttaatgtcaggggcagaattatgattatttgaaagcagtattatgtaagcatttatttagatagtttggagaagggagaaatttaatacagatcatttaatgaaatggatataaggagataattttgactaagttaccagaaatgtgaatgtgattgtaattaattaaatgagacatccaagtaactgtcattatgaatatttttatttattgaatac

SEQ ID NO: 1241521 - DNA, 4001 bp, Homo sapiens
tactttgaaaaaaaaaaataccataggcctaaaggagagaaaccaaagaagaaataaatgtggaagggtgatgccctgcccaaggttgagtttcagaactctttggagagaatatgagtgaggccccctagatggagagaggttctctgggttgcactggaccagatctagtccacagaaggtgaagtgaagatggggatcagagaatttaaggccaaggctggcaataaaacttgctggaggatgagtaccactgggtgcctgaacataagccactggcagctgcactgtaggaacaagaagagaagtggcacaaacgaaaatcttggtgttgaaatagttcagctttctagattctcctctcttttctgcaactcataatctaaaaggaaattggaattatctagccaatcagaggcagccctttaaatgaaaggtttaaaatggaagcttctgagtatgtatcattccatattttaaagcattttagctatttgaaaaccgtatgggataggcataattgatttttgggggggggagtctcataacctaataatctccacttgaacttaagcagttatattaaattgtagtttggctattccctgaagttggcaaaattcagtttcagattcttaaatactattcatccacatagaagttttaggcatgttgttaagaaaactcttaaaacctgacaaatgtttgaatgtatgcccaccagagaattaggttctcattgatttttttcttgatatttacatttaccccgtaacaaaagcagtaaatgcatacatattatccatctagtgcccatattttatttctagaaccagtaatctaaacagagatttttccatgtttttatatttaactttcacttgatacctagaaaaagacttgttaatattcattaaatgttctctatattatcttcttcactactttccccacaattgagatacaccacaaaaatacattaaaatattaaacagtgtattgacctgaggaatttgaaggagttttgtcttaatgaaaggaagttctcactactagtgacatttcagaaattctccttggcctcaggtaatggttcacaattttccttacggcagccttcatatccctattccttagtgtataaataatggggtttaggacgggggtgaaaacagtgtaaaatatggcaagaaatttatccaaaggagagatggtaaagggccacacatagatgaagatgcaaggtccaaagaataatattactactgcaatatgggaagccagcgtagaaaatgcctttgccattgcagctgaagacttgagccaaactgtaacaagaataatgatgtaggagctgaccaagagagagaaagtgcttagggaaagaattccactattgaccacaattagtatttcaatgatgtaagagtccaggcaggcaagtttggtgactcgaggaagatcacaaaaaaagctgtctactacattaggtccacaaaaaggcaggttcacagtaaatgataactggcttaatgtgtgcaccaagctcacagcccaggagatcattaccaagacagtgcatgtccttcggctcatgatgaccacatagtataagggtttgcatatggctacatacctgtcataggccatcgaaacaagtagcaccatctcccctccagtaaaaaggtgaataaagaaaatttgggctatgcagccactgaaagatatggtctcgtgtgcactcagaaaatctgcaatcattttaggggtagcaaaagaagcctgacaaatgtcaacaaaggaaaggtttcccaagagaaagtacataggggagtgcaggctggtatcagaagtcactgtgaggataatgagaagatttcccagcacaatgactgtatacaacacagagaagaaacaaaaatagaaaagctggagtttttgagaactacagagtcccaacagtacaaattcagacaccactgaagaattggacttatccatggttccaagctgcaaacttgttctgaaacaactctaaaggaggataaatagaaaggaatcagaatttgaattaagaatacttttaaggtgagggattctgagatctcagatataatgtgcatttgctgaatgcaaaaattttgaagaggccataatagtatgtctggataggtggataataggaaagaacttatgtaaatgtctaaataatgcttaataatttaatcagtataattagaaccccttgagtttttggatagtccttgtcttttatacagtaggaaatgagcttacccaggagctgactcatgacaacaagactagaggagtgacctagagtccagctccacaagcctcataggttgacaaaaagtgtttacatttgcttgtcttgtggtcatcttacatcatcaattatacaacattcttaacttttgaagagatattcatggcttgattattattacatgatgtaaagtcacacagattaacttttggccaattattttatctgagctttaattccacaccttaaaaaagatgggaggtataaaaatacctactttacagaaaactttagagtttaagcagaataactcatgacattctaccatcaaagtaattgtattgcaacatatgatcttaatacattaaacaccctatattaatagaaatttaccttcgtgctcctgcaggagtcatttacaattaggcaattcctgctaaacagatactattgaatgtatattatactggcctatagttccaactgagtttgtcaattagttatccaataatttcttaaaacacatattatggcttacctgaattatctaaatcctattttctgttgattatccaagagtggaacctaaatttttcattttctttgcctatcagaattagatttcagcccacttacattctccctgctagagttctccatgatcttcttaaaacatctttataattaatgctggaaaatgaagtttaaaaaaaatttctggatagagaagtaaaaatgattataaacctctcatgctcttgaaaatatctaaaaatttgcatcgtatgtttttcaccctgtaaagacatacccctactgtataaatctagttcagttgaactggaaaaactttaaagaagtgctgttttaggaaaccatattagttctgacaattaactgttgacaacagtcatagtaagaggcctgagagagtaatgatctaattctagtcccatgtgagaacatgaacatctttttctgctaatttatttcatacaagaagccagagtctttcctttgtctctaggctacagacctagtctctcatttagatgaatgcagttgcaatccacaccgggaagccccacagtaaacaatcatattgtgtactctattggaagaaggttcagagaagcattccactgggccacattttggatatacattattgtaaactctggaactacggcaaacaaaaagatgactcattataattgtttaaagcattagtaacaacaaatcagtgtctataatatacaagaaggcaataactaagaggattctgaaatatgatgtaatcactttatgccatgtgtgactcattttgttcccccatttctaaaataaaagtgtccttgctcaagttcatgtatttattacataaaatgattaactctacctaacgaaaatgtttattgtatgaatgtaatgtattaagctaaaaattgaggcagatttaaatatagtgaatgatgaatcataattttaaaatttacaaatgaagggcaaagagagcttgcatttgttcagacgctgctagatagcatctactgtgtatacatgttttatcaggtgatctttacaacagacctttggaaaaggggttactaaactgcagaagagaaaaacaaagattagacatgtttactaatctgtggtcagacatctagtaagggtcagaacatctcagtggggatttgaaatcagataataa

SEQ ID NO: 1241522 - DNA, 4001 bp, Homo sapiens
agcaaaattccagaagcaagccatattatgaaggccagttgagaatttgaacctaagtcttcatgccataaaatagttttaatccagaaaatgacattgagagttacatttttatgacctaactctggctgcttatagagaatgcattgaatggaagaaaggatttatgtaactgatttaggattaattacaaagctcacctagcataagcaagaaatgatggtgtctttaattaagagaaaataagcttaattatcaatgcatactatttcaaattttgaatgcacttctcacttccctctccaacatgcacaaacatcagatttagcttataaatcagtaaaggttggaatcctaccagaggaaaatttagctgtaattttatgtaaagcccttaaaaaggtaaagctacatggtatattacacaaaataaaaaggattttgtttttatttttatttattgaagtttgaaagtcagctgtgtttacttatattcctcagagcatttggtttcaaaaagggctgttcgtttgtagttctactaaaattgtcgttccattggcatttttctctggcatcttatagtcactgtgctgttgaatttgtggactcattcttactttttgcctccattgattcaagaaactagaattgctttttctgttaacattatttaattcatgacttgttcatgatacctcatttaataatagtataaatttatgaataacattatcaatatatattaaaataacctctaataatattcatatcttcatgtattcatttacagttgtttctttattaatgaatatattgaatgtatatgataaaaatcctcaataatctttttatgtttatttatgtctatttttatgtctattttgctgcagatctctatccttatgtttataaaagtcttaaatgtaaaatttaaagtaatttagtattgtctttatgcgttattattataacataagaaaagtgaaatgatgcattatacataatctattcaaactatcttatcgtagcatttaaaagttaattatatagtgctaacatctagaaattctgtgcagaactaacatattggaaccgtaattttcttatggcctcttgcattttcttatttctcagggtataaatactcggattcagtaagggtgtgataactgtataaaatacggcaagagttttattgcttgccaaactactgaatggccaaacatagataaaaatacaaggtccaaagaacagagtgaccacaatgatgtgggcagacaatgtggacagcgccttggagagcccatgtgatgatttttttggtacactgaccaggatgacaatgtaagaaacaagcaagaggatgaaacaggtgaaagagagcagcccgctgtcagcaatgacaaataattccagggtgtatgtttcaatgcaagcaagcttgatcacaaggggaagatcacaaaatatgttgtttatgacattgtggccacagaaaggcaagttcattgttaaaactatctggcttatggagtgtaaaaaaccaattatccatgaaagtatcgcaaacccctttagcagcttgtggctcatgattgtcctatagtgcaggggtttacatatggctacatacctgtcaaaggccatgattatcagaagagtcatctcagcacccccaaagaagtgcatgaagaacatctgggtcacgcagccccacacagagatggtcttgtggtcagtgagcaaatctatgatcatcttgggtgttgtggcagtggagagacacatgtccaaaaaagagagatttccaaggagaaagtacaagggagaatgaagggttgacctacatgtcactgtgaccataatgagaatgtttcccatcacagtagcaccgtagatcagggaaaatgtcacaaagaagaaaatttgaagttcccatcgtccaaaaaatcctagtaaaataaactcggtcactagagatccatttttaagatccatttactcaactcagaaaggttccagaagttctttatatacaaagagaattaaaaaataagtcacagttaacaccaatattttcttatttctattagttggtgataatagttgatgatatgagatcatataattttaaatatatcaacacagagattagcttaaatattatatcactttgaaacaattactctgcagtaattacaaatcatttgaagaagtagaagttccattttctattgtttattccataaaatcatactcttatcaatggatcttgactttcttactcatttgttcacatataaagattagatactaattaattactttttattttgccttttattattatagtattctgtacctgcacttcttgagattatgttatcccaatatataaggaatacaagatttagaaaatgaagaattacattgttctacatctctgaagtaatttatgaaggtttttctatggttctaaactaaataagcaaacaaacaaacaaaaagcacacacacacacacacacaaatcaggagcaaattatacatggatgaaagtatataaatttatttaaaataatttttctttttaatatacatgtatacctcttttattgtgtttcactttattgtcctttgcagttatttaatgttttataaactgagggtttgtgacaaccctggatccagcaagtctattggcaccatttttccaacagcatgtgctcactttatgtctctgtgtcacattttggtaattcccaaaatatttatttcaaactttattattattattacacgttatttgatctgtgaccagtaatcttttatgttactattttcattatttttgggcaccacaagccgtgcccatgtagaatggcagacaattgataaatgttgtttctaacggctccaccaacctactcttccctcatctctctccttctcttcaggcctctctattctttgagatacaacaatattggatttaggccaattaatagctttgcaatagcctctaagtgttcaagtaaaaggaaaagttgcatgtcttttatttgaaataaactaagaaaaaactggagacagttaaacgttcagtggtttccaggggtttgaatgaagaaggagaaatgaagaaataagagaagtacggagaatttgcagggtattgaaacaattcttatctactatacttagaaatacataacacatttgtcaaaacccatagcatgtataacatcaagagtaaatcctaatgtaaactacaaatttggggagataataatgtgcaatgtaggctcaccagcggtaacgaatgtaccactctggttcaggttgttaagggtgggggagactgtatgtggcatcagagggcacacgggaactcttgtacttcctgctcaattttgctgtgaacttaaaactgccccaaacaataaagtctgtaaaaaagttttttaagccagaagtgattaagcttagtgaggaaagtatgtctaaagctgagacaggctgaaagctagtcctcttgcaccaaacaattagtcaattgtgaatgcaaagaaaaagttctcaaaggaaattaaaagtgctactccagtgaactcatgaatgataacaaagtgaaccatctttattgctgatatggagaaagttttagggatctggataaaagttcaaatcagctacaacattcccttaagccaaagcctaatccagggcaagaccctaactctcttcaattctgtgaaatctgggagaggagagaaagttgcagaataaaagtttgaagctagcagaggttagttcatgaggttgaaagaaagaagccattcttattacataaaactacaaggtgaagcagcaagtgctgatatagaagctgccgaaagttatccagaatatctgactaagatcattgataaagatggctatgctaaacaacagattttcaatatagatgaaacagctttctgttggaagaagacgctg

SEQ ID NO: 1241523 - DNA, 4001 bp, Homo sapiens
atctacctcttacattcagaagcttggagagtgagtttttagtgcttgaaaataggaaatcagtccctaataattctctaagggatcatgggaaccaacacatccaggtctctcaatgggaaataactctgaattaagcgctaacaaaaacagcacctaaccaatttaagtttaacatgagaggcaggattagcaattacggaaaacatacaaaagtggcaaaggagatgatagtttagaaaaaaactacacggctagatgtctaccaattccagtcaacctagaagctttctccccaagcctgctttcactctgaaggatgtaagtagggactggctataaaaattgctagttgcctggaggcttcatctggaatgacatgaatctcatgtatcagccaaattatactctgctttgaattcataaaatttgttttcataatgtgataaaattttgagttctgtctccaactgttgaatggacaccacctgaaatataaactgaaataccttctataaatgaatcctcattttccatcaactctggaaataagaggagataaaggacaaataatctgtttttccagacccagcaagatgtttaccagataccattccactgagccaacactgaaacttgacaatatttatttgctaacttgaagctagctgcatccatatgcttgccatttacttcatatttgtaatggacacgtctccatgtcttatttatttttatcaacatgttcccctcaaagccagagcctctgcagagtagttactcaataaacaattagttaaaatgtactttagcagattattattatatctcaaattctaataatgatctgcctggaatttcagggtaggtgtgagtaaatttattttcatcttaatgcctctattttttcaatataaagaggaattaatagagaaaaattatagtaaaattttaagaacacaaatgaacggaggaagtgaatgcagcattattactgcaaatacttcctgctttaggacaatgatcctcaggaggactataaaatgtataatttatctttcacttctcttcacacaaaatatatttggtgaccaccttcctcatggctgcctttacttccttgtttctcaatgtgtaaataatgggattaagtaaagggaatattacagtatgaaacacagacaccactttatctagggaaaatgagtcaaatgggcgagcataaatgtagatggatggcccaaacattagcaccacaatggtaatgtgggaatagcaggtggacatggccctgttggtattctcacctgagcctgaatgtttcttgagcaaggccagaaggaaggcataggacattaacagagcaatgaaacacaccacagagatcagaccactactacagatcatcactaactcctctgggaaggtgttggcacaggcaatccggacaacctgtgtgatgtcacagaagtaactgtctaactcattgggcccacagaaaggaagtcgaacaatgagagccacctgtattatagaatgaatgaagccccccatccaggagagagccaccaggatacagcagagacgtcgattcatgatggtagcatagtggaggggtcggcagatagcagcatagcggtcataggccatcactgtgagcaagaacatctccgaagccccaacaaagtgtaagaagaagagctgtgcaatgcatccaccaaaggaaattatcttcctctccacaaagaagtctatgagcattttaggggctgtaatggaagagtaccaaatatcaaggagggccagattagccaacaggaaatacataggagaagtcagatgagggtctagcctgatggtgcaaatgataaggatatttcctggtaggatgaacaaatagaaggatagaaatataacaaataggactagttggacctcccgagtctgggataggccagtgagaacaaattctgtcaccttggtgtaatttgcagtttccatttcttcaatttactcttttcataatataactatgaaaattaaagaaactataattagtccacatagcatttatctagagttatatcactgctttcaaaattgtcatacgttttctgtcactaacagattacatgaggatacatttggttgcccattttatatttgataaaccaagaaagagaaagtatgtgatgaacttataaattgggaacactaaaactatatgaagtgtggcatatatttgaaactcaaatctcggcttgttaatgttaaaaatcttactttttctgaaattcggcaatgcactacttcttcccccaaacatctacattagtaagcaatatgtgaagctacttctgagtgtagccaaattttagactggcaatcagagatgtggcctcttttttctagatcttattttttgttgcaaaatcatgccaacctggaaacttaggcttgcattctaatagcacacatacagatctagcagtattttagttgtgatacagaaaagagatcccaaggcttcataagtactgaatggacatatttttccataagcgtaaccaaaacctgtatagcttaatccttggtaacaggtaaccagccacaacatacagctatgcaaggccctatataaaaaattcttctagctgtgaccagattcatcaatacctgatactacattgagtatgaaatttgctcaccattgcaggaacttaagtaggtgtagtgatctgggaaatgagtatgcttgctacccaatttgattctgagctgatccgctctgctgtttcaaggtgacaatgggaataatattatttttaaaattttgcttactgccctgtattgaacctgacaccactaagtagaacaaaacttgtcaaataaaaatgaaataacagttcacgttaccaaatatgcttttctttaagtaaggttaaaaactgccacaccaaggtaagttttgttgtaaccaacagcaaatacaagagagttgtttcttttctgttgatgtgatattttatgatattgcctctcctattgcttaaaaaattaaatattaaaaggaatttttaaaaagttaaggttctgtaaaaccaaacagatgtggctgtgtccaaacacttatgggcactatgtatactactgagaaaagaaattaaatgcgccatttttggaacctactgactcaatttatacataattttaacaaacatagataaatggctttcagtatcttatagaagcattgtattttgaagaagggatggcttactacaagcagacacacacacgcacaaaaacagtgttttccaggaatctggtagcaagtggaagaaaggtaaaaatactcagaaattgagtaatgtgggactatttagaaaagggatcaatttccccatgtccataaattgcccagtatggacttcagtgagttaattaagcatatttaataagattgaaaaatttaaaatttggtttaggaagatttaatcaaaagaaagataataaggttatccagaatgacatatttcctaagattccaaaaaacaatgatcttactgtacttacctgaaggaagcagctcatagcccccataactaataacgcaacaggtatagcttataaatatatacttgtgttattagttatgagggcttgagctagttatatactaactcatttacattcactgataagtcaactatgaggttccaacaatcaaataaatttctaccaaaagcatctgaaatattatgatttactcagctcatttacatattttgctattatgccatgtagtttttgaccagatggaagtgattattttttcctaagtaaataattgtccctttattattgaaaggaggtgaatattttaaagcggtaaataccattacaagatcatatgctttttttattattatggggacatgatgcaatgattctgagtgtcgtcacacaaatcaccccttcctcctctgctctactccata

SEQ ID NO: 1241524 - DNA, 4001 bp, Homo sapiens
cttgtacatctcgtacgatatctagccagggttctctctatttcttggatttgcatatcatcctctctagcaagattaggaagattttcatggactatatattcgaatttattttccgagttgtttattctctgtccttctctctcagtaatggtaatgagttgtagatttggtctctttatgtaatctttctcagaagttttgttcacttttaaaattgtttttgctttatttttgtctcacagtgttaattcaaagaaccggtctttgagctcagagatattttccttagcttggtctattttgctgttaatatttccaactgtattatgaagttcttctagtgaatttttaactctagagtttcactttggttctttcttaaagtggttattttgtctttcagctcttctgtcattttgctggattccatggattggatttcaaatttgtcctgaatctcaatgagcttccatgacatccagatcctgaattctatgtctgtcatttcagtaatttattatgggtaaggaatcattgctgggaaacacacaatctaaccttgaatgaccttgaatgtaaatgagttaaatgcttcaattaaaaggcatagagtggcaagtcggataaagaagcaagacccaactgtattctctctacaagagacccatctcacatgcaatgacatccaggggctcaaaataaagggatggagaaaaaatagaccaagcaaaaagaaaacagaaaaaagcaaatggtctgattctaattccagacaaaatagactataaaccaataataatcgaaaaagacaaagaagggtattacatgaaggtaaagggttaaactcaacaagaagaactaacaatcctaagaatatatacatccaacacagaagtacccagacttataaaggaagttcttagagacctttgaagagactttaataaccacacaatactactgggagacttcaacaccccactgacagtattagagcattgagatagaaaatgaacaaagagattcgggactgagctcgacatttgacaaaatggtcctaacagacatctacagtactctccacccaagaacattagaatatacattcttctcatctgcatatggcacatactctaaaatcagccacacaatcgatcataaaacaattttcagcaaattcaaaaaatccaaaatcatacaaaccacactttctcagattacaatgcaataaacattgaaatcaatacaataaaatacatcaaaagcatatgtgaaaattaaccaaccttctcctgaatgacttttgggtaaacaacgaaattcaggcagaagtcaagaaattctttgaaactaatgagaacaaacatactacatatcaaaatccctggggcacatataaagcagtattaagaggtaagtttatatcactaaagaaaaaactacatcagaagattggaaagatttcaaattaacatcctaacatcacaccgagagaaactagagaaacaaaagcaaatcagtcccaaagctagcaagataaaggaaacaactgaaatcagagctgaactgaaagaaattgagatgcaaaaacccatacaaaagattaacaaatccaggttttgtttcttcagaataacacatcagattgatagagcattggctagactaataaagcaaaaaagagaagagagaaaaataaacacagtcagaaatgacaaagggaacattaccaccaaccccaaagaaatattttttaaaaaccctcagagactactatgaacaactctatgcacacaaactagaagaaattaataaattattagaaacatacaacctcctaagattgaactaggaagaaattgaaaccctgaacagactaataacaagttccaagattgtgttagtaataaaaagcctaccaaccagaaaaagcccaggatcacaggaattcacagctgagttctaccagatgcataaagaagagctagtacctttcctctgaaactattctgaaaatttgaggaggaaggactcctccctaatttattctatgaggccaacatcattctgatactaaaacctggcagagatacaacaaaaaaagaaaactagcaaaaaaaagaaaatactagcaaactgaatccagcagcacattaaaactctaatccaccacaatcaagtaggctttatacttggaacacaaggttggttcaacatatgcaaattagtaaatgtgattcaccacataagcagaactaaaaacaaaaaccgtctaatcttcaacaaggctgacaaaaacaagcaatgggaaaagcactccctattcaataaatggtgctgagataactagacagccatatgcaaaaaatggaaactgaacccctcccttataccatatatgaaaataaatccaacatggattaaagacttaaatgtgaaacccaaaactataaaaaccctggaagataacctaggaaattccattctcagcatcgcccctgacaaagatttcatgacaaagatgacaaaagcaaaaattaataaatgtgaactaattaacctaaaaagcttctgcacagcaaaataaactatcaacagggtaaacagacaacctatagaataggataaaatatttgcaaatgcatgcctgtagtcccagctactcgggacgctgaggcaggagaattgcttgaacccaggaggcaaaagttgcagtgagccgaggccgcaccactgccctccagcctggtgacagagcgagactccatcaaaaaaaaaaaaaaaaaaagttgtcaaggctgggcacagtagctcacgcctgtaatcccagcactttgggaagccaaggcgggtggatcacctgaggtcaggagtttgagaccagcttggccaacatggcgaaaccccgtctctactaaaaatacaaaaattagccaggcatggtggcaggtgcctgtaatcccagctactggggaggctgaggcaggagaatctcttgaacctaggaggtggaggttgcagtgagccgagatcacaccactgcactccagcctgggtgacaagagtgaaactccatctcaaaaaaaataaaataaaataagacatacactttgccaagaagcatatgaaaaaaatgctaaacatcactaatcattagagaaatgcacatcaaaaccacaatgagataccatctcacaccagtcagatgggctattgttaaaaagtcaaaaaataatagatcatgctggcgaggttgcagagaaaagggaatgcttatgcattgctggtgggaataaaaattggttcagccattatggaaagcagtgtggcgatttcacaaagtacttaaaaccaaagtagcattcaacccagcaatcccattattgggtatatacccaaaggaatataaatcattgtgccataaaaacatatgcacaagtatgttcatcacaggcatattcacaatagcaatgtcatggaatcaacgtagatgcccatcaatggtgaacttgataaagaaaatgtggtacaagtatactatggaatactatgcagtcataaaaaagaatgagatcatatcttttgcagcaacatgcatggagctggaggctattttcctgagtgaactaacataggaacaaataactaaatactacatgttcttacttataaattggagataaacgttgaatacacataaacacaaagaagggaacaacaaatacttgggcatagttgagattggatggtggcaaaagggtgagggtcagaaaactgactatcaggtactatgcttattacctgggtgataaatctgttcaccaaacccctgtgacaagcaattttacctatataacaaatctgcacatgtataactgaacctaaaagttaaaaaattaaaattaaaaaagtaaaagttatcccaaaacaagcagacaaataaggaaagcaaataaaaaaaatattatcattgcttggggtctggtggactcatttgg

SEQ ID NO: 1241525 - DNA, 4001 bp, Homo sapiens
ttatatatgcttattcaaataatcagagtggtttagttatctaaataataacttgtattacatataactattgatcattgcattcagggtgaaataatttgtaagtgaactcaagtttttatctaatgtttaaaaattacccattaggaataagcagaaatctctgcaaaactttgaaatatatagctaaattgtcttttcacagtttctgataaaatataacagttttaattttctctctctatcaaattagaaaaagtaactagaccttttaagtgttgacataaataaaaaatacttagcagcacgcactttccacttaatgatattttactactcatagttctgtaatcagaatcttgaggatcttcccttaagtcaaataggaaacattaaagagttactctcctgcttattgtctttcaagaatctccttttgaaatctgaataaattgaacttcttattgactaaaatgctctacataattttgcccctaccaaattctttgacttcaatttttgccattttcacattcactaaatatagtacagctgttctcttcctttttatggtcatcaaatataacaagctcataagatctttggattcttgtactagtcagcctttttgcctagaatttctgtccccagatatttgcatggttgtttctttcgaatcatattggtttcagctaaacaccacttgaggcctcacttaacaaccaaaagtaaggtaattaccacctccccagctaatctctagcataataccactttctgcttgctacagaacactgtttctttctgaaactatagttgtttttcaaatttaataaactgtatttatccccttgaataaatctaataacctgtatttatccccttgaatataaatctaggagacctggaatcttacctgtctcattcatatgcctggaatagtgcctgaaaatgggaagtacttaataattataatacttgctaaatgactgactgattcaatgcatgaatgaggaaatgatttagctaaattcaactggactttctccgttcttgcttttctctttcttctattcagcaaaacatatgttgacttaacaacttcctcatggaagctttcacctcctggttgcgaagcgtataaataacagggttcatcaaaggaaagatgacagtatggaaaagagaaactaccttgtcagctgggaaagcctggaaggggcaagtgtagatgaaaatagcaggtccaaacatgagaaatataatgataatatgggtggtgcatgtggaaatagccttgctctttccttcagaggagtgctcccttatacgacagaggatgactgcataggaggccagaaggcccaggaagcacaggaggctgagcaggccactgttggagaccatcagaagctccaccacaaaggtattggtgcaggccagcttgatgacctgtggaacatcacagaagaagttatcgagctggtttgggccacagaaaggcaagtgcaggataagggctacttgtacaatggaatggataaagcccccaagccacagaaccaacgataatgcatagcaggctctagggttcatgatggttgaatagtgtaaaggccggcagatggcgatgtagcggtcaaaggccatcacaacgaggaggaacatctctcccgctccaagaaaatgcaagaaaaagagctgagtgatgcagcttctataggagattaccttcttctcagagaggaagtccaccaacatcctgggaaccacaatgaaggagtaggatgcatccagtaaggccaagttgcccagaaagaaatagaggggggctgtgagcccagggtctgactttatggtgaaaatgatgaggaaatttccagggaggatgataaggtagaaaattaagactagcacaaagaccagaagttgagcatcttgagactgggtcagaccaagaagaatgaattctgtcaccactgtgaggttctgtgtttccataatttctcactctgcagaataaaatagggcaaattgttatctgttataaccaccttttcatctgttttctatctcctctccagataagaacattatttgtcccaaccaatgttccgtagctgaagacaacttatgtcttgtatcctgagttaacccttctattcttcatcctctttattcctcactaaaataaaatacgtttttaggtagccacatttccatgcccatttaacctcaggcttctaggtaacttcactcctgtaggattccaggctactttgcttgaagaatattagaagttgtcttattaaagcataacttaagcatgatcaagtttgtctgttttgtttgtttttgttgctgttagtggtggtccactgtctctaaatgttagattagttgctaggttttagttccctttcttcctgtcacagaataaagtgctttcacagttgcttctgccaccagttcctatggaattcttggttcctggttgttacctatatgactggtttctaaatttgttccttgcttattcccatcacattgttgtgctttggtgctcttgtgtattcttacttcaaactgatcaccaagatagcaagcaagatctgtatatttctcttaacttagaggaattccctagttaaagccttggctgagtaccactctgaatctgctctacaacctgttcttaagttctagttaatactaattcagtttcatctgctctctatatatctataacctacttcttcttcagatctcagagtgagagccaaatgatattcttttcacaaacatttttgcataatacaaaatttatcagaatatgtaaaagattttgactatctcggctaataaaattaaaatataatagagctggaattggccatacagaacatataatctgatgtactcatttgagagttgaaaaaatgcaattgcagagaagttttaaacttgcaatgagttttcttttctctcattatcaagtgatagaggaaagcaggtatttattcctcagtttacactttttagggaattatttatgtctcatcaattggcaatattttatttaggcacttaagtaaatatgatgctgcatgtctaaatattcccccttttctggccatagctttgtctaaataagtattctattcatgtcagagaaatctggaattaaggtttagtctgtatactaatctccaaaattagatgtgttcacccaaggaggtgcacaagataatccattgggatgcataaaaataatggaacttctctgcatattattataagctatgtttttaaaaatgtatttgttcacacctgtaatcccagcactttgggagaccgaggagggcagatcacaaggtcaggagatcgagaccatcctggctaacatggtgaaaccccatctctactaaaaatacaaaaacaaaattagctgggtgtggtggctggtgcttgtagtcccagctactcaggaggctgaggcaggagaatggtgtgaacccaggaggcggagcttgcagtgagctgagatcgcaccactgtactccagcctgggcaacagagcgagactccatctcaaaaaaaaatatatatatatatttgtgattgtattttaatgatcgtgttgagattattataaaatgttttataaataaatactcacatacgatgataccatgcatgtttcactattgcaatgaatgatttcaaagatgaaatattattaatgaaaacaaaatgctataatgtgatatgtacaaatgttacccttgacttttgactacatacaatatttattttcaaaagtgctgtggatacaatatcatgcaatgtgacaataaaaaggaagtactgatgcatgctataacatgttgatgcttgcacaaactctgtaaacatacttaaaaccattgaatttgtatactttaaatggtgaattttataatgtgctgattacatttcaatataactttttttttgaagca

SEQ ID NO: 1241526 - DNA, 4001 bp, Homo sapiens
cggggtttctccatattgctcaagctggtctcaaactcctgacttcagatgatctgcctgccctggcctcccaaagtgctgggattacaaagagctttcttgattgattgcatttcttctaagtggtcatgggcaagtcacttaactctgagttcattctcaaaaatgaagttaagtaaatttattcctcaaagcatgtttgagactcagaggtaataactgtgagcatctcaaaaatgagtgctttcaatcacagttcatttcttcctctgttcctttagaggttaaaactcttaaacattatggtcagttgaagagccagcttatctattcacccccactgtaattccaatcaaagaaaaactcagtgtgaaactaggtacctcttcttgagaagcctctacaacagaatactaacagcttccatcacccctgcactcctggacttcctttctctcacgcataaactttgttaagagcatatgttcattagactgatgcctgactacatttctaaaacttgggacactgtggaacacagttctgaggtaaatactacacataggtggttgttactgttctcaggctttgttataacagaacaaagaaattcacactacttcagaaaaggatctgatgagacatcagaaggaacttcctaacactaggaatcattaaatgctggaggaactgaacacaaaaagagatatatcttctttcatttgaatagattaaaaagtggaaaaaattgaataaatgaacagtacttagagacataaagatagaaaagttgatctttcaattaatgcttgttatcgtttgtggccagtaaattctactgagttcctgagttctcttgattatggtcaaaaggcataggtggctttctagagtgccacctatgcttttaaattgtaatcaagagtgatccattataatctttatgctatctcctcttttataccaacgtcatcaaagtggtttttacccatgtacaagatgagttaagagtcttccaagaaagagtgtgtttttcaaatcacctcttctgctcattccttaacaaggcaatggaatgccacatggttttatcctcagcttcttcatagctgtcttcatatcagtatttctgagtgtgtagatgagggggttcaacataggtgtaatcactgtgtaaaacaaggagaatatcttatccacagagaagctgcagaaaggcctcaaatagatgaatacgcatggcacgaagatcaggctgaccactgtcaggtgagaagcacaggtagagaagaccttgttctggccctggcagaagtgtgttctcagggtgatcaggatgatagcataagagaatagtaagaccaagaagcagacaagagacagcagaccactgttggctatcaccagcacctctaccacataggtgtccatgcaggccagcttgatgacttgtgggacatcacagtagaagttgtccagttcattgggcccacagaaaggcagctggatgactagtatgacctgcatgatagagtggataaaacccccacaccagcaggcaagaaccaaccaaaggcatagctgggggttcatgactgtaaggtagcgcaaagggttacagatggcaacatacctgtcataggccatgactgtcagcaaaaacatctcactggctcctagaaagtggaggaagtagatctgggccaggcatcctgaaaaagagatgctcttgccctgctgtaggaaatcccctaacatctttggcacagtaacacagctcaggcataggtcaatgaaagagagatgacctaaaaaataatacataggagattggagcaggtgagcatgggcttgcactgttaccactatcaagaggtttcccaggacaatagcaatgtaaaaaaacaaaaatagtaagaagagaaatagctgcagctcccaagaagatgataggcccagaagaacaaattctgtcacattagaatcttgttcttttttcatcaagccaagaatatcaagtgacctaaagaagaattaaatcagaacaagggagatttaaggtagatatatatgtgtacactatatacatatagtatataatatataaattacataaaaattattttagcaagttttatcgggtaatataggcagtacactcttatattgatagaatgaggaattttgttcatttcttccaactctttattcctgtagtgcttttaaattgcattcacaataaacaagaaagaaacacaatgacgtggacattaggtgataagtgctaatctttccatttcttttaatagacagaataatgtcctctaaggacaaaagttctggaatggagtatctagattgaatgcctagctccaccattatcaatggagtactctcaggcaagaaaataaacctctctgaattttattccttggttattcaatttaatgcacagttaataatatctcccaagattgttttgagaatcaaatgtaatgcctatgtgcaccataaaaaaaactaaatctctcaagatgaggaaatatcttactcatctttgtatccgcaacacaatacttactgcatagcagaagctcaataatttatcaaatcgaaggaagaatgttttgtaaacaacaaattgctatgttgtacaaaggttagtagttactatgaataaatatattaggaaacaaatcatttaggaaggattgaaacagagctcatattttttgtctttactatcccaggtcacagaaattaggaagtttgtaaaaatgaggtaagaagcaatagtctcaatctttaagatttagggaagcgtcagactcgggatgagtaggataatgattaaaagacactaatcaccaagagaagagaccaagagccatgacccatatcacggaggcatgcacaaaagcccaccatgaccctttacaggacagagtaataagagaaaccagagttgtgttgcttctggacttttcaacaaccatagatacataagaaaataaagaagatttgctaagatattgttagatccattttcccctgctctacactcatattcatccccaacatttgatgacagtaccttggattacaaacagaaaatcagagaacattgatacatttcttccattgaagtagttaaaaattagtagatgcctgtctagaatatttttttatctaaaaccagctatagacaaaatatgaaataagacaaaattttattttgtgtcccaagctttgtaatccatgttgcactgggttctatcaagtcattcagagaatgttatccaataaaatccttcatactagatatcaggtatttacatagacaatgcagaaaagtacttaaattctaaaaatgaaaacctctaatgacaacaaaactttctctaggatgttattccaagataagccagtgagagagagatttgggactcaagccacctttggatgcctctgtcacaccatgattgtgaccatcctcttcatctgcctatatagccgagtgcacaggtgtatctaaatctataatctcataactgatagaaggaatcacctcactttctagagtcaattggaaaataaaacaaagaaagaaatacaagttagggaacgatttgctgttacatgtacagcctcacttgagctctgctatattgaaaattctctaatcttttttggatgcaccaaggattgtaaatttccataagaaaatctcattttgatgttcttttcagttatctaaaatgtataattaacaggggtcaagtctcattaaaattattgatctaatttttaaaataatcttgggaaaactggaaaagtctgagaaagagaaaccaaagttatttttttaattaaaaaaggtttctagaagccagaaaacaatgggaacacataatcctacacaatgttataatttagtctcagaatatggctgagaaacaaagtgattatttcctaatgtgaaggcatagtataccaaaggt

SEQ ID NO: 1241527 - DNA, 4001 bp, Homo sapiens
aatgacaggccagcatggtggctcatgcctgtaaacccagcacttcgggaggccaaggtgggagaatcacttgagctcaagagtgcaagaccagcctgggcaacatagggagaccccatctctacagaaattaaaaatagccctctgaagatgagtcttatttagggcatttggctttgtagatgaaactctgtcatagagagggtcttctctccttggttggctggttggttagctgacaagcattacctgagcagcaatggaaaatataagagcaatatccacaatttggtcttggggatcttaaaaattctaagtaatgaaacagtcactcaccaaatatatattcatagttttccatttgcttagctctgtgttctccctatcaggaatttagccaggtgtggtggcatgcacctgtagtcccagctactcaggaggctgaggcaggaggatcgcttgaggccaggaggttgaggctgcaatgagcaatgttcatgccactgtgctccagcctcgggggtggagagagagagagagacagagagagagagaaaggaaagaaggaaagaaggaaggaaggaaggaagaaagggaggtggggagggagggagggagggtgggaaaggaaaggaaatacactaactgggaaaaatgaatgaagcatctcaacatggattactaaatcttgccaacaggttgaattatgcaacaagcagacacacccttctcacttcttagtctctaggacaccatcatttcttctgtggcaggtagatgcagaagcacctgcagaccagagggcatgcccaatattcacaggggtgggcatgggaatgtgctcagggtgacaccacctaaggtaaaagttcccttgactttctaaagatatgtggtaatgcattgagaaatcattccattgttttcctaccccaaacctttattaaagctttcttcacatccttgtttctcaaagagtacatgagggggttcagcactgggatcaccactgtgtagatgacagcaactgtgcggtcctgggtcaaggagtagctggacctggggcgcaggtacataaaaagtgttgtgccaaagaagaggcagatggcagtgaggtgggatgcacaggtggaaaatgccttaaacctgccctgggccgagctcattttcaggatggtgttgagaattaagaagtaggagatcaagatggtgagggtgcagctcaaaaggttgaaaccagcaaaaatgaagagcaggatctcacacagtgaggtgtctacacaagacaaggacaggatgggtggcccatcacagaagaagtgagtgacgacatgagcaccgcagaatttcagactaaagatacagccagtgtggataagagaattgaggaatcctgcactgtaggagcccacaatcagcgaggcacagacctcaggagacatgatggttgagtagagcagggggttacaaatagcggcatagcggtcataggccatggcagcgatgagatagcactcactggtggcaaaacccgcatagaagaacatctgagtcatgcagccaaaataagagatcactttcctcttggccaagaagttcaccagggtctggggcacaaccgtggaggagtagcagaaatccaagaaggagaggctcttcaggagggagtacatgggtgtgtgcagggtggcactcacatggatcaggaggaacatgaccaggttccccagcagagtggctgtgtacatgcccaggaacaccacgaagagcagcctctggagctgggggtcagtggtgaggcccaagagctcaaactccatcccttggctcaggtttgcccctttcatccttctccagtgctctgcgatggagaaagaaggcaccaccataaatgaggttgaacacctggggctctgactgggtttaattctgcctaaggacagccttctgaagatgagtcttattgagggcatttggctttgcagatgaaactctgtcatagagaggatcttttctccttggttggttggttagttggtaagcattacttaagcagcaatggaaaatataagagaaatatctacaattggtcttggggatcttaaaaattctaagtaatgaaacagtcactcaccaagtatatattcatagttttccatttgcttagctctgtgttctccctatcaggaattcaagagtgcctgaccttgggaagcttatattctacagacagtatattttgtgtttaagccacacatactgtggtatcagactgctaaggttcaaagttaggactttgccattaactagctgtgtaatcttgggaatgttactttacctttctgagtttccatttttccatctgtgaaatagggataatagcaactgtctataaagattattataaaaattcaatgagttatttcatgcagagaagttgaacaaattccagcacgttgaggaagttcaaagaaggttagctatgagcatgctcactaagaagatagatccaaaacctaaataaacatgataaatgagatgaacccacaacaaagcttagcaagcaacctaccacctaacagtatagacagagacacacgtgctatgcaagcgtgactaaacaggctttcagagaggctgtagatggctgatgggtcagctataaaactggccctgtgaaatcagcactacccaggcaataatgtgaatacttaaggtaacaagggctgagagtgtggagagatggaggtagtgtaagactgcatgtgggagcctccaccaacgggagagtctcctcatcatccataaagctgcccatcatttccagagaacaaaatcaccctggactcagaggatgttatggccagtaggaaaggaacgaagtgagtgagtctttgtgaaaatgccttttctatttagagagtgaacaaagcttgaatgcatcacctaaacaccacactctcctctgttccattggctcctctaccacgtgtcttcccaagttacctctgggtgctgagccagttaagcaccctgtgctcttgggtgaagactctcagttacaaagactttgaagctaacagatgtggctgagtaggacaaaaaggggcaaaagtgagctgcctcatcctgccctgaggagagtaagcgaataacacacctgtgaaaagtgttgggagaatttggagaggaaagagctggattgagcaagcaaacattctgacgaattccaatgacataatttccagaatcatcaaactacctgggcaggagaagattctggacatatgtataactaaatttagttgtcaggcagggaatgaggcaccatttgtgttgatagaatactgtgactggtgacaagaaaaaggcttttagaaatgcccaaagaggtaacatgccctaataaaattgagacacaaaatataagtgcaaatttgaacacagaacattagcaactgcttttagaactcatggaatgcaattctgtgacttatttcatgtcacttagatgtaacattcagctatccttactctaacagctgtcattttataataaatctcactattgtagaatgtgggcagtcctagatttgggttgcaaatgtctttggcgccattggtgacaaaggccaattcgacttcaaggcaaattagaggaattcagataaatgactgtaaaactcccagagtggaaataacttgcaggcactttaagaaaatagaaaggtggtcattaggagtggagtagaattttcagacccagcttcccatcttctttccttggtgggctgtttcaatttaggtaataggtctgcaagtatctctctgattaaaagaacaaaagaagagaaaaatagaaatatgtgcaatgctccagacagtatggatgaggcaggaagcatacactggggtggagtggtgggatgggatggggtagggtggtgggtaatacagtggatagctgatcagagcctccagatttatcatttactttaaac

SEQ ID NO: 1241528 - DNA, 4001 bp, Homo sapiens
cccaacagcacctggaattaccacagagaagtaattaagtccctttattaaatttgcttcacctctttttcctctagcattaaatgtaaatttttctaacaagcatgtacaaaaatatacagataatctatttttatttcattttatatctataaggaattttttcttaaaattcttgacttgcataaacagttggaaggctctacttagacttgcaatcagtttttagcttttgaggagagtgcacgaatggattcaaatgttgaattaaagctacagtccctcttctcagacaaatgcatatatattcaagcacataaaatttagatacctattgggcatataaattttctgaaacccatccttagattccctacatgaccatggacccataggttaagactcacaggttggaaggtcttaggaagtggcgatgatattgatcacgatatatcaataataataataagtattattattattaggtatgatctaggatcaagaaattttgcctgaaagagaagaaggtggattgatgacctgagaattcattagtagttccagaattcagtcttttggtgatatccataatgaagacggaaaggagcatgataatgagaatatttggattttaaaatatgatttttaaaaatgacaacaagaccaggtgtggtggctcacacctgtaatcccagcacttcgggaggctgaggtgggtggatcacttgatgccaggagtttgagactagcctggtcatcgagtgaaaccccatctctactaaaaatacaaaaattagccaggtgtggtggtgggcacatgtaatcccagctactcaggaggctgaggcaggagaattgcttaaacccaggaggtggaggttgcagtgagctgagatcgcgccactgcactccagcctgggcgacagagtgagactttctctctctctctctcaaaaaaaaaaaaaaaaaaaaaaaaaaaagactagttactagactcttcacttttactttactgctttctcactgagacatttatcaagtaaaagattccctaaaacgcctgccactaccttcctaaacatgtccttcaaagcttccttgacttgctcattacgtaaggcatagatgaatggattcaacagtggtgtcacaaatgtcgttattactgtcactgcccagttagtgtccacagaaccactctgcgatggccgcacatagagaaaaatggcacttccatagaagagggtcaccactatcaagtgggaggtacaggtagagaaggccttctgacggcctgaagcagaggggatgctcaggactgccagcacaatgaggccgtaggacacagcagtgatcagcaaggaagatacaatgacgagggaggccaggacaaagtcagtctcctccagcttcttggtgttggtgcaagccaggcggagcagtgggccactgtcgcagaagaagtgctgtaccacagcaccctgcttacagaaaggaagcaaggccacagccactgtgggaccaagcacagggacgagtccccccacccagcaggccaaggccacacgaaagcacacagccccactcatgagcaaggggtagcgcagaggatgacagatggccaggtagcgatccgcagacatgacagccaacagtaagaactcggaggccccgagaaagaagtagaaatagaattgggtgatacatgcagcaaaggaaatagtgtgttgccttgagaggaaattgctcagcatctttggaatgatgacagaagtgagcagtatctctaggcaggacaggttacccagaaagaagtacataggggtctgtagtcgagtatcagcccttaccacccccacaatcaacacattgcctgtcagattcaggagatagacaagaagaaacacagaaaataattccactcttgcgctgttgagatttgggagccctgccaggacgaactctgttggatcactactgtggttcccatcaggactcattgtctttttcacctgtccaacaacaaaaacatgatcctggtaagagcaggtcctctgcttacagtcctgaaacttacttcatcatgatatgggactcatatccccagtttatccaattgcaggtcctgttaagatctgaagcacttaaggtcatcatctgattgattttagcactagagaagattttctctaaagggtaacaaaacttaggtatgaaaatgccaggagcctccatctcctccatcttcacatatcctgttctcagatcttaaataatgacacctcattattgtaataacaatatcactgagcatctgagttgggcaaaaatatctgaaaaaggattttgtgaagaatatgattaccattcaactgggatcagaacttgagtcagactacctagttttaaattcctgcatctccacttactggctgagtagccttggtaaggttacttaccctctctgtgctcctcagttgtgaaatgctgtaaggagcaaatgatataatagtgcaaagaatttaagagtgtctagtacttaacttaaaaattatatggcagagaaagcccctggctataagttaggacaccagaatctaggcttggcttgccattactcttggaagattatcaatttgtactttaactgtccaactgtacaatgagtcacaggaatctaggccattagtatacctaatgaaattatataaaattaccctttccggcaggacgcagtggctcatgcctgtaatcccagcttttgggagaccgaggcgggcggatcacttgaggccaggagtttgagacaagcctggccaacatggtgaaaccccgtcagatgtttgtcagagccaaaattatgaatttctgaccgcaactattaataaaaaattatgttcttattctttgattcttattctttgcttcaagtcctcccagttctgaggaccaccaccagttagaaaaatcaagtccattatatccagaaagcttgtttaaaaatgcctcaggtatcaggagaatccttactcccttttgacagagcaggagcaccatcgtcttggacaaacactgccactttaagtttcagctccctttctagcctcatgcatttcaaagaaatcacttctcttctaactacaggcagccagaaagagcagacagtaaaacacagataagacagctcgggcacagagggaggtgaggggaaattcttttgggtaaccgccaaacttcaccatcatacaatgggccccagtaaaacgatgggccttaataagcacctttctttcccttcaggtgcactaagatagggaagctgaatgggagtatgcctgcagctacagaaagattatgggaacagacacaaaactctccctcccagataagcacaacaaagagacacagaagcagtccaagcctctgataaactctcccaccctgaatccttaaaaactcctagtctgtaagagagtgtgcctctgacctagcttggccagaagttcctctcaggtttgttttctcctcccaggtttgttttctctctaaaatgaacctgtcttgactagcaagccacctttcatgtttctttcctctttctttaattcttatacctttagccatgcaaaacataagaactgatcttaagacccttggttctctgtcagccctattgttctcttttgttgttgttgttgagatggagtctcactctgttgcccaggctggaatgcagtggcacaatcttggctcactgcaaccccacctcctgagttcaagcgattttcctgcctcagcctcctaagcagctgggactacaggcacatgccaccacacccgggtaatttttgtatttttagtagagacagggttttgccatggtggcctggctagtcttgaactcctggcctcaagtgatctgcctctcctcggcctcccaaagtgctaggattactggtgttagccaccatccccagccaaccttattgttctccagcata

SEQ ID NO: 1241529 - DNA, 4001 bp, Homo sapiens
cagcttaatcatgaatatctcaaagcattgagtattttatttatctttgtattcccagtgcccaagtgcccagaggagtgaatgctaaacatacatatatatttctagtgagtatctgtcacaacatcacctgttcagggaggcttttcagatacatgcaagtcagctgccctctcctatgtatgcaagtgtttgaggggagagtagcaagatataatagcttatttaaaatatcaattaaaagttgtaatgtgttttgtactttttttttttttgagacagagtttcactcttgatgcccaggctggagtgcaatggcaccatctcggctcactgcaacctctgtctcccgggttcacgcaattctcctgcctcagcctcccaagtagctgggtttacaggcatgcgccaccacgcccagttaattttttgtattttttagtggaaacatggtttctccatgttggtcaggctggtctcgaaccccgacctcaggtgatctgcctgccttggcctcccaaagtgctgggattacaggcgtgagccaccacgcccagccgtgtttggtactttcatctaatcttcaagacctaatgatacaggtattattcccattttaaaaacaaagaccaggcccgagcggtggctcatgcctgtaatttccacactttgggaggctggggtgggcggatcatctgaggtcaggagttcgagaccagcttggcctggtggaaaccccgactctactaaaaatacaaaatttagctggatgtggtggcgcacacctatagtcctagctacttgggaggctggggtagaagaatcgcttgaacctggaaggcagagattgcagtgagccgagatcgtgccactgcattccagcctgggcgacagagcaagactctgtctcaaaaaaataaaataaaataaaaaataaagaccaaatgtccaaaacaaaaatatttaatatgaatatagcaaagccagccagttctgtctgacatgtaagccgggagtctttccactctcatctctctactcatcctagaatatttcaaaaaataatttttttttaaaaagggagtgtatattcagggcaactggaatctatactcctgctaagcgttttttaaacagaatatttcgagtccatctctattatactgtttatcatgctgtagtataaacatctatttatatgtctgactccacagcagtataacatctatttctgaatacttagcacataaaatgcgctcagtaaaaggtaaatgaactcatcagatccacgtccaagtgcctgtaactcttctagtcatcagccttgtgacgttaataatgtcacataatttcaatgagactcggatcgaaagctgcacctcactagtatttaggaagatggaaggctgattctgtgcggggaagtgcgcggaaaactcttaagtcccctactcaccaacctgtgccaggaggcgtgacgtaagtccgccgcgggttcgccagcaccttgccatcccgcaccacgcccacgccaatcttattggcgctgccttcaaaacccagcaccgccggcatggcggaggctgggagaaaacgccgacaggactcctggcaatgtcaggagctgtggaggtcctcactagtccgcgctgggccgcagctttccggagcgcagaggaagctggccagcctgcagatagcactgggaaagacaccgcggaactcccgcgagcggagacccgccaaggcccctccagggacctgtcttcctaactgccagggacgccgagccaactctgtgccttacattcgtatccgttttcctatctctttcccgtggtccagcccagccttctccactgtttttttccctcttgcacatagttagaatcttaagtcagtgtcacacaatgtgctgtgcatctggcacaacgataaacagcccgagggagggttggggacctaagtgtcctagagaattagaggagggaggcgaggctaagcgtctccgtcacgtggtgtcagacagaccaatcacgcgcattcttcggccacgacaagcgcgcctctgatcacgtgaccaggtccgctacccacgtgggggctcagcgtgcacccttctttgtgctcgggttaggaggagctaggctgccatcgggccggtgcagatacggggttgctcttttgctcataagaggggcttcgctggcagtctgaacggcaagcttgagtcaggacccttaattaagatcctcaattggctggagggcagatctcgcgagtagggtacaaggcactatgaaatgatctagtttcgtgggtgaggggctgaagggcctatgatgcacggaggcggggaaaggatttagagataacgtggtttgaaaggcgggacctggtgcggggacgctcttgggaggagtcttctccccagccttagctggtttcatgatttctttgcgtctgtaggcaacgcggtaaaaatattgcttcggtgggtgacgcggtacagctgcccaagggcgttcgtaacgggaatgccgaagcgtgggaaaaagggagcggtggcggaagacggggatgagctcaggacaggtaagggaatgaaatcagcccttcttcctagaagctgcggcgggggtgtttgtcattcccttgatgtacggtaagtacgggccgactcatttttgcaggggtttgtgaagaagtcgcaggaaccgtaggctttcgttgggtctatagttaacgccggatcgcagttggaaaccaccagctttttgtcagtatatattactcattttatagagccagaggccaagaagagtaagacggccgcaaagaaaaatgacaaagaggcagcaggagagggcccagccctgtatgaggaccccccagatcagaaaacctcacccagtggcaaacctgccacactcaagatctgctcttggaatgtggatgggcttcgagcctggattaagaagaaaggattagatgtgagtggaatttgagggaaagagacattttttagtattgaatggtcttagggtttagtcaccccttttctccgtttagccttcaggctgttttatttttctcctgcccgtagttttctgtggggcttccccagtcttgccagttgtatttcctaaatgtctgttccttcacttccattgccattttcttttttagtgttctctcctcttcccagaatgttgcaaaaacctcttcactatacttcctccattttatcttcctgcattgcattccatatgaagcatgtcctccattccattaaccatagcttaaaaatcttagcttgctatccactgcctatagaaaaaacacatctccttggcatagcatgtaagactttcttacctctctatatttgttttcatttatctagcttagaattgtttgaatattgtgctgcttgactcgaactccttaggccaagagactgtttaacccgtgcgtatctatgacttagcatatagattattcaataaatgttctgctgaattgataatacgttttccacctttcttttcacttacagtgggtaaaggaagaagccccagatatactgtgccttcaagagaccaaatgttcagagaacaaactaccagctgaacttcaggagctgcctggactctctcatcaatactggtcagctccttcggacaaggaagggtacagtggcgtgggcctgctttcccgccagtgcccactcaaagtttcttacggcataggtgagaccctattgatgcctaatgcctgaactcttcaaaaccaattgctaattctctatctctgccccacctcttgattgctttcccttttcttatagttttttatgctaattctgtttcatttctataggcgatgaggagcatgatcaggaaggccgggtgattgtggctgaatttgactcgtttgtgctggtaacagcatatgtacctaatgcaggccgaggtctggtacgactggagtaccggcag

SEQ ID NO: 1241530 - DNA, 4001 bp, Homo sapiens
ttccaaggatattccttctgtcaccaccatccacacaatgcaagttcaacataaaaacccaccatgcagcacagggcccagtatggtccccgcatgcagtaggtgctcaataaatgccatgtgcagggaagggaaaagaccctgcatggcctccacccctgtgattaccagacagacgtcatattttagtgggttaaccacttcatccttcgccaaggcacccaagcccccggtgaggggtgagggctttggaccccatctgccatctaacttccagtctcctgagtcagggcagatagggagcagagtgagcggcctcactgcatggcacaaagagcagctaccgcctctgctgtgctctcagctgccgagtggtggccagagggcatgccagcctccagctcccgggtggctaagcccatcattaccccagctccaccactccctggtgggtgatgcagaaacacctgggctgccttccaggagcagctcaaccaggtaaacccttgggcaccaagtggaagcaggaagctggtgcttccagatgctccagaggcccccagctatgccccaggcagcaggctggcttggcaaggacagtcccagctcgagtgccctggctgcctatgccacacccagatcgtgccaggccatgaccaggctttgacccatgccccagcccggcagcatgctgccgtggtgacccattttcctgcccagtcataggagagaggaggctaagcttgaagaaccaggcatctgtgcacacccatttccaggactctgttgtcacaggaaaagctccagctaatcatatcacatggttcccatgacacagatgtgcaaaacggtgctgagggggagagcggaccaaccaaagcctcttcgctttccaacaggtggaagtgagacttgaacctggggctgtgtggccccgactcaagccacccagccctcactccacaggctccccctgctcagggttgaagggtcttaggcagccatgccacccagtcccctgcaggatgcctgaccccacggcaacctggaaggtgagccgatgtaacacaaagagcactgaactgagagtccagagcctgggttcaagccccaggtccaccacaatcagtaccagccctgccctgtctggcctcagtttccccacctgcccaagcccagggttagcctggctcagagggtctctgggcctcgttctgcgcagacaaggctctccatcagggattcctgagtattttcttttccccgacccctaactcatgcgcctcacaacttgaggcatcctctctaggtgggtcctgactccaaagatggagacggtctagtcgcccacggagcagacgacctggtgccccgtgcaacccctagatcctcccttggggttggggcaggggccaggaggtctttgacggccgagccgtcgggtgggtggggccgtggactgctgactggggggctacttaacaaagaggaggcgacccgtagtgctgcagcctccctgtccctgcttccgtcgagggcgcccacccagcgccgtcgaggcggcgccccgggccacctggggcggacacgctgggggcgggggctcggggccgagctggacctcctcagctgcacatccacggggtacaggggggcgcgacttggccctcagtatccgtccggactccgtatttcagggggtcggaaagcggcgggggcgagctgggggctgagcctcgcgtccgacccccgtcccgcgggtgcacccgctccggcagcgaccccgcccaccgcgccccctgcccgctcccccttcgcgatcccccacgatcactgaccatagtgaccagagccgccaggccaggtcccgccccagcgaggagcgatccggtgcgggaatgccgcgggaggcgcgggcgggctccgccgctggttcggtggcggggacctcgagggcgtgggggcggcggagaatacacccgaccgctccgcaaaccaaaggttagacctccactgtgtcccagcaagacacacgccctgcgattgacgtctcaggcgggcaatcagaagccgggacgcgggacgtcatagaaagtgggtgggacttcacgtgccttcagcctatgcgttagggtccatttgataggatgcctcccccttttaaagacacaggaaagcttttaactagcagaggagttagctcaacccagaaagacaggtcctcgtttgtaaaggctgaagggcttttgcgcaaacctaaaattggagtcttctgaaggattagctggccgtcattaattcataaacaaggtcacataagtatagtttgcacaagatcagaggataggcgcttagggaacacgtgtccaataacattaagtatggcttctatataatattttatcctcttccaactcatgaatcagtaggttgccacgcacccagttaatgtttgttgaatgaatgaatgtccaggatcgttgactctgtggctctggaattgtagggatatccgtgaaccaggtctagatgactcatcttgcctacaagctcattattaatggacatcaaaataggaatatttatcattcaaagattcattcaccagcccttgagtcctggaggagctgcttgggtgtgggagggagagtttgtaggggaggggggctcagtgcattgcatgcatccacttcaaaaaattaatatttccaggagcgtgtattgagcaattccccttcctgctgctgccccccgcccccgccccccgcgccccactcttactacgtaagtcccaggtactgggctaggctctgggcatacagacatctgagtcttccaagcatgtatcatgtcctgggcagggagtgtgaggtcaatggaggctcaaggagcagtaacaatagcaggtaattttttacagttatttacacagttatgcagaacacctactatgtatcaggcgctatcctgaactctccacatatacagaattatcttacttaatttcctcacaactggtttaagggggtaggtcctgttattattatccctgtttcacagatgaggaaacatgtacagagagtttacgttccttgccttagtcacatagcactgaagtgggattcagtcccaggcagtgtgactccagagctggtttcgaattcactctgcatgtgactacaggggctgtgttacctgcctccgcccctgacccccatttgttttcggggggtttctcgctctttttttttttttaaccgccaaggaagccagagaggtgacaggagcagcccagtgctgctgagctaagaagtggcctggctgggctggatccctggactcctgactccccaaccagtgctcattccaaggcgtgttagcttccctctgtggaggaatgactgagccaggttccatggtgtctgagtgaggggtatgggtgaagagtcttttcagccaaggctttgatgagccctcaagtttggctgcactaagccccgagtcctgggctcactctctgcccttcttcaggccccagcagttccaaaccaagccagcatgggagtgtggaaggagcactgggctggagtccatgaggaattctgggcccttgggctctgccactcactgctgtgtgaccccaggcaatgcccaggccctctctggtcttctggttcctcactcagtgagagggttggacaatctgggtggttaaaaatgttttgttttgttttgttttaatatttgtagtaatgaaggctttaaacacacacacacacacacaatcttacaagaatctcagtgcatgcgtaacagaatatttcctcaaatttagctcaattcgcagggaaaatgtaatttccttagtctaactaatcaagattcctcgtaagctctctaaagcctggttagaaggaaaaaagttgcagaagggttcagtgggttttcaagctgggtctgcatcgaaaatgcagacagcgtcgttaggggccgcccatggc

SEQ ID NO: 1241531 - DNA, 4001 bp, Homo sapiens
aaataactctgccacccgcgagggagggaggaagaaacgtgccaaaagggttggccttgactattaattatcgttgggagaaagccccggtgttagcgctgaggtctgggtgtctaccttactctggggggaggagttccctctcctactcccctctgttgctaataacttttggtgcctgtaaaaagtcccgagctgagcaggagaaatcctgaccccgaagctctaggatggaggggagaatttctaggagcgacttccccgtcccctccccaagcaatccaccaccgcagggtcggcgccgctcggccttcgctccccgcgcaccagttctatctgtgaaggaagcaaaagccaactcggtggaatcctgacaggggacttgggtttccaaaaatatgtcccgaaatcgggcatcgatttcaagagtcacttgaacgcaacaacgcgaagacttcttgggagtttgcagagcgacccgtcgcccgcgcccggcgctggcagggaccttcggatggttcttactgggccgatccatggcacaggctgggcctcggcgaacccctcggcccccgcccggccccgagccacgacacctcattgtcctggagcctgggaagggggtgcgcgagcgcgcgggcgagccctgcctctccccgccagagaacagctgaggggccgcggtcccagcgggaggattccggtccctggcccggccgcggccttgggcggagcaggggccactagctgccacttctgcccgccccaggtgcgcgcggagggctacgtggggcgggccgcgacccggcaaagtcatgttgaaaaaacactcttcacgttcgctcggcctggtgaccagggtcggggaccacgacaaccgggggttgggaggctgcgtaattacaacccagggtggtttggattttggggggtggtggatatttaaaaacaaaaaggagatctggaagcttttgggagaaacagacaaccgagctgtgctaggctgagggagaggaggccaaagagagcgagcagtgagcgccggggcggacgagaagccagcgctcccagcctcctcggttatccgctccggtttccgctcacgttcaacaggggccgacaggggctcgagcggcggcccccggcccaggccgacccgcaagcgaaccgagcttccggcgcgcgggcccaaggaggcgcctggctttttattattgttgtttcaatccatccatctagttacatctgcatctttttgtctcggactctaaaaaggtccctgggatccatccaaacgaccccaaccaaatctgggggccaaaacgcaaagatcgcgggagaagcccagaacggcgttgacataaaaacaaaaccacaaacaaaaccttccaaaacaccccagattacattcgcagcgtttcgacgacgttttgcagaagcgacgacccccaggagcacgctctctgcctctctcccactaccgctctcatctctagatcacatttttctttttgcaacgatcgttattacacctcaaaatttgtaagagaaaaaatacatccgcctacagaactccacgttcgcagaggggcatcggtcggtctattggaggtactggggtgatggccgacagacacggggacacgtagatatggatatagacaagacagacggacacttaccttacagcctcatgggaggttagaaaaagtcaaatatcctttaaattccaaatagccagctatcctaaaagaaatcaagagtattgagttagaaaccttgcagtcttcacccttccatgaaaagtcaaacacaaccaaaaaaaattttttttaaagaacgaaaatgaggaaggcggctagagttctaaacacgcgtgggcccctctgcaatacatacaaagtagatgtggcgagtgagggctgctctagcaatttttatttttaatcacagtggaggctgtgttggagctgaggccggtcccgctctcagggagatttgctgagaaagcgcctctctggcaactttttgacgcaaactctccaaccaatggcagggagagaatgattgacacatctaagccagagggaaaataataaaaacacacaacagggggaggaaaacaggccgctgctgcacggggggacgagcaggcaacaaatccaggcctccgacattaccagaatgttctttaaagacactgggctttgcttaaaatatacattatgggccggagcatgtgaactaattgtataattaaaatgatggacagggagttcttctcttaccctcttttcccctgcttcctttactccgaaatttcctttcctctcttttttttttttttttttttgttgttgttgtttttagggaagggaagaaaggaaacccatgcaatgtaagatggaagataaaaatatttaagtaaatgctggagaatggcgggttagggagtgactgggttatcacattcaaccccagcaataagtgtgtggatgacaggcagaaagcaagtcagactgaaactcaaaaacaccactatgccgtctcagacagggccagagcacgctgacggccagaaagggtaaaggagggaggcctgggagtgcgatgtgggcatgtagggaaaacagagagagaaagatacacaagtccaagaacaaactattttctaaaactcagtgtcttctctattccctacgcccttataaatatccttacacatataaataaatgatccccgagtgagagaccccggcttctggtaggttcctggggttttttggaattgagaagcccacgacagactgcagggaacacgaaccccggaatctaatctcagggcccatttaggagaagtagctgggaccacatcgggcctcgaggatgcgagtgtgaggtcgacaagatatcgtggaagagagcgaacgagggaggcccccgttggaaacagtttctgtgttagaacaaacgccaccaaacgaccgacactgcgaggcctggagctacctgggctggcgccgcccgagccccgggctgcgagcccagaggctgggaagtgatgggacctgggggcccgagccggagagtgcgacccccagcccaacttttttgcctggcatagaaagcagggaccggacaggtttcaaacggatccgagtccctagaaaagcaaaaacagactgggcggagtgtggggtggggggtggctagtggaactggtgagtgtgtgtgaataagctgggtgggggtgggagcagaagacagctcttgcttcacaacacccagtgcaggaaaagaaaaataaaatctcttcctaaataccccaccccccgccacccacccaccaccaactaccatcaccaccacggccagtgggcccaaagaaacagctcgctgcctttaatttggggacctatgttaatgaagttggtaattaattcgtcgctttgttgtcggttcttatactgtatgtgtactcaaatgtggccgtccttgggatttacagcaattaacgaattacgggagtgcgcacgaggcagcaagctctcggcagccgggctccggctcgggctcggcctggggctggggactccgcggcagcggcccctgtcacaggtgtccctagagctttgggccctggcggcccctcgagcccccgaggggcccggagcccgcccagctccttcccggccctctgcagcagctccagtccggagacccgctggctgtcgcgttcccaggagtcaagagtttctaggggcccgggcgggggggagggtgagtaccgaccttttttctcaccccacccccactgtactgaaacacctggcggccgcccccgaagcctttaatggggatggtggtgaggagggggtaacaaatgccccgggcgttatgaccctcgtggcgctggctgtcggaggcactggttgggtgcgcttggtcagagtcatgatgctttcgatgaaggaaaggcaaatccacctcgatcacctgaa

SEQ ID NO: 1241532 - DNA, 4001 bp, Homo sapiens
cagaactagaaaattctcttcaatccctaagaagtcaaggaaaatacattctttttgtgttgatttatttggtaaaagcaccagctgcgtctataccctgactctgccaccaaacttagttatgaccttgagcaagtcatttactctattttttcatctgtaaaaatacttggactgtccaagagctaagctgctttcacacgtacaagtccatgagaataggagaggatttctatacagaggaagggaagggttacaacaccacgtgactactcttgaaacctgctcaaggatgggtctctctccaccagcaacccgggccttgaagacccttgcttacgggattaagtggtgacgggcaggcaaaaaagggcagaaggagaatagtttcctggccccttagtgagtgaaggagaatttcaagccttccttcagtcctctgaaagacctggggctctccacagtcccatactcgggaagggtggcatgatcaggaaggatggttctgcctgcatctgccctacctgcaccctcgactcgggcaagttgattttcagtgccacctcctctcgcatgaagatgtctgggtaccgggtcttggcaaacagtgcttccagcacatctagctgcgcccgagtgaacgtcgtcctctcccggcgctgtttccggggggtggctgcgggacaagaagcccagggccctttagggtgggggagcagtttctcagtcataggcgtttccgcgggttctccgacgcccctgccctccaccccgcagcagtcccccgttcctcacagcccttcagccgggagcctaccaatgctctccccaccgtctccccagccttgctccccggggacccaggacacacgctgcttctttccctactcttcttggtgttgagattgctccaatcagagcatcacttggaaagttaacaaatgaaacattttttaaaagacacacaaaaaagttctccaagatcaacccccaaaccacaacacaaaaaggctattccaagaagtcaaaggatctccgaggacagactggcagctcgaattgatgggggaaatctggatcctgttcccatggtttttagcacaccatgggcctttgttcctccatctttaaaatggggacatagttcatactcctgggaggatttttaaacatatctgattggaaaggaaagcacccgcatttggaggaagtcacgcctcttgggattaaagcaggctctggaggtcataggggaaggcctgggcatggagggaacaactgcgaagcccgagagtgctaaggacttacggagggaaaactcagcttctccaagaggacacttctgaggaattggtcattgagatatgggtaggggtcttttgcccaaatgacaaggacagtaaccttcctcatcccactctgatgccaatccttatttactcgaattaagaataaagtgatgtgattgtaacggttgcagacccacctactcacttttcccaacccctgttctctgcttggtcagtaaatgccctgggactgcttcctcagaaggcaaacctagaggagaccaagcctgaagctgggtggggacagtgtgactgccaacccccgtgttccatgggaacagggtgttgcatccccggagggtgggcatggggaagaggggtgcgggagtgcagcagggctcacttacccgggtagcccacggaggggtgcagcaagtccatacccgaagtggtcagactcagcccattgactgcgtaaggcggttgcttaagataagacatcatgctaaggttgtttggaggtgcaaagtcggcccaaatcgggggtacccagctggaagatcttgatgcgcccggggtggacaggttcagagtccttggtgggtgggtttggagcagtggaactaagggcaaagcaaacaaacaaacagaggggctggtttactgcttcggaggcagcagctcttccacgttccagcactaacttaaaaagagcacggactaggcgaggcagaggcttttaaaggacttgcagacactccccccacccccatccccacccccacccccagctgctctggaactagaggggatggaaggagaccagataaacctgtcttccccacccccaccctaaacttaaaaaaaaaaaaaaagtacccgaagaaagcaattacaatctgccttccccaagaacaaaaacccgtgccttcaaatgcacacattgcattcctatccctacatttgcataggactcattggctggcactagctaattgtctcaaacaaaacttgattggggccatttgcagagacaaagaactctttggctaaataaataatgctgataacaaagcccattggtgagaaacaaagaaacaattcaagaaatctacctctccccagactgttgcctttccatggcagagattttaattatcttagctttttaccactttcaactgctgcgaacctaaaatgtcagtgcgtttaacatctaaaataccaactcactaaaccacaaacttggaaaaaccgctcaaccactattattccacatttgaagtcatttccggtaatcattttcacctaattagtagtctgggtaattagatttcgaggtaagtaacagatttattagggttttggagaatcttgattatatgtgtctaaggaacgaaagctaaacaaacaagtatttaacttttaatagacacccatcaaatatttaagcatattccaaaaaagtcttcaagattggcacagggcttgccagaaattgtgaagtaaagttagaatcccaccaatcagataatgacgggaccccacatttgtagtgcaagctgcttccatgttgattttgatgtgtggaggctgcagatcctgcgggaggcaaattttcagacatttgggtcctcggcagctgcagcagagtttcctgttaactctaactgccttttgcacattttagttttgaagaaagtagatacacaaacacccaaagttgtgaaactagtagaatttctccctacctttcaagtttcctacaatcctataagaaaaagagctcaagggggaaaagaaaggaagaaaaagaaaagttatttactttcttcagctgagctccccgcctccaccccagcaaagagattcaaagtagatgttaatatagactggcagtttgcaagtctggcctttattttcctaaaatgtggcacttatatgcaaggatctctactttgaaactttgacaccatgagagattgcttcaaaatggcggatacaagataaaggtctcactgactttaaaggactccgggttttcatatttacgttgcttaagacagcaaggcacaaaagtccataaatgaaacttagtaactgcaacttctttctgatttaaattcagagcacaaaagtcatgcttttctaccctaagatctaacttaatataattttataaatgtctttcttggaggagtttgtattatcctcagtacaactaatttagttgcccctacaatacagactttatgtttttgtattgtcttttcttttcaaaatgctgttctttggaggctgcgaaaataaacaaaaatctccagcttagaggctgtttaaacacatatgcgacagctttaaaatacagttgtatatgtgtttaaacagcctctaaactggagattggagattttttgtttaatcgtactaccttgcaaaattctgaactacagtgctatagagaatcgtaaaatcatatcagatgtacccttgagaaatatggaaatgttcttacatgtagagctctcacccaattagaaatgcctgacacatcatacaataaagtagcacattccaacataaaaagccagtaacacacagaaagcaccagggccgagatccttccaggggctcctttgcccttaccattgcaaaatggctaaaattctcaaaatagactattttcacttttgctcctggatccacctttaa

SEQ ID NO: 1241533 - DNA, 4001 bp, Homo sapiens
tttacaaaagcaatgctagtggcttcccaatttaggggtttaagtgcctgacctgaacctctgttctaaaccaggatagcttcatgactgttaataaggtcccctgactctaaccccatgtttgtattcaaatatctacacttcttgaatcccagatgatctggtggttttataatgctctttaagaaatataggcagagtgcatctaggtatcatgaacctctattgctcatttgaaatcatctgctcttctgaccccagagcttctgcaactacttcctgaatccattcaaagaattgccatctatgaggttaaatccctaacccatgtccagggtatattccccttacatgcagcaatggccccccaccaaggtaggcccagatcaacatgcataaattccagtaaattctggatcagtcccactggggtgtatgaccccagccccagttcagcgaagctctgctctgcagcagtttggactacatctgcagtctctccagaagccacctcaggtactgctgtgggtgagggagttgcagcaacaacaggaggggcctgaacctgtgtgaaagaaagccttgtattatatttattcagtagcgaacacaaagcaagtgagatctttttataataaccagtactgggttctgttctctctacttcttgttcttccaggttagcctagtgtctgcagatttcaagcttaaaaaggacatctcatttttatcaatagttaggaagagaagttactttgagtaagaatccatgacttcccttcatgctgggaagttatttcttttatcactgttttccaaacttcagccatttgaatatcactatcatgatttttgccatatattaacatgaaacaattgcttttctttaaaacagctcagaaaaccaaatataacatctctcctgttgtactttcaatcatttccccactgaattgaaaatccatcctaagcagagatgctatcattttggagagctgtgtggagcgtggacaagaactctgctccatattccccctgctcccaaacaaaacaaaatatgaaaccaaccaggaaacaccactcctaatattgcaggaacgaaaggcctcttacctggacttctgcaaaagagatagcagaggtactgaggctgcgggggccggaagccgcaaggaagaggtagtgtgggcgacagcagcacggggctgctgggaataggagccgtgtggtcagcggtttcccaagccattgcgagggccctgcgacgctgtggacctgagcgtgtaaaaggatgatggagcccctttaccgggagcagaagtcctcgcgtgggtgcaaacgggattcattatgctaactccccaagaagcaggcagctcggccactacaggggaggacattgctatcaccgcgcgcagaccgctagcccgaaggcatgcagcgggtggtgcctgcagagcgaagctcgaacctgggttccccgcatctcagttatcgcagacccacatcggagggccctgagaacgaggccgaggtgctctcgccaggagccaagccaattccagaagctgacaccgggctgctgggcccatagtgtcggggactaaccctagcgcgtcctcacatgacccgaggtcatgacattcaggtcccggtgagcaggtcagcgtctgctgatacccctagcacgagctgtcctggggcctggttcactgggtcagggcagcatcccggtgctctgccccggggcatccttacccgacgcccggactgtagcaagcgcagaagctcccggcgtccgcacattagtcccatcgccattttgcccggaagaggacttgcttttgcgcctgcgcagtaagaaccacaacccctcgagaggaagcacttttggaggcgggcatgaagccagaattgtagccgcagatcaggcggtaaaagagaacggagcttggcggccatatttgaagtgggtaaaaatctgtaaagccacgttaccattagcacgcagagagccttttctggagattgaaaggaagttgaagagctgggttagctatcatcgtaagctatcatcgttagtgatggcgtaaacctgggtaattttcctctaatgtcgcgattgtcctctgatttgtaagtttaaaaatagcctcagaaaaggcttggctgtacttgcagaggatttttcccactcaatgatgttcgattcttttgattcttattgctaggtaatattgtaatcgcaggtccagtgaaatttgagggtagtctagagtctgacagaaattaaaagaaggcagcttctgggaaatattttcctcccagataaaaagacgaagcttccagaggagacttcacctttccatttttttcttctgtaagtggggtggtgtgaggactgaccatgaggggacaagtttccagatgaaaagctcacgtgcaggccgggcgcggtggctcaggtctgtaatcccagtactttgggaggccgaggtgggtggatcacgagatcaggaggtcgagaccatcctggccaacatggtgaaaccccatttctactaaaaatacaaaaattagccgggcgtggtggtgggcgcctgtaatcccagctactcgggaggctgaggcaggagaatcacttgaacccgggatgcagaggttgcagtgagccgggattgtgccactgcactccagcctgggcaacaagagcgagactccgtctcaaaaaaaaaaaaaaaaaggaaagaaaaactcacgtgctgaagatggttgagggcaaagatagaaaacacccaaatacttgatgatatcattgagctgctgtaccatgcttggaactgcctatctccagactttgttgtgtaagttaattaaaggtcttggccgggtgcagtggctcatacctgtaatctcatcactttgggaggctgaggtggtctcgataactaggtcaagagatcgagaccagcctggccaacatggtgaaatcctgtctctactaaaaatacaaaaaacaaaaaaacaaaataactaggcgggcgtggtggtgcatacctgtagtcccagctactagggaggctgaggcaggagaatcgcttgaatccgggaggtggaggttgcagtgagccgaggtggagccacctcactctagcctgggcgacagactccatctcaaaaaaaaaaaaaaaaagatgattaaaggtctttactgtttagactctaagtctgttgcttgggtgttctgtttcttgaagttaaaagcattcatcttcagggaaaaaagttactggtcagaaaggtggagtttgattatgtttgaacccttacaaagtctctcaatatgcagattactttctaaacaacaaattatagtttcagaaagatacaataacctgaaattatttcagtgactgctcatttggaacgattatgaatgtacctgacagatatggcgaaaataggaggcaaagaactataatactgatttagtaataattagtggtatgagctaacacttgcatatgttggatgctattataaacatcaatagatttttgatatggaaacactgatttttttttagagattacttttaaaactcaatacaattagaagtaattacaaatatacagctacagaacacttggcagggtgactatcttacagtacactgctactttggtggccccaaatgaaccaggcttcccaatatttgcacctttaggagttctcttctcttgagtctgattgggcctgtcacttgctttaatcaatagtagaatgcgttggaagtgatgttatgccagtttgggactatgccttaagaaggcctgatagcttctgtttttgcattcgggggaagccagctgctgtgttagaagtttgacttctcagacttactgcctgtgaaaagcccaaccaaccatgtgaagaagaactgaggtttgggccaacagcctcagttgaactcccagccagcagtcaacaccaacttttgc

SEQ ID NO: 1241534 - DNA, 4001 bp, Homo sapiens
tccagctcctaatataagtggggagggtatggaggacagcttaagaggaaccaacgcaggggctgtgccctgctctcggccagagcgcggcctcagccatgctcggccatttccctcgccccatgcgagggtcgtgataaaagaaaagctaccctctctagaacaacactaggcaaccgtgacgcccgaatcaagccagtcgggccccttgtagtgatcgctgacccatccccggcccgacccggccccagccacgttattccccgcccaaccccaccccccgcctgccacccgctcgcccgagctctgggcctccagtgacccggccggccagccgccggcctgctcgctcgccctccttccctcaccgggtcctcaatggcgccgtcccccgggtcaccctcgaccagtcccggctcctcctcctcctcttggctgccgggggctcccgaaccaggcccagggcccggagctcccgggggggcgcggggccggggcggctcctcttcgggctcgggctccggctcgggctccagcagcagctcctcaggctccagttcctcagactccaggccgttcccgtagtcccctgcgccccccggggccccctccccggcctccccaccggccccgggcacaagatggcgccgccgccccggcccggagccccgaccgcccgcagcccccgctgctgctgccgccgccgccgccgccgccatcgccgctcagactggggcccgccgcccggcgattggagagctgcgccggccacgccgaggactcattagtcaagctgcctgcccgtcaccatgagctagtactccattggggaatattacttggcaatcaaataaggccccacctctaaggcggggcactgcgccaaattctcaaatcccggtaggggaaatctgcctgtcaatcaacacgcgtcccacctcctatcgagtccttaggtaataataccgccacgctgtgacgatattcctgcttctccccggcctacgggcgggcccgcgaagtatgggacgctccgtgattggccctagctaggcgactggaaaggaccaatcttccgatcgcctcaccgcagtggcccagtctcagatgccgattggcttgcgagagtcgaaggggtgacactcgtttcgtgacaggtgaaccttgcccccgaaaggactgccgggcttcaaacttgggaaacccgaggtcacatgactagccagtcctagggggccgccatcttgatactactgcttgccagctagtgagctgttggccgggtgaggcccaaaacagagcagcagtttcaggaaacttgtatctcgaccaggaagcaccagtagatgggatgttgctgaaaatggaggttgtgaatgaagcattccaggagggagcttactttccccatccaggttattggcaccatcatccactagctctcccgcaccagaaagcagggaggattcctcagtccagagctactagtcacaagtcctgtctgtcccgccctcttgcgtaggccttctgctccccagttccattttctttttcctggacagcttccaatgtcacccctccaatctgcaccgctaacagactggcccccctttgctggcgaggtaaagtctcaaaaccgtaaatcacggccttcgatacgccagcatgtggttactttgtggatgttgtttccttccactcttctcgttcctttgggtgtacctgcacccagtctgtgcctctaacatgtagtcccccttcaatcaaaccactgcaaaccccagcttcccctcatttcccaggacaagtgggcctatctccacggcgcgcttaattgttttactgtttcctaactaggttgtgagcgcctgcagatgaggggccggttcctatttatattcgcatctccacggcctggcaatatgcctaccacataatgtcctgttagatgtttgttgattgaacaggcattgattggggatttgggtgccacccttcatttaagccctcaagcccccaagatcccagaggaatttctcctggcaggttcccactacacccctgcaccccaagtaccaatgagacctagccctggaaggcaggactgccatattttggtagcagtcctacacatttattaaaaagaaaggaatggcagtgtacgtttgcaagagaaatttttgtgggcacactaacctacagttcgaaagatacatatagcccaaccaaaaagttaaacaaacatggttggccgagggatttggacaagagaagatcctcattagcaaaccaaaaaatcaagtgactcattataccccactattcccctcacccccactttttctcacaattccttacctcaagatctggggaacttgcagcagagtcacagtcgcttaaaatttcactgcaaattacttcatcagccatctcagcttcagtgatctgggataactaaagttgagcaccgaagacaagctctaaatgattgaataccctggaagaaaggtcttttatactaatcttaacctaatcaagatttgttaatcttattggtacccaatttaatcaagccaacaaaaggaaatgtgatttttaaaaatggctttgaatcctatttttgttgagcgtttgattttgtaataagcaccactccttattatttcactggactctcacaacaaccccacggggaaagtatttccaaaaccataaccttttttagggaaaaagaaaaaggcttaatgaaatgaagaaacttgcctaagtcattggactaattagaagtgtgcagggctggctgggcgtggtggctcacacctgttatcccagctctttgggaggctgtggcgggaggatcacctgagcccaggagtttcagaccagcctggccaacatggcgaaaccccatctctactaaaaatacaaaaattagctgggcatggtggtacatgcctgtaaacccagctgctcgggaggctgaggcaggagaatcgcctgggcaacagcaagactctgtctcaaaggaaaaaataaaaattatatatatattatacataatatatattatgtaatatatataataatgtgcagggaattcaaagccagctttcaaagctcagatcactactactataaggcctgctttaatacataaaaattatgtgtgaaaaatggcaagactaaattccaacaataaacaaaagtttaagcaaactataattatatccaaaaaaaattattatgcatctcttaaaagggttacatagtatgacaaacatgcgaaaataattttgttaagccaaagaagaatgtaaaattgtacataatatataattacaactatatctgattttttttaaaaacttaggcatgggaggaaaaaaggagcaagaaccagtacaatctttctattctttggcagtatatatcaaaagcttttaaaatggtgagattcttaaggccaggcggagtggctcacaacactttgggagccagattgcttgagtccaggagttcaaaaccagcctgggcaatatggcaaaacccattctccactaaaaatacaaaaattagctgggcaaagtggcgtgtgcctgtagtccctgcccagctacttgggaggctgaggctacagtgaaccataattggtgctacgtgcacttcagactggcaacagagtgagaccctgtctcaaaaaaaaaaaaaaaaaaagagccaggtgaggtggctcacggcctgtaatcccagcactttgggaggccaaggcaggtggatcacctaaggtcaggagttcgagaccagcctggccaaaatggtgaaaccctgtctctactaaaagtacaaaaattaactgggtgtggtggtgggcgcctgtaatcccagctagtcaggaggctgaggcaggagaaaggcttgaacctgggaggtggaggttgcagtgagccaagatcgcgacactatattccagcctgggtgacagagggagactctctccaaaa

SEQ ID NO: 1241535 - DNA, 4001 bp, Homo sapiens
gggctgtgggacctgacattggggcaatcgccaagacctggaatggagaagcagccaggcctggggagatgctcctggctttggctttgaggccccagagacttcccagaagagaggcaagcaggcacatctgcagtgctcggccccagaccttgggcaaatgctgacccttaggtctcatatggacactgggtccttcgggaggccccgccaggtgcaagagtcgtgccgggtgggcatccttcctgtccactcagcaaaaccaaagccccgaggtcccaaccctgcgctccaggagggcaagccccactgtccagcggctctgcaactccaacaccacgctcagagatgcaggctgtgggagccacaggaaagcacggagaggcccacctgcagctgactaggggtggaacaactcaatgccacgtggggtcccctccaggcatactggccacttccagtgcctggaaggtccgctcaccctcccatctccccagggagaactctcactacccccaaccgcctcctcttctcgcctgctgtctattctagaaccagaacttttccggagagcgtgtctctctcctccttagcctgggagcttcctgagcaggaactaccaagtcacgaagaaattacaaaagtttcaaactgagcaggagactcagggaagctgcaagtccaaggaaggctgggctatggccggagggtaaaccctgtccaatcgttaccgctgggcgaccgggcgcccccctaccaagtgcagaacagccagtcttccgcaatggcaagatcaactgggaggcgcaaatagcagtactggcttggcgacgcctctaaatgagagacagcgccaaccaggtacccgcgaggacgaccccgccccgcaggacagggcatctccaccgcgcgctggacggaggatacaaccgagtcctgcgcgccccgtgcgccgggggtcgctcccaggccgaggtctgacagtgtcgccgaacgcgaaaggaagcgtgtggtacccgagagaggaagcaccctcgtcaccccggccggcaccgcattgaggcaggtgtgcaggtgcggttgcggcgagccaggtgagcgccgcccgggagccccaaggtcccgccgggtctgagcagcaccgggtcctcggaagctgagcgcggcccccggtgctcgggacctggggggctggggccgcgcttgccggagctgcgggggggcggcggctgcacgcgtcgaaccggcgggcgggggcgcggggggcgacctgggctccgctgggggacccgggccggggatggggcgcgcagaggccgcggccaggacacccccagcaggtgcccggcgggaacaaagcgcggcgggcggcgcgtacctgggcacgcagctggggctggagccgtccacctcccaggtggcgaacaggttcatgggcacgggcgtgttgagcgcgccgggcgcgccggggaggccgaggcggcctcgctcggccatggcgccggccccgccgctccctcggcggcctggggctgcggccgggccgcggacgcgcggcgggcgggccgggcgcgcggagggcggcggcgcggtcacatggctgccgggcggcggaggggacgggccgggccccggcgtcggacaggcccgcgggcggcgacgagctgcggccgctccgccccgccccgcccggcgccccgcccgcgccccgcgcgcccccggccgccccgcgcgcgcccggcgccctccgacccgcgccggcgccgccgattggctgggcggggcgccagctcgccgcctcgggtccaatcgccgccggcgcagcgcgcgccggaagtgaggtgcgcgcgcgcttcctccggcggcgcctcacggggcgtccccgcccgccggtgcgcgagagcgcgcactcacgcgcctgcgcacagaccccgcccggggcgccccgccccgccccccgggagccgcgggcaagggccgggagagtcgtgggggtccaccgggtcccggccagcttcaggcgccgccccctaaggaaagctcatcgtcgccctggcgatgcccacctccccacgcgcggattccccggcctcgacactttcccgcctccaccccgccatgccccgagtctccccgcccccctgccctcgccgccccttgtctcctgccgacccccgctgggttggcccggctgtgcgggccccgcccgtccccgagcccctccctcgcgcccccctgcgtgggttccccgggacgcagggaggtggcaaggaggtggccgggcctggcggcggtcgcggggactcgaagccactcggggcgccaggctgccgagcttagcctccagggctccagatgaccccgggcgccctctttgcgtcccagcatccttattcagcgccgcttttcagcgttgtgctcaggacaatggagaacaaatgtctggggccaaggctggctcctggccctggggttaacagtgaacttggggacccaagcaaagaggaggcaatggctagagccgctggggcccgacgtgtaggctctggggctcagggagggtgcttcccccatctgtttggcagcggctgtggtccagcaccagatgccaagccgagatttaggaaacggttttctggcctctcttctgtttccttgtttcacagttagtttacagttgcttttctcttcgccctgtgtcttgtctacaagtagttttactgaaacaaatccagcccgagcaaattgacctggagctggtttctttcctggcccacggggcttgccaccccagtgccccgtcagctccttctgcaaaggccctcatgccgctgcttcctccgttgagagagctcagcctccagctgtaactcctgtatctagaactgcaaacagctgcgactgcttaaagtcagggtcccacttcggagagaacaagggactctgtgtttcccacgcgcccctggctcctctaaggtggtacactgagagccatgagggtctgtctgaccttggccagctgctcggcgggcagagggccggtggatctcatacctttgagacagggtagggggagaagtgactatgtccagagagggggtagccataccccaggaggacaggctgtctgtgatgggagggcaggagacaggcacccattgaccccagaactgagcgtacggcgctgctggacctggcgagcgtgcagttgcagtcagacggatgggccgcctgacacatggtgcctgtgtatgccagcgtctaacccaggcagggactacaactgggggtcaagtgaggagatgcggggtgactaagccgtgcacagcagggcttggcaccagctgccaccattgagcggtgcccctcctctgtgccaggcaccgttgtgagcccttaagggacgtgacagttctgtcccatcccaagtgacaaaagaggagatggcggcctgtgaggttatgcagctgccaggggtcgggatatgacccacacagtctgtaccagagtggcccgaagaacccgtatggtgggtctacatcaatgcttctgccaggcaggaaagcagggacacgaaacacaccatgtgtcacgcctgcgaccacgtttatgtttgtttttaaggtgggatggtggtgatgggactgtggtcttctgtattttccaagtgcacagatgtcccttgggtgatcagagtaactttttagccagaacttgttatttgcactgccctcctctgtcggaaaatgatgctgtgctggtccttctcttgagggctgtgggtcacaggaggagatcccctgaaggctgggaggcatccctccccatgctatgaccctggcatggtgtgagccctcacccccgtgtttggagcacaggtgctttctctggtagcgttttctttaaagcaggaacttggtttgagacaaacctctcggatgactggggtggctgggcacggttggggaggaggtccaagaagaggatccttcagagccctg

SEQ ID NO: 1241536 - DNA, 4001 bp, Homo sapiens
cccaggagttccagaccagcctgggcaaatgaggcaaaaacccatctctacaaaaaatattatctgggtgtggtggcacatgcctgtagttccagctactcgggaggctgaggtgggaggatcacctgagcccaggaggtagagtctgcagtgaggcttgattatgctactgcactccaccttgggtgacagaatgagacactatctcaatttttaaaaaatgaagaaactagaaaaagggaacacattgaaccaaattaagtggaaagaaggatctaacaaaaatgagagcagaaattaatgaaatagggccatgcacggtggctcatgcctgtaatcccagcactttgggaggctgaagtgggcggatcacctgaggtcgggagttcaagactggcctgaccaacatggagaaaccccgtctctactaaaaatacaaaattagccaggtgtggtggtgcatacctgtaatcccagctactcgggaggctgagagaggagaatcgcttaaacccaggaggcagaggttgcagtgagccgatatctcaccactgcactccagcctgggcaacagagcagagactccgtctcaaaaaaaaaaaaaaaagaaagaaaaaaaagagggtggggtcttccgcatttccttttttctcttttttttttttgagacagagtttcactcttgtcacccgtcacccaggctggagtgcaatggcgggatctcagctcactgcaacctccacctctcaggttcaagtggttctcctgtctcagactcgcgagtagctgggattacaggcgcccaccaccaagcctggctaatttttttgtatttttagtggagacggggtttcgccatgttggccaggctggtctcgaactcctcaccttacgtgatccgcctgccttggcctcccaaagtgctgggattacaagcgtgagccactacgcctggttacgcatttctttttaggctcattcctgggtatgtcaccggccctatggcgattgtgaacagcacctgcagatatttgagggcgtgcgcagccagggttcccgctctgggcagggggcacagcgaggtgactcacgggtaaccacaggtggccacgaatgactgctagaaagtgggaattttaggggaacagaaaacggagaatagcggggcgcacggggaggctctggaacctgggcgagcggagcggcggacgccgcaaatgcggagggcggggcagggtggcccctggcgggtgtctccacctctgcggccaggccccccagcgcagctgccctggccccgcccaccactcccagagcccggggttgggtcccaggtcgccctcaggagccaaggccccgcccaccacgctcggccccctcgcctcaagccccgcccacagttcgggtccagacccaggctccgcccccttcccccgcccacagctccagttcccttcgcaggccgtctctccacgggaggccccgccccccaccctcagccccgcatccggctgagtcctcaccccaggcctcgctcgccgctggagaccgcgctcactatccgaggaggaccctcctctgccccgcgtccagctttagtccccgactgcgttcatcgccaagggcccgcccactgccttaggtcgcgtcgccagccttgggtcccgtcgccagccttgggtcccgtccccggctgcactcaccgcgaggccccacccttagctctagtccccggtgtcgcccaccgacgaggccccgccccaaactccagtcccgggctgcgctcaccgccgtggccccgcccccaagcgccagtcctcggctgcgctcaccggtaggccccgctcgggttccgccgaagcccagcccccgcaggtcgcccctccgacgccggcgcgccgcaagggaggccagctcgctcgcagtggggaggtcgcggctccagtcctcgcgtccccgccgtggtcccggtgcctgtcccatcccgcgggcgcggccgttgcgggcggcgcggcccgggcgcgcgcggcgaatctgcggctgcgaatcggctggagcggggcctcgcgagagcggcgaggcctgggcggctgggcctgggcgggcggcgcgggctgctccggaggctcgggtggcttgagagtcttgggaggctccgggcgctgcccgcgcggtcgccggcatgacgggccgcgtgtgccgcggttgcggcggcacggacatcgagctggacgcggcgcgcggggacgcggtgtgcaccgcctgcggctcagtgctggaggacaacatcatcgtgtccgaggtgcagttcgtggagagcagcggcggcggctcctcggccgtgggccagttcgtgtccctggacggtgagtcccgcgggctggcgctgcgcggatttctcggtgcggcttaggcgggctggaggcggtgacggcgcggccgggaccagcgcctcggtaccgcacgctctgtcggggcgcgcggttctgcgccgtctgggcgcgagtgtggatccccttggcgagaatgtagaccttcttcgcgcgcctgtggacccccgtggcgtgcgtggacttcctcgacacacgcgtgggccagggcagccagcacagggagggttgaagagagcctggggagcccagaaggcccctcaagctgcccctcactgtcactctctgtgcctgcagttttgttttcagcaatgtctggtacttagaatccgattgctgctgcccttggccttggtggttaccgggcggatgccctagggccactcaggctgctgcaggcctcggaggggacgtttcagtgatgggcagtattgcgggctggggatggaccccagcctgtggaaggagctggactgtggccagtttcaggtggttgtgaatagagctgctaaaaggattcatttgcagctctctgtgtgaacatacgttttcatttctctggggaacttagctgtatgtgtaactctatgggaaactgtcatgaactgttttgtgatgtggctgtgccattatgcattctcaccagttgccccacatcttcaccagcacttggtgttgtcgatgtttttatttcggttgttctaacaggtgtgtggcatctcatcatagtggtattctgtatttctctactggctagtgatgttcaaccttattagggtgcttatttgccatgcccgaatcctctttgttgaaatgtgtgctcaagtcttatttttttatttatctcgagacaggatctcactctgtggcccaggctggtgtgcaatggcccagtcatggctctctgcagccttgaactcctaggctcaggcaattctcctgcctcaacctcctgagtagctgagactacaggtgcatgccaccatgctgtgatcatttattttattttatttttagtagagacaaggtctctatgttgcccaggctggtctcaaactcctgggctcaagtgatactccagccttggcctcccgaattgctgggattacagcgtgagccaccacaccctgactctcattttttatttgggttgttttcttattgttgagttttgggagttctttgtggattgtagttacaagccctttgttgtatatgtgattttcaaagcagaagttttttttcttttgagatggagtcttgctctgttgcccaggctggagtgcagtggctcgatctcggctcactgcaagctctgcctcccaggctcacgccattctcctgcctcagcctcccgagtagctgggactacaggagcccactaccatgcccggctaattttttttgtattttttagtggagacggggtttcactgtgatagccaggatggtctcgatctcctgacctcgtgatccgcctacctcggcctcccaaagtgctgggattacaggcgtgagccactgcgcacggcctcaaagcagaagttttaactttttttttttttttgagacagaatcttgctctgtggcccaggctggagtgcagtggca

SEQ ID NO: 1241537 - DNA, 4001 bp, Homo sapiens
gagcaattaaaaatacttctatgtggttgaaaaacaagttcagaatccgagtaattagactcacttttaattcagcaagattccttttaaaaaagctattacatcagatgtttaaaaactcctaatataggctttaaaaaaatcaagtctctgaagacactttgaaaacccaaatgctctaaaagtgttaattgtagcccatttaaaacccaagccagcatttctctgcacagggaagctccataagcagcctccataaccaacgtgtgtatgcagtgcagtgtgcgccgtgcagtgtgcgtggtgcagcgtgtgagccctgaaagtgcagtgcagtgtgcagtacagtgtagtgtgctcagggcagtgtgcagtgcagtgtgtgtggagtgtctgtggtttgatgtgtgcatgcatgcaaagtgcatgtgcagtgtgcggggcgggtccatgtgcagtctggtgtgtactatttggtgcaggtgtccagtcggtatacacgctgtgcagtgtgtatgtgtacatacatgtcgctgtatcgcagaatgacataaacaatgtgcgcccttcagtacaaaacattaaacaagtactagcgtgcaggtttgaactttaaaatctgtaattctaccaatgttctaattttttaaagatataaaatgacttctgcttacaaggataaaagacagcatacagaagccaagctcagcagaaatgtaacctggcatactgaacaatgtacacactcgttaatttggcacagtgagtcattgagtcattattttcgtggtcaagttcgagattcctggggttggagggtgagggaagggggttgctgccagagccctgcctctgctctgctgggggcagctcccagagcaggagccccctgctagggccaggctaggcctgctagggcgggcgaggctgaggaaaagacgggtgaaagaagaattttacttgtaattactcagaacaccaccgcctccgctgcaatttcactgaactccaagcccatatctgccattccgaagtctgaaaagttcagttttttcggttcatttggtggcaaacaaccccttcaactccaaggccagtccgggtctggtcacggggctactccgagggccgtggaagctcgacctctcctgccgcccgagggcagggaccgggtggccccgggcacgcagggtgggcgccctcaacgtgttgttcccggggaacgcgtctgccttgagctagggccgaaggcggcgaccctaggcgccagagggcgggaaggcgggtggccgccgaccaagcctccccctacagggtccccagccgactccgggaccgccgcagtccgcagacgcccgtccccgtggcccccgcccacggcccccctctgcatcggtccagccctgaccaggcaccccgcgtccccaccccaggaacgcgccgcgcacccccgaggcggagaggcgcggttcccacgggaggcccggggtggccgcgcaggtgccggcagccgctggggctcccggacgctccaggcccgcggcccagtggcacctcccgggaggggcgcacggtctccagggcctcgcttgtaccacgcgccgggagcggcattcgcctgaagggaaggtccgagcgggcggagggtgcgcgccggggccgtcccgcaccagctccccggctctctgcatttcctttcctccaggccggggggcgcgcggtgccgagcgatgaccctgcgcccacctccggagagcgagccggggcggggtcttctctgcggcccccactttctccgacacccccgtcgccgtgagccaggcgagcaaattcctgcagaagccccggggtgcggggtccccgccgctgggcgcccgggggcttccagtccctccgcctccctacctgtcttcgctggcgccgggaggctgcagccagggccgctccgtcggtgcccgcccaggcccaagcccgcgaggtcggccgggccgcaaggaacgcccgcaggggtgggactttctctctccgccgctgcctggcctcaccctccaccccgccctgtctcacttacccacctccaatccccgtgggaggacagagcccttcgtagaggccctcgtggtgaccggtgttgcccggggcctccacccgcttgggtctgtgccaaggcttggctcatcctccactctggtcaccccgtctgtcctctcttgggtcagcgccagtcacctctccaatcccatttccccttgcccaagccttctagctttgccctatccgctcctcttcatgcctatcctacacacaacacacctgtgtccagccaccaccttctccacccctggatcctattcttcagccgcaactgagtttctccgcacacgctgctgttacccatctcccagcacgttttctcactcagaatgcgctctcccaatcccctctacctctcaaacccgtagtcagccctcaaaaccttggtcaaatgtcactttccttcctttcttctttctttccctccctcccttcctcttttctttctttctactttcctccctcactttcttctttctttccctccctcccttcctcttttctttctttctactttcctccctccctttcttcctctttcttttctttctttctactttcctccctccttttcttttttttttttttagacggagtttcactcttgttgcccagggtagagagcaatggctagatcttggctcactgcaacctccgcctcctgggttcaagcgattctccagcctcagcctccctagtagctgggattacaggcgtctgtatgatgcctggctaatttttgtatttttagtagagacaggttttcaccttgttggccagactggtctccaactcctgacttcaggtgatccacccacctcggactcccaaagtgctgggattacagacgtgagccactgcgcccagccttcttcttctttttttaaatagaaacaaggtctcgcccaacctggtctcgaactcctgagctcaagcaatcttcccaccgtggcctgccaaagtgccaccgtgcccagcatgtcacctgcttttgaagccgtctccacaccaccccaggccgatggggtgcatgtcctgctccctcggtttctgtccctgttgctgtgatttgctcagctgtgagtcccggggggcagggcctgcaatgcagccccaccacctgtgccagggcactaattagcatcaaggcaggggctcaacgcatgtgatcaacttcatttgttttcctggttgtcctttttcacaaccaagacactctttgcctaccattctttttttgaaactggaattcactcatctttagaaactggtcctggacacgagggaggttggggggaagaagttggggagaggttgggggtggggtggtggcaaaggctggtccccttcccccacgctgttctgcctttagccccttgctggccctgccacttctcccttggcctcatttgggcaaagagaagtcaccagcgggaagctcagccccacttcagccccctggctccagcagctgcctgtttggacaaaatgcttattagaacatggccagtttaaatcagtttaaatcaggtgcatttcttacctatcaatgaagacaggaggagcagcagctgtagcggggcccctggggagttgtgtgaattcttaagcaaagataaagcttggcagagaaaggggagtggaatcatgcagcctctctaaagaggaaaagcgcttcttccattcaacaagccccactccctgcccccaccagctgggacttttctgagcttggtcaaaggtcctctgttaagtgggaggaaaatgcttctcccgctgcagggtgggggaagctgaggcccaaggagctcactttcctgctgtgtccctgcttttcctatgatcctttcttctcagacacccagggctgtgatttcttatgcctcacgccagctgcaaagaggact

SEQ ID NO: 1241538 - DNA, 4001 bp, Homo sapiens
aaatacctaaggtctttcacagaaatgtataccttccctcttcaaagaatgttgggggaaagtaggtataaaagtacttttaattcctagaaataagacacaaattacttaatgttatttcttcattgaagccttttaaggtttacatctatcatttttaatgctggtatgattatcagaaaaagaagtcccttttcaaagacagcaaaatgttaacttaataacgcagtcatcacgacatcactgcaaacatttatctcctattgaactgagaaacaccacaacaatcttgcttagactcagttctcctagggtctcttattctatgaaagggaaaaatcaataaacagaaaccatgcagattccaagattttagacctgtatagttagttaagtctaacaaacgttttcatcacagaagtaatgtgatagacttcttaataacctaagggggtgggtgggagccatggaaaatccttttaaaatacataaattgcgatagaagtcattaaggtctgtgccaaagttagagtctcacctgtaaagaaacacattcacacacatatataattgtaaaactacaatcggtgattatgtgctaaagaaattatccttacttacaaaaaaaaaatagacctgagttactacattcgatgtctagaaaccacaaaaatctttatcctgaatttaaccaaaactttgagtgtcaattacatgttgcgttttgaggctactaagatgaagaaaactcggtccctggtctcaaagaggcactcttacgcttcaatattcaaaaatggaagaaatgcagtctcactatttaggcctctacaatgctgtatatttgcaggaaaaaaaaaatccgtaatctactggcaatgagctgccaaattatatctcattatcagaaagggggaggggagaaaaaaactttttaaaaacccaccaagaaaagaaaaaggcgcagtggcattagaaagcataaagagactagcttcaagccttacaaccaggaaaaaaaaagtatcaccagagatagagaaagaaggaaacagaatgaaacctggttaccccatcaaaacaaaacagggaaagcaatacataagtcgttttggaggagggcaccctgtgaagtgcccccttctccgaccgcctgtgaatgctagggaggcggaggtggaggcaggcggactcaacgctcaaagctgggcttttaactcgtgctcctacattcagacaaggtcagtggaaaggggctaactccggcgcacaagacaggcatctggaaatgggaggaagagagtgagcaaactgagacagaccaggaacagaaaagcaacatcgaatgggcccgaggggcgccgagagcgagcccgaaccccaagtgctgatcccgcgtgcagcagggtcgtggttccccaccaccaggcaatgttttgttttcgggttgttttgattttctttgtggacggggcggagaagctggagtggccgggcgagttagaggttccgccagcaattccggaaggggaaggcccccggcccgacggcagctgacccagccaggaagggtcgggggacgcgggaacccagcacacggggggaagtgcggcggcgagcgagcgaggaaacaggaaggtccccagtcctgcctgcctcctaccagcggggagggtcgggctcgcgtgccaccctctccgcctacctcttccccttcccggacgccccccaaggcccagccggcgagcgaaagaaaacagaatacaaattacttacaacggcatcgtctccggcgccggcaccgcccagtcacttcccccccgcaaccgccgccgctgccgccctgggcatgatccactgaggcgggagggaggggggggcctgcctcagccctgggtccaacccctctcccgcaccgctcccgccgctttaagcgcttctcctccttccccttcgtcctaacatggcgcccgagcgctaccacagcaacgttctagaactgctgacgccaccacgcacgccgtgcgtgcgcctgcgcaccagcgccgtccgccgcgaagcctcacgggaagcggagttcctaaggccgcctgcggcccggcaattaccccctgggtcctctcacacttagcagtgggtgtcagatggtggaagggaacgctcagggaggccccgggcggtgagttgtccctcgggcggggacgccctcgtgggcagtgcggcgtggacggcgcaaggaagaacccggagagatcccaagccacgaggcaccgcttccggcgcattgtgaggtcccacctttcccgccgcctgaggtcgcggcggctgctctttcccggagcagcgtccctggaggcgctgccagggggtgaggcacccacgcgtgcaccgtatgtaccccccagcgcggcgcttagaacgactcgcatgagtcgctgccttgggttggaaccggttactccgccgcttcgtactggactgcaaagtaacaagtacttcgccgggcagcggtgccgaccccgtgtgctacggcgagaggtgcttagcctagagccgacgaaaacatgtccccaggactccctttccctcccagactgcgtcccaccagatggagctttccgtctgttttaaccaccagtgtattcctgatgcctgacccaggcgctgaaatatttgttgaacgaataaatgtgtaggttaggactgacgacagtccgcgaattctggaacacgggctgattttacttttgaacaaatgatgcactggaacttcctgacagagctgaccttttataggaacatcaatggcagtcaccgctggcattttagcaaaggttgtcttggtcataatttccccttgactgtgtttccagcccttaatctatatcgggtgggacctggaagtctaccttctcgccacccctcggcaaaagtttgagaaagtgtttgaggcagagcctcctctctcatatgccctccatctgcgaattagaacgaattataagttctacggtgtcacatagggggttagcggagaggaagagggaaagaatcaaatacaggacgctgccttaaccaaagttctaaactctaaatgtaataatgtgcatttgtgagtcctcaggaagtttcacaaaggctttcccttttttcacagaatgtctagtaggactggtgactccgaatgggaaaaacacaggacctagacctgccctgtccattagtgtagccccttggccacttagggccactgagcacttgaaatgaggctagttcgtttaggaggcactggaagtgcaaaatacgcacgggtgtcagttcgacgaatgtgaaatacctcactgatcactttttatattgattgcacgttgaaatattttggatatattgcagtaaagaaaatgtaagccgggcacggtgtctcacacctgtgatccagcactttaggaggctgaggtgggaggatcgcttgggcaggagttagagaccagcctgggcaatatagggaaacccccgtctatacaaaaagttaaaaaaaaaaaaaaaaaaagaaaaaagaaaaaaaaattagctgggcatggtagttcctgcctgtggtcccagttactccggagactgaggtaggaggatccctggagtgggaggtggaggctgccgtgagtcgtcatctcactactgcactccagcctgcgttgacagaacgagatcctgtctcaaaaaaaaaaaaaagaaaatatactattaaaattaattttacctgtttttttaaatgtgaccactagaaaattttaagttatatatgtggccttcatttccattaaatagtgctgatctgcaaacagacttatatttgattgtcatttcttccatttagtctcttttcctcttgtcatcaaggtggctttggctggagacccagtagcatagttgtccctaaaagactgaaaatctgagatccagataattcaataatgtattaaggctatggacttcaaagcagc

SEQ ID NO: 1241539 - DNA, 4001 bp, Homo sapiens
tagccgggaaatcacaatccaacacatcaaaaaaacaacatttatgacagtgtgacagcagtacatgaaaaacaaagcaacttaatgaggaagaagccctatttttctttaactaggcattctttggtctctctattgtttactacagtaattatcgtatacttactttttgagtctcgctctgtcacccaggctggaacgcagtggcatgatcaaggctcactgcagcctcagcctcctgggctcaagcagtcctcccacctcaacctcccaagtagctgggattacaggcatgagccaccacgcccagctaacttgtgttttttgttgagatgaagtttcgccatgttgcccaggctgatctcaaactcctggcctcaagcgatttacctgcctgggcctcccaaagtgctgggattacaggcgtgaaccaccgcgcctggccccgtcttccattttacacacttgaactaactcgcgaagaatttgaaatacctaaggtctttcacagaaatgtataccttccctcttcaaagaatgttgggggaaagtaggtataaaagtacttttaattcctagaaataagacacaaattacttaatgttatttcttcattgaagccttttaaggtttacatctatcatttttaatgctggtatgattatcagaaaaagaagtcccttttcaaagacagcaaaatgttaacttaataacgcagtcatcacgacatcactgcaaacatttatctcctattgaactgagaaacaccacaacaatcttgcttagactcagttctcctagggtctcttattctatgaaagggaaaaatcaataaacagaaaccatgcagattccaagattttagacctgtatagttagttaagtctaacaaacgttttcatcacagaagtaatgtgatagacttcttaataacctaagggggtgggtgggagccatggaaaatccttttaaaatacataaattgcgatagaagtcattaaggtctgtgccaaagttagagtctcacctgtaaagaaacacattcacacacatatataattgtaaaactacaatcggtgattatgtgctaaagaaattatccttacttacaaaaaaaaaatagacctgagttactacattcgatgtctagaaaccacaaaaatctttatcctgaatttaaccaaaactttgagtgtcaattacatgttgcgttttgaggctactaagatgaagaaaactcggtccctggtctcaaagaggcactcttacgcttcaatattcaaaaatggaagaaatgcagtctcactatttaggcctctacaatgctgtatatttgcaggaaaaaaaaaatccgtaatctactggcaatgagctgccaaattatatctcattatcagaaagggggaggggagaaaaaaactttttaaaaacccaccaagaaaagaaaaaggcgcagtggcattagaaagcataaagagactagcttcaagccttacaaccaggaaaaaaaaagtatcaccagagatagagaaagaaggaaacagaatgaaacctggttaccccatcaaaacaaaacagggaaagcaatacataagtcgttttggaggagggcaccctgtgaagtgcccccttctccgaccgcctgtgaatgctagggaggcggaggtggaggcaggcggactcaacgctcaaagctgggcttttaactcgtgctcctacattcagacaaggtcagtggaaaggggctaactccggcgcacaagacaggcatctggaaatgggaggaagagagtgagcaaactgagacagaccaggaacagaaaagcaacatcgaatgggcccgaggggcgccgagagcgagcccgaaccccaagtgctgatcccgcgtgcagcagggtcgtggttccccaccaccaggcaatgttttgttttcgggttgttttgattttctttgtggacggggcggagaagctggagtggccgggcgagttagaggttccgccagcaattccggaaggggaaggcccccggcccgacggcagctgacccagccaggaagggtcgggggacgcgggaacccagcacacggggggaagtgcggcggcgagcgagcgaggaaacaggaaggtccccagtcctgcctgcctcctaccagcggggagggtcgggctcgcgtgccaccctctccgcctacctcttccccttcccggacgccccccaaggcccagccggcgagcgaaagaaaacagaatacaaattacttacaacggcatcgtctccggcgccggcaccgcccagtcacttcccccccgcaaccgccgccgctgccgccctgggcatgatccactgaggcgggagggaggggggggcctgcctcagccctgggtccaacccctctcccgcaccgctcccgccgctttaagcgcttctcctccttccccttcgtcctaacatggcgcccgagcgctaccacagcaacgttctagaactgctgacgccaccacgcacgccgtgcgtgcgcctgcgcaccagcgccgtccgccgcgaagcctcacgggaagcggagttcctaaggccgcctgcggcccggcaattaccccctgggtcctctcacacttagcagtgggtgtcagatggtggaagggaacgctcagggaggccccgggcggtgagttgtccctcgggcggggacgccctcgtgggcagtgcggcgtggacggcgcaaggaagaacccggagagatcccaagccacgaggcaccgcttccggcgcattgtgaggtcccacctttcccgccgcctgaggtcgcggcggctgctctttcccggagcagcgtccctggaggcgctgccagggggtgaggcacccacgcgtgcaccgtatgtaccccccagcgcggcgcttagaacgactcgcatgagtcgctgccttgggttggaaccggttactccgccgcttcgtactggactgcaaagtaacaagtacttcgccgggcagcggtgccgaccccgtgtgctacggcgagaggtgcttagcctagagccgacgaaaacatgtccccaggactccctttccctcccagactgcgtcccaccagatggagctttccgtctgttttaaccaccagtgtattcctgatgcctgacccaggcgctgaaatatttgttgaacgaataaatgtgtaggttaggactgacgacagtccgcgaattctggaacacgggctgattttacttttgaacaaatgatgcactggaacttcctgacagagctgaccttttataggaacatcaatggcagtcaccgctggcattttagcaaaggttgtcttggtcataatttccccttgactgtgtttccagcccttaatctatatcgggtgggacctggaagtctaccttctcgccacccctcggcaaaagtttgagaaagtgtttgaggcagagcctcctctctcatatgccctccatctgcgaattagaacgaattataagttctacggtgtcacatagggggttagcggagaggaagagggaaagaatcaaatacaggacgctgccttaaccaaagttctaaactctaaatgtaataatgtgcatttgtgagtcctcaggaagtttcacaaaggctttcccttttttcacagaatgtctagtaggactggtgactccgaatgggaaaaacacaggacctagacctgccctgtccattagtgtagccccttggccacttagggccactgagcacttgaaatgaggctagttcgtttaggaggcactggaagtgcaaaatacgcacgggtgtcagttcgacgaatgtgaaatacctcactgatcactttttatattgattgcacgttgaaatattttggatatattgcagtaaagaaaatgtaagccgggcacggtgtctcacacctgtgatccagcactttaggaggctgaggtgggaggatcgcttgggcaggagttagagaccagcctgggcaatatagggaaacc

SEQ ID NO: 1241540 - DNA, 4001 bp, Homo sapiens
tctcttgccattagagaaaactactcactcatcatattttggagaggattcctaaaatgagtactaacagcatcccagacaggagtccttataacaaaggatgctctctgagatatccatggactgaagatcggttccagagtctcttaccttccccaccttggctgtacactctgggtccacaggagctttgccctttaacagcaaggccttcacagattctgaggaaagacagataggtactactttatgggaatcaaaaacagctgttgtggtaaaacagaaacttgtcaggattaactttgcccgcccaaccaatcctggtctttccttagaccccaatccatctcaaatacatgaaaatgaagattcaaggcagtagattagtgctgtggtatgcccaaaggatagagaaattaattattccctgaaagaaggacgaaataggagttgaaataacaagatatcatccccagatccactcctaccagagacccttttgctggcccatgaccttcctggcataccatcttgcttgtcttctgtcctgtccttattagcttttcctccagccacaggcatctttttcgactcctgtctctggcatctacgagttttcttggcaggggaagagtcttctggagccgtgttgccattattaactcttttgctttcatttaatgctacagaatttggaaattagcaaagaatgagtacacacccgaatacgtgtagattttaaagattgaaaaaaatcttttaaagaaatggtttaagataattttctctctttttttgttttgaggtggagtctcactctctcgcccaggctggactgcagtggtgcgatcttggctcactgcaacctccgcctcctgggttcaagtgattctcgtgcctcagcctcctgagtagctgggattacaggcgtgcaccaccatgcccagttaatttttgtatttttagtagagacagggtttcaccatgttggccaggctggtctcgaactcgtgacctcaagtgatctgccctcctcggcctcccaagggattacaggcgtgagccacctcaccccgccggtttaagataattttctaagtttacagaggcaataacaactgtcccacactacttttgtgtaacagtctgtgtaattcttcctaaattgctattctagccaaatgaaataaaacaaaataaaagggagtcccaggagtcttgtaagctcatagattgaggcctgcttatctgttttacttgtgtcccaatgtcccccaaatacccacctcatacatgaggccgtatgggataaaggttagttaagtgctcaagggtctgtgcctaatttagagcctagctctgctgcttttctctgtggaaacttggagaagtatttgatctcttcctacttcacttactccaatattagaatattgtacaatactgtacttctagagaagtacaatagaacctaatttatagggtgcacctatgcatttaagaacattatacacataataccgtatctcaataggtctaagactcgcattttactctctggaactgggatgcatcttacaatggatgacataagcagtgaatcacagttcaccattttcagtgcttatcctttgttgtgtataaaataatggtgtgccttacaattactttttgtaaattggatgacattaggtattaacaacagtactggcacattagttgttacagctccgcaaggctttatgcacaattatgtaatccccaaagctctgaaaaccgaaatttacaaaatttagcaccccaactggtttggtagccaagtgcaggttatagggagctggaaggggaagggggtcacagtaggtggcatcgttcctttctgactgcccgccccccgcatgccgtcccgcgatattgagctccgaacctctcgccctgccgccgccggtgctccgtcgccgccgcgccgccatggaattcgaacgctgacgtcatcaacccgctccaaggaatcgcgggcccagtgtcactaggcgggaacacccagcgcgcgtgcgccctggcaggaagatggctgtgagggacaggggagtggcgccctgcaatatttgcatgtcgctatgtgttctgggaaatcaccataaacgtgaaatgtctttggatttgggaatcttataagttctgtatgagaccactttttcccatagggcggagggaagctcatcagtggggccacgagctgagtgcgtcctgtcactccactcccatgtcccttgggaaggtctgagactagggccagaggcggccctaacagggctctccctgagcttcggggaggtgagttcccagagaacggggctccgcgcgaggtcagactgggcaggagatgccgtggaccccgcccttcggggaggggcccggcggatgcctcctttgccggagcttggaacagactcacggccagcgaagtgagttcaatggctgaggtgaggtaccccgcaggggacctcataacccaattcagactactctcctccgcccatttttggaaaaaaaaaaaaaaaaaaaaaacaaaacgaaaccgggccgggcgcggtggttcacgcctataatcccagcactttgggaggccgaggcgggcggatcacaaggtcaggaggtcgagaccatccaggctaacacggtgaaacccccccccatctctactaaaaaaaaaaaatacaaaaaattagccattagccgggcgtggtggcgggcgcctataatcccagctacttgggaggctgaagcagaatggcgtgaacccgggaggcggagcttgcagtgagccgagatcgcgccactgcattccagcctgggcgacagagcgagtctcaaaaaaaaaaaaaccgagtggaatgtgaaaagctccgtgaaactgcagaaaccctttgggaacagagggaaccatggggcaggaagcccacgaaaattctaattggtcttctggttcttggtgacatcaggtgaggggcgcccaaatgtttggcttcatgagaatcaccgagtatggggactgcatacttaagcaaattccccaccccagaccctccgattcaataagcctgtattaacaaaatcactgggtaatcctggttttggcactaatatcatttagaaacatattgttaggatagcatagtatctgttatagagcaacctgagcaaaatagcgaaacctcgtctctattacaaaaaaaaaaaaaaaaaaagtgaaaaattagccaggcgtggtcgcgggcgcctgtaatcccagctacttgggaggctgaggcacgagagtcgcttgaacccgggaggcggaggttgcagtgagccgagatcccgccactgaactccagcctgggtgacagagtgagactccgtctgaaaaaaacaaagaaaaaaaaattgatacattttaatttttgttcatcaaaagatgtaaagtttagaaagaaaaaacccaaaatctcattatttgcatgtaatttgattatgaatattttaaaagctagaagaaactacaggataaaaattttaccttaatacaaagcctagcaagactgatagaaaatagcgtgtgaaaataaattccatgcttataaaagagcttcaaacaactataaataaaatttttggataaggtagcatttacaataacaccaaagcatatcaagtagttggaaataaatctaacaaaatgtaagtgctcaataaatgttgttggataggattgcttaacctgtttcagcggtacaaagcctgttacatctgacttaattatgacacaaataaattagactaggtctaaaaggaaatactttggagataggaaaaatataagcctttatgaaatgaaaatttattaaaaatagctaatacttagtagaactttcttgtgtactagaggctgagctaatgctttacatgcataacctcatttaatcttcataagaataatagccagaatttatttagtt

SEQ ID NO: 1241541 - DNA, 4001 bp, Homo sapiens
gctcttggcattctcaagagcgcaggaagagtcaattttaggtgttttgggccactaagtatccgcggcaagccgaagaccccgctctgggagcaagagaagccgaagctgcagacagggtcagcgggatcccagcagaagagggtgatgctgaagccttcccggggcgcggaccgagtgctagggcgaggtagtcagcgacccgctgagaccgaccgagagacgacggatctgaggcagagaaagaggatgaaggaaggaaaagagagaacactaaggtctggtcagtcccgatgaatgtaaggatgcaggacctagaacaagaacaagggtcagctggagtctgccgcctggttacactgctcactctggactcagaagatctcaaagagatcggaagaatttcgactaaaaggagaaatttaagaccaaaaccaaaacaccagtaaggcctgcagctggctcaggccagggagaagccaaaaagcctttccctagccgcgtcgaggcctcctccgaggggcgactcgctctctggataaatatttactcagtgggagactggaagccgggccgagagtgtgaaggagggggctacactgggtgggaggaaccagtacactcggcgctggccggatccttgtgtacacccgcccaaggggagcaggggccggggactctgggggcgactcggcccaggcgtgtggctggggaagctttagaccccagcatcggatcgaccggactccgccctgccctcgcggaccccagccagatgctgtgaagtctccataaatctgtcagccgtcccagtgccgcgggcagtcacctgcggcgcccccttcccggcgctagagcggcccgcggagagacgcggagaagcaacgggaatctagcccggcagactgtacccgagggctgccgaagtcagacccaagcactacaggttgtgcggaacgcgaggacccctccctgtatccccaacctggaccgacccccggaagcctgctcctccgggtctacaggtcagtgatgactgtggatgggaggatagggcgagagttgggggtgcgtatgcacgggagagaggttgttctattccgagttgcagttatgacaagcagagctagcagaaaatattaaggagctgattcctccaacttgccccctgctggggacaggaccccccccccccaagcgaggcccaggcgacggtgcccgcctcttgtccactcggaggagttgcagggattgtaagacagccagagtccgaggtccgggactgggattttcatagtgcattgacttctagccgtctgggggcaaatgcagtaaaggcaagacccttcagggtcagttggggcattgcgcgcggtgcagagagaaaaacaagcccagcttctccagaactcggccctctgctatgtccccgtcttgcagggtaagcggccagctgagtttccctgaaactgcagcggcaagtgacagccagaagctcgccccgcgcccagggcgagggagggtccgccctggaccgctggcccctgcaggatctgcgctgcgggaggggatggcggctaaaaggagcagtcgcggggattggggatggagacagccctcaggggtcctctggtgggagaggaggacaggaggcgcccgcacactgacctgcggcctggacttggagggactgcggacgcgctagcccaaggagaagccgcaagcgcacggagaggagcagagctcggccggaagatgctcggagaatagcccggcagcctctccaccttctcatcaaggagcctcacggttcaagagtctctccgcggctccactaggtagctagaatggcagcgggttgggtcgggcccgagctcggaaatgcgtcccggcgttctgcggtccgacagcgacacgaccggagccctgcgggaggtgggatcagccccacgggctgcgagcgctcgtcgcccgctttctccttgcgagagcaggggaggggcctgttgctgtctgaaacccgcttttaattctccgcctgcctgtttccgatcacccggggttggtttttctgtttgctcactccttctattacaataaaaacaatcgacatttcttttcagtttccccatattagcgtcactcagtaattgttccccacccccccttaccccacgcgttgaaggcgagcgggattgctggtattcgcgcatttggaagttttccgagcatataagcaaatctttcctaaagactttaaagtaaaaataaataacggcccgagaaattgccgtgaccctaacattactttctgaaagcaaattacacccatttttcagttttcaacagcggaattgctttcagaaggacagtgtggagctccatgtgatatggttacgtttgtttattaaatctgcaaatgaaagagaacatgttttaatgcacggggcaaaactccgggctgcgggattgcaagagcgaacaaggatcggatcccaacagaggaaggggggagcggcctaggggtagggaggggtagggaggggcaggaaggtccctgaggggaggctgggctgatctagccagagggagggggatttcgtcttgccagggttgcagcattagcagaagttgcgcagcttcgtgaggaggacgcagtccgtggtcactatacagccatcagctgcagcgctcaggagaggtgcagctgcgtgtgggaaaagcaagattgccggttcttcaagcacagctgtttgagaccctgccctcaggtgtcggcctgagggctttggggctgcctcctttcaaagaccttattggcctaaatgctgtctggaaaagataaacgagaaccaggccgcgcctctaaactctggtttcgggactcacatgaagcccttcgggggctcccactgtggtctgagttatgttgaatgcagctttattgcaaggtccaggttgcctgcaggctgccaggcccagcccgctgtactctgatcagagccggacgtctgccctctaggccccaagcttcggctgggcccgaactgctgacggagggaccaacccactctagacccaatttctggcttccgaggagtctgaatcaactcgcaggccggagtcatcttgaccgactcgaacgttctcccattttcagtgacccagggctcactcactgcgcgtttcctctaggtggcatgatgcccttgcgagtcgcccccagtcctgtggcgtctggcgaatcctcgcacctgagcagcggacggggcgatagggggttggtgcgctgcaaagtcgaggagctgcgtttccagcctgtcgccttccccgagttcatcccgccacccaccagcccccgtgccgactccgagagcggagactggtgttgcacagtcctagctaatccctcgaaaacaggaagcggaggctgggagcagcgggttagcgtcggagtcgcagaaaatttcccgcagtcttcgagtcccccagccgcctctcccggccaccgcaccttgtcacagcgccacctataggagccagattagatcgcgcacccactgtagtttttgacaaggttgggaaccgcctttgaaaatccacagaatttcaaagcccgatatttttggttccccctttcagatccctctgcaccctcaactctccattgaccccaaggctccgcatcattctccaccatgctccaagggaaacccgatcatgtcttttcacgattcaccgaaaacccatcttctatgccctaccgggcggattctcttgcggcccccaggggctactcaaggacactggttgtgagctgtccttgcgtcagggcgggagagctggagacagcaaagaagctctgcagggaagggtgtggggagtgatggacccattcttctccagttcatcctaccatttgttgagggctcacgtcaaacacaacaaccataccaaggaggtattattctagttcccattttacaagagacattaaataa

SEQ ID NO: 1241542 - DNA, 4001 bp, Homo sapiens
ttccattttcaagtatagttttttataaattaaaatggcagctgtgtttattctttccttctggtgtgtatgctgtaagactatgaaagccccaagcaaaggtcacagtctttccagtgccaggtttctagatgagggctcttgcacagagaataggtgactggatgctgggcttccaggccctgatctgctgctgcccacttggaccaacaatggttgcataaaatgttgccctcgggtaagtatttctgaactctgcggaaggttgaccactggggaatgagtgtcactggctggggttcatgggcttaattctcaggaggtcagcgtcctgttgtctgtcctctcatggccctgggagacagagaagcaacgtctgctctgattggcctggactcaaggtggagtaaacccgagagagcaaagaccatgaaggggatgttactctcctcctctatcaaggcctcgcccatcagaaactgcccccacacccaggaccacgtgaccccgtgcttcccctggctcttcttcctagaggccacatgcctagagagctttggtgttggtgggagggtggaacagcagcttgctggcagctcagactcagagggtgttagcctggggaaggaagaaagctcagagcatggatacgggagcttgagtctgtctggggtagaagctggggtggtttccgctaaagcaggatagatgatcagtgtggccccaggggcaggggaggagggctactgggacctgggtctgttcctgcctcagagggaagttctccgtgagcatcagttttcaagcacacagtcttgaggacagcctctctctccctggagcctggctcacgttatctcttgtgaagcccccacaccctcttgcagccctctaagtgggacgtttccttcagagaccacccacaagggctgcccaagtggaacgggctgtgcgacagatgtgggtcacttccgactctgggacaaaagctgagaagagaggcctcagagaataaataggagactaagaggacaggcagacaaacaggacgagcctgggggctccaggcctggacggaggaagaagccagctatgtaagaaacgaaggcaacttggcgccctcctcccaccttgcttgcctccctcccctgggcccaggtccctcgggctgctctggacttcccgccaggttccagtccttccagtccgggagaggccgggaatggatatttaaccttccaccttctttagggggctctgagcttagtctcccggggctcacgtacccttgtccccagggccctgctgcctctcgaagtaccctggggcgctggctgagagcccgttagaggtccgagggaggtatctgggaaggaaaggaggatatgcggagacctggctcagcagagaggagcgaggagagagaggaagttctgagagtggcagatagagatcgcgcggtcagaggcgagcgaggcagagaaggggaggtgcaggcggaaacgaggagcaccggccggctgccctcccaagagacgcgcggcgcgggaggctggacccacagcagtcgcccctgcccgcctccgcctaggatgggaaacctggcggaggctgagagcaggagagcgccactggcagccccgagggggcgagcgcagcggaaggtgcgggtgggccccgggccgggggtcactcaccgcaggccagggcggtacaatgcggccatggcacctgggcaggggctgcggggtggccaggaaccgagcggagccggggaggtatggaaggcggggaaggagggagcgcggcgaagcgagccacagcagaggctggcgggaggcgcttaaaaaggaggggggcaggcgcgggggcggaacctggtagggctggcactagctttcctccgccccgctggcaggccagctccctcggccccggggctccaggctccaggtcagcccagccgccgccccaacccctgcctccaaaccgccaaacccatctctcccattggaggactgggtccactcttcggcccccgacttcgaggccccgccccccatccgccaccgccctcccagccgcacatgatgtaactttgaggactcttgctcccgggagagacactaggtggcaaacaagctaggaacgaggggcgaggccaggggcgggagactacaggggccagacgtctagaagttagggggttgggcattgcctttccagttcctcctcctggggacgcgacaccctgagtcctgggcctttctgtagtccaagtgcccaatgctaaggtccacttagtccccaactcctaaatccccgtttctcctcctgatcaaggctcctttctgccttgccatgaaatggtggagtctctctacccctgggtctcttccttggtcctctgatctggtcattctcctcccccggcacatcccctcttcccctgacggagtcttactctgtcacccaggctggagtgcgtgcagtggcgcgatctcggctcactgcacactccgcctcccgggttcaagcaattctcctgtctcaacctgcagagtagctggaattacaggcgcctgccaccacactcggctgattttttgtattttttgtaaagacggggtttctccatgctggccaagctggtctccaactcctgacctcgtgatccgcctgccttggcctcccaaagtgctggaatttacaggcgtgagccaccacgcccggcctggtcattctttctctccacaatccaatgaggaaactcatctgcccacccaactaccatcataaagtcctcaggtgatttctcaagctatacctccattgggacatctctctccaacctgagaccactggatatcacccacaatgctatatagcacctcaaactcagcatatctatgatgggtgtctgctcagcatccactcgccttttctggtaatagcaccctgattttcttttggggaaccatctcctcagtctgtattgtcatgtgggtctgatgtcacccctcttgggggtaggcttgcagcttagccaacttttgtgttcctcactctggccacagcaatcaaggatgttcaaggatgggcatgagatccctctctgggactttttctaaaactttggaagttagctctctttctgctgagttgctgagctggtagaatataagcctggagctgctgagtgttagcttggcactgcaaagcaggaacctggctgagacagaagccagcctagaggaagcagagcagggagatggcgagcaatggattcctgatttcagttacaggaattgatgcatttcttctcttgctcaagctaattttaattggagttctgccacttgcaacagaaacagtcttgattctcagatttcttggagttctatgctggaacatagtgggataaggagagctggtctccagccacgggcttgctactggtccccgtctcttccccctcaggctctagcctacactcaacctcaggtatatgtatttggatctctttccccccagttcatagatccaaactctgtccacacttacccagctgcaaacacatacctcttggccaacctttgggcctaaaggtgtgcacactggtggcagcatggttgacctgaaggtcatcatcttctccataatcctgcacctgctctcatggtttcctacctcagcaaatggcaccatcatctggccagttgccccaaagggaatcagtctagactattcttatcctgcatagctaatcagatgccaggacctttggaattgtacttctcaattagccctcaagtctgcaactatccccatggccagggccttagttcagggcttatctctcacctggcttcaggtgatagcttctaaggcacttcttggactcctgcctctccaaacaccaacccctctccctaccaagccactccccacactgtgcatgcaaatccacttggaaagttaagagagaagaataatgttta

SEQ ID NO: 1241543 - DNA, 4001 bp, Homo sapiens
aatagaactccctaggccaaaattaattgaaaattataatacttcacgataaattttcagaatgcaacaagactgaacaagtccccctaataaaacaagccacaagccatcagcatttcttaatggcttttttttttaacctcaaacaataagtcccttcaaaacaatttcaacgaaaaatgtgaatctgcttgagaatgtgcacatcttccctcaagcagacacttttcctgccaattagtgaaactgaacttcacttagggaagaattgggtgtcctcaccttttgcacttctcatagtggtcctccgggattttctaactcagcaccctgtctctagctccacaaagaacctcaaagttagcagaaatacattcaaaggaattctcctaaaataaaaagttcagatcctttcctcccctctgactactttaaaattttatatgaagccttaagtaacatctctgtccacacgagtttccctaacgccccaccctaacctgtgctttagaaactgcgcttaacaactttcaatgttgctttaaaaacacagatgattcagagaagctgatcgcaccgaattcagcaacaggcagtactctctctccctactcctatccgccaaaggccttgaaccaagccaaacaaatctgctgaaatgccagccagattccccgttatctccccgctccctccccccagggaggccaggaagcaccacggccaccggccacggggccgaacagagaagaaccgctgcgaagcacaacaacggttttttagaggcaggagggttccgagccgggttttcagccaccacccaggacccctggaggacgagcccggacgacccccacacacactcggagcagagccgcacggtcccccgcgctcccggggctccgcacgcggattagcggcgaggcggcgggcggcctctcccgggagccccggacgagggccgcggcgggggcgggcagtgccggatgccgggcgcccgaggaacccagcgtgccaaggatggatgcggcgtcccctaaagccgcagagcgctcggcgcctgccacacagccccacgggcggggggccccggcggggacggcctagccgagtggccgcaggagggaaccccgagaaggggcctaggacgctgccgcttcccagtgagcgggcgggggcggccggcgcgggttgccgtgggctcgttgctcgtgtcacctccgaaaccaggaaagccccgaagagaggagtgggagcacgcagtgggggcggggagcctcacaccgagagggtggcggcccccgggggacgagaccccgtggaagaggaagagggcgcgaccccagcatctccccaccggctcgcggggaaggagccacccgctccccgcccccacactcaccatgtagagggtgaagggcaggcccagcagaaagagccacaggtagaggtgcagcgcgttcacgaaggtggcctggtgcgggtcgtagtaccagcccccgctgagcgcggcccacaccccctgtcggaggatctgcagcgtctgcgaccccatccccacccggcgccgccgccgtcgccgccgccgccgccgccgtccccgccccggccccagctcggcctcggtcgccggagcctgcagctgccccgtctatccacctccggagctccgggtgagcgagccggcgcttcggcggtcgctggtgctgctgcaggaggaggaggaggcagcaaacgaggaggaggagacccgagaggaggaggcggcgagcggcggggcggaggacggcggagaggaggagaccggccttctgagagccgccgccatcttgtctcctaacacccggagccgcggcccggcccccgccacccgcggcccgccagcgcccccactgccgccgccgcgacccccgccggccgccagccctgggccaggcagagaaagaggcccggcgccagggagcgaccgagaggaagccgcgccccctccagctcctcctctccgctccctccgccccctgggccggctacggtgcgcgccgcgcctggtccgccgcgggcgcctcctgccgacgtccgggagaagcgcgcgtcaacgcggccggggttcagggccccgggggctgcggaggtggctgagacgcggctggctggtccggaggaccccattctgcccctggtaggccccctggcaagttcgcctacgagtctctaaacggggtctttctgactccgaaactaacagatcttgactccagaaaagcgtcctgcctgtcatttatgatatttgtgaaagacctaggaacaactgaagctaacacctgagatactgaaggcctggaagagttaggtacggctgatgacactgttgaaaagtcataaacgcacccaagttgagcaagaactgtgttggcccgtgtgtgagaaaaaatagccacgtccagactgggagaatttactacttccaaagacaagttaatagaagcggcacaggacatggaagtatggagtggacaggttaccatttgtacgcggtgattgtatttttaaatgtgctgtaactagcagccatttttattaatgggccaatctaaacagggttgaaaaagattaaccgtgacgccaccccaaattacaatagggtcttgtagatctctttttatagctgtaaaaacggaatcattcttggctctgtgtaatgtttataaggcgtgtctgatctcactgaataaaattttatagaaaagtttgaaatttgagtttattgaagtttggcttttatggcaataaaagtactgtgtattcccagattacagttgctataattaatgagggaaacaagagccaaaggaaactggtgatattttaagaagagtaatgaaaaaccgttacaatacctcccagtgccataccactttatagttgctcagacactatcacacccattccattcagacctcaggacaaccctttgagggcagcatagcagctattgttattttatggatgagaaaacctgtaaactcaagtaagtgattggccaaatgcttatggccacttattgctcataagcaataagtggttgagaactctaaaaccagcagtcatgctaactgcatgcactgaactttggaagttcatttctcaaggctctccaccttattatccatttcaggtaaaagtttgaattgattaagaacagttcagcaccttctggttatctgtgaccagcttaaatacatgaccagttttcgtcaaagtgcaaattcttagggcatcattctatagacactctgtggggtggtacccagcaatctgttttaacaagtcctccggaggattctaatgtagcttaccactgtagaacaccacaccatccctagccttgatttgtttatgtccttataaccacaaagccactgagttccagtaagataccttgaaattgagagctgtgagtaaacactggacaaaatatactttaaaatatatttgtatatctaaaagcaaaattatgattaaataatgcaattttacaattaaaatagtggccttgaagctggtgtcatagataccagctattgtcaagttttcatttgtttcccctaaaggagacaggaaagctctctgggaaggttttggaagtaatcccaacctttccaacacaaagaaagatgtaaacaaggataaaattccaataccacatcagtttccacaacagcaaagatccgctatggtttaatataaaaggattaactgtaatgagggtgaggtggatggggagaaatggaaactagaaccagatacatccgtggaatcggaggccaacccagctggcgtgataaacgttcagccagaatgcagtatctggaggatatggaaccggcagcaggccaggaaggcagccggcatcaggcctgttaaacagagaatgtgggtgttgtaagccaatggacagctggaacacatagccttggaaaatccaggagtgggcaaaaatt

SEQ ID NO: 1241544 - DNA, 4001 bp, Homo sapiens
taatgaggtaccatttcaaacctccttgactggctaaaataaaaatggcagacaataataagtattcatgagactgtggagaaatcagaaccctcaaacatatctggtggttatgtaaaatgatacagctcctttgggaaacagtctagcagttcctcaaaaggctaaacatagagttaccatataacccagtaattctactctcaggtatacacccaacagagataaaaacatatatgtctacacaaaaatctgtacacaaaagattcatagaagaaatattactaacagccaaaaaatgaaaacaacccaaatgtccatcaatgaatggataaatgtgatatatccacacaatgaaattagactataaaaaggaatgaagtactcatacattctacaacatggctgaaccttgaaaacacactaagtgaaagcccgttacaaaaggccacatattgtattttcccgtctatgtgaaatgtccaaaataagcaaatttatggggacagaaaacagattagtaattgcttatggctggtggggtaaggataatggggggagggaggtggtgactgctgagggtaaaaggtttctttttggggtgatgaaaatgttccaaacttgactgtggtaagggttgcacaattctataaatgggtgaattgtattgaatgtaaattacatctcaataaagctcttaaaaaagaaaaagcttccctgattggtattttccacagcagttaataattagaaggcagctctttaagtaggaaatttaggagcagccaacagatgctacaaacagttaaattcgtgaaaaggcaacatctgaactggatgctatgctaaaggtctggggatttggcgtgagtggcggtggataccaaataacatgaagggcagtctttgccctaactgcaggaatgatttaatgaagaaaacaaacacctaaaaatagtaaaaaatgagtaagtgaaaaatgatggatacagagcagataaccaattcagcggcatggaaaacaacttccgattcactggagtaaattctggtcctggagagacaagaggttgtggggacagaggtcgagatcagtggggaaggagcgcttcacgttcagggggccatgagttgaacaattcggacaaaagaggtttagttggagatattgcgagagtacagttctacctaacggacacagctccgggtgggtgtgccatattccatttcgtacgagtctcttagaaacaaaatgctacaattcaacaggctaaagtagtctttcaaaggaaagttaaaatcacactgaattactatctctaatgactgagttcattaagcgcaataattgcacttaaaggttttgcaacgaaaaacgaaaaatatgtttcttgtggcaatgaaagcccctagaacaacttggctctccgcacaggcttggacattaagatgccgaagaagtcccgaggtggacgtcggacaacgaacgtacctcaagtcacccgagggaagagaagacgcgaaggcatcccagggaccgcatttttgcaggtaaactcgggctgggcgctcccgccgggaggttggttagtgcccgaatgcggaggcagaaaagctgcggcggccgaataacgagctcaccgcggccccgcccgggccagctctcggtttccatggctaacgtctactccggcggccgccacccggagctgaacggagcgcgtgcgcgttcggggacctcgtcggcgcctggctggcctcgctgccccggtctgtgctcgctcccgaggcgggccctgccgtaaagcaggcttggcctagaggaagcagggaaatagcgcgcttcgttcgcgccaggactaggccaacatctgcctggccggggacgacgggagtcgctcgtgctctggtctcgcactgggcctagcagaagcagcagcggggaaagccgagacgccctgaacgttcccttgggccgggcctttacgcaagagcgtcgttgccctggtgacgtgacgtccttcctcaggattgtgcgccggggtggggaaacagacgtgcaaccgccattttgcgcattaatttaccagaggtcgggtcaggctgtcttaacgcaggcagaggggtgtggcagatctccaaccgctcggggtcccgtgatttccattaatgaattcgcacactggcgttaccactcaacacaccgacggtaatgaatgtttttgagtgatacttcatgcagcctattcggcttggacgattggggactgcataacgtgatcgctatcgcctcagtttgtggctgcgttttaaaatacaaggaaccaacatgtccattatagaaacgtgttattaagatattaataaaacaaggcagagttccggcgttccaattaaaaggccatggctgattcatattagtgtggcgggaatctttacagcctggccgcaaagaccccaattaacgctagttaaaaagttatccctatacccagggctcacctcccccattctccacgaaatatgatcccccccccgccccaccaagttctggacacgttccagattgccaactgggagtcctcaagacggccccggagagcgttaacaatgattggtctcagctgatttagaggctcgggtaagggaactttgaagctaacttgtcggtatcaaggtacccgcaattcccccatgtgattgggtagatgccctagcagttctgcacacttcagcgtccaagatgacttgtggactgttttgtttggatctccattcctcaaaactataaatgcggccttaatttttttttttttttaattcttggctcttggctgtcttggaaatgctgactttgtatttaagtatttaggttttcaggtcgtaatagaaaaataattactgtgttcatattaaaagccaaagctttatttatttatttttaagatattgtgtccagagcaaaagtgtagtgtgttgaaagcatgtggaagaaaaccccggatatacatatacttgtcttcaaggacttaatttgcaggtagaccctttcatagtttggtatcttcacgatttgatagaatatgggaaaacgtgctgttggtccatccatagtttttctcattgaagctcactcattgcgggtcagagtaccacattaagcatctcggaagcatcacttaccgccaagaagtctgagtttcatgtaattaagagtggaggctccagagtcaggaagtctgggttgaaaccctggcactactgcttactacttgtgagatcttgaggttatgtaatttctctagtgctcagtttccccatatcttgtaaaataaggcaaataatagaacttaacccgcagagagttatgtcattggattaaatcaaataattgtaaattgcttagcagagtaaatggcacagcttaagtgcttagtaaggatgagctattatctttatgtagagagtctgtatttatgcttgttcttctcatgggcattacatatgacccaagcagaattaacatgtttattgttgaaatatctgctgtttttcaaatatatttgaacatcgtgctttcttagaataaaattagtagggcatatggtacaagccctttggttagctgtgtataaaatattcattcaacatttattgaaatagtgaagggaatagtggttcctatttgtcaggaactacactaattgctgcagatataaagtcaaataaaacatgatccttaaggaatttaccaaaatataacttggacatcaaggacataacttgaacaacaaggacatcagtaattacagtgtatgtgataaacaggtatgcgctgagcttcagaaacaaagtgggacacataattctggggaaattaaggatggttgcaatccatttttaaagggtgagtggacagctgggccaggcgtggtggctcttgcctgcaatcctagcactttgggaggctgaggtaggaggatcgcttgagcctaggagtt

SEQ ID NO: 1241545 - DNA, 4001 bp, Homo sapiens
tgaaacatctcaacaatgatttcctcaaaaggaaataatgaaataaagttctggcatacgttaatcttccgcgtcaagttcacagtgttaaacacactgaagccagccacacaaacaaaaccaaactccacaagattaggttgggctgaagttacataagacagactaaactgcggcttttctcctgtcattcctcccgccttcctgtgaaccctgatatttgtctttgaagtgcaattaagatgtaggtgagaaaaacacttatctgcaaacagcttcaaaataggtaatgagatttccaataccacccccacttaatgcactagcaacaaagtcaggaagactgggaagctttgagttgtgcggtgtctggaagcttccctcaaaaactcctctctttaaattatttttaagtcagcacttacttcaaggcactcacttatcaaaacacgttttgcaaagttccctgagtcttcccacagccatgactcctcatatgtgtgctaagcctacctatcagcgccgaggatgttctgaatacaggtctttcaacgcagaaggacaaaagcgcgggttcccagagcgacacatccaaaggaaaaaataatcctttcttcaacactaaacccaagttgttccttccccccagtttcctgcacttcccccttccccctcccctttcactgcccactatatccagttttaagcccgcaaagcctctctcctggcttattaagggtaaacaatagaaatgtcacaaggaaactcaggaagtagatgaagtctctaattgctgccgtttaacgattgtacataattactatcttcaagatgcggctttcaccagcagagagggagccgaggcgggcgaggctggcgagctccccgcagccgggagggcatcagcgaggccgggaccggggggatacggcccgcgccccggtgccaggccccgagcagccgcatcctgtccctcccctccagagcactccaagcggggagaagcggagggccggccggcccgggtcacacacagttcactgctctcgggctgcggcggcccgcggcggtcatcggaacaatttgcaaagcgcagccggggatcccacagcccgcggcggcccaagctcacggcgccgcgctcggagttcgggggcgcgggtaccacggtccgcgagggaggtgggaagacggggctccgcgccggccggcctctcagcttcgggaagcgaccccgcgaagcgcccgcgaccgcggcgcctcacatggagtccctgcccgccctccccggcccggacgcggcgcgcgggaagtggagcccctgcccccgcccccacgatacggccgcggacccggtgcccggcgctgcccccgctgggtcgcccgagttctggccacttcctccgccgcgtcctccgcgcggacagcgcagcccggcgtccgccgcagcaccccgagcgcgcgccgatggggcgcatcccgcccccgcgccgccgtccgggccctgagagcctctcctgccgccccgagcgccccggcggtccccaaagagcaccgagccaccccgccagccccgctccaggatgcgggcgctccccgcccgcgccgctgcccgggaccagggaccccaggactcacccgagcaccaccagctccccgtatttcactggctccttattgggggcgcagtgttcctcctggccaggggaaaacatggagccccgctcggccgccgacgccgccgccgacgccgccgcctccgccgcgatccccgccgagtccgcgccgccgctacaatcccatcccgagaacggggtgagcgcgccggggaagggcacggcggcgaagggggcgcggggcggccagtcccgctgctgctccgtcgtggctgcgcggctgctccgcctgactccccggagctccgcgcgccgcggccgccccgagtcagagccggcaacaaatgggacccggcagcagggggacctgcctgcgctgagcgccgccgccgaagccccgcgggagggagggaaggaggagggagcgggcgcacgagaggctggggccgcgcgggggaggcgggggccagcgcgcgggcaggtgggagccgccccgccccacgcagagccaggcgcccgcccccggcccgcggggcgccccctcccccggcgcgtggggccgtccgcgcccactccccgcccccctcggcccggcggaggctcggcccctgtgttatgtaaacatagagtaaaagggaaaggaagttcttaaaggagcagctctgttttttttcctcacttccttccccaaacttagagcgcggggtcctcagccctcgccgcctggttcttcagccgcgaaggcccgcgggagatcctggaaacgagcggccgcggttcccaagcccacgttttcctggctggagttcgatgggattaacttcctctccgagtagaatagcgctctctcgacgtcactgtgtcccggcttacaactagaggtgtcgcacacacccacttgggtgcctccccttccaaaaccaagcagaaaggcgtctagaaaattagaaggttttgccagttggtgctggcgtagaggacgtttcgaaggcgcttggagcaccccaccgttgcactggatgtagctaccccggcttgtggtcaatagagctccacctggcttttggggggtggcggggggatgggggaagagttgttttttaatccatactttatccacttttcctgtgccttctttccatcccctaatacatacaaggggaaattacctgggtggactttttagtgaacgtaaatgttcctttatgaccgtgatttaatcaatgcactgtttgctttctattctttttaaactagttattgctatggctttaaaatatcgtagactgtatagttttactgactgctgtttttcatcatacaggattttattgttctaacatttattaagcactcataatgtgctagaaactctacatattattgcgagtcattgcctctcaacactgttaaatatttaaagaaataaatactgcagaagctaccctgtgtatagtgactggttggctatgacccgaagcaaagggctagaaaaaataataattgcatctgtaaccttccattccgctgtgctgcaccccttgtgtaacattctctgacaggttattacggtagtgacatgatgtttctgataattttacttcagttaggaactgatttttttaattgaggttttagaaataaattattccaaagtaactaaagccacaccactggtaagccaaaaataaactttattaaacagttaacttatttcagctaactatagaaattctgtatttcaaatgaatattagttattctgcatatattacgtattctctatattttttatatgtaataaaaaatctgttacagttttaaccagcactccttcactaaagggataaatcatgtctcctccccagtgttgatgtaaatttctttcaaatttctgctggattaatgttgtcttcatgtactctgtgcatctacttaccacatagattgtatgactatcaaagatctgtcagaatcattctgcagttgcgccgtcacgattacgatgatgcctgcctctgtcaccctagcttctctaggcctcctctgttgctgcttctgctctctaggctaccattacctccttccttctctcttggcctgctgtgcctgtgtgcgttgcattgcattatactgttctggctgcatttcctccttgctgtgcttcgcatctgctcttaggaagatagaaagaaatatgtattaacctcctactaagttcccagcactaggctgagagtttcccataggatatcccaatcttccaaggcccccccgtctagctatctgcctgtggcacccctgacttccagagggacatgtctctctactctcccaacatgtctttgagaatgtttatagtacttaatcaggtctgtctttatca

SEQ ID NO: 1241546 - DNA, 4001 bp, Homo sapiens
tcatcacccagcatgtctagcttgtaggctctccccagcttttatcaacctgcacccacgcttcatgccacacctgggcttgggagaaaggaagagaggggcttggggagcatgcgtacccccagcctggccagcttaccttccacctctgacgagccgttcccagcagacaaggcccactgctatggacagaaaagtgcagaggtgagctgggggtaccttggagctctgcactcttgggccaagtgtgatggcaagaaggtaggggcccctctgggttccttcccacttgctgcacatgctctgccctgtctcagagcagcctgagtaccactaaaaactcactggaccctgggtaggttaggtcccacccctctctggcctcagttttcctcatttggaaaaggatgggaggctagaagcttttggagacccttggcctgctgcatcccaaagatcttccaatcctgcgggtctgccttctacccagcccccaggccaaccctgctgggccctgcacagcccgccttggctgggtgccagagcccagggggaggtgatcagctggtgggagctgaggggctggagcgggtggcgccatgagctggtgcagccggtaacgttacacctctggccagccctgcagcaggcaggcgggtggctgggctgctcggactcctcagggactgcccagcccactcctactcttgggctggggctggggactcccagggcagtgggacaacgcagtgggaaggcagttcattggctttgtcaggatttcactgcccaagctggctcccagccagactcacccggctcctgggaaaagggccctgctcacttccccaggccctgcactcaggacctccggccacccacccaggagaaaaggcacagcgagaccccttgtctcgtccccagcccacccaggagcccacggctcagtcctgagccctggtgggggcagggccagcctccccaccaacagcttcttcagctggctcctccgccacccccaccaggccaggtcagaggtcctggggacgcctggttggccatggggcctcgaccctgaccacaaggccagggacccgcctgggattagtggacagatgcttttagcaaagccaccagggctccaggggccagacaggaaacctccctccctccctccctccctgtggcttccctgcccccaccaagacagcccccaggacctgggggacagccagcctgaggtctcttcccaaacgaaagaagtccagcctggcctttaggaagtgtgtggacatccttggagttgctgctccctggagtgggtctgtgatttcagagtcccatgcttccagtgctgggatggggaggtctggggagccaggctaggtgggggtagctcttacctgggggggcacagcaggcagcgccagcccggccaggagctgcaggaagcaagggaacagcctcatgaccggcatcttctcagacgtcccgagccagggggctccgagggaaaaccaccatgctcatcccccggggagcccctggcacaggaggagaagagctgagtggggggctggacgcctccctcactgctgccccgaggccccggccggtggttcgagcatcttctggaagccttgcggagtcaggagcccgtaggtaaggctgtggctggggaacccgacggggagcggcccggcggggcggggcgccgaggggcaggcgggtcccggggatggtccgtcgggcgcccagtgccactccaggtcctcccgtagctgggcggccgtccgtcgatgcagtttcctccgcagacagcagctcccttctgagactgcagccggtccgcgcctgggtttcagggactgagccggggcggggctccgggccggccccgcccaccgcagacgaggttcccgagccgagttcccggagcgcccggtcagcccgcagcgcccggccagcccgcagcgccggagcccgcagtgcgtgcgaggggctctcggcaggtccagacgcctcgccgagcccagcccgcagctccccgggccgcgccgcgcccgcccacagggcccacagccctgcttcggctctcagggcggtcacctgggatgggggcatccaggagtccagcgtcagccgtcaaggctcatgatctaaccgcctctgcaggaagggccgtccgggatgcctgggaaggcagccatgcccacacccctagggggccaagggattcctagccaggttatatagatgaagaaaccgaggctccgagagcacccctgcctgcatatgtcgaatggacataggcattcttggaaagtgtgtgtgtgttgtgtgtgtgcgcgcatctgtgtgtccgaggaactggcagagacaaaacccaagcctacgtgactccagaactctaacccgacctaccaccctcctagccaggcacggacacagtgggcctcccacaggaaacctctcagggcacctggctggaggatcaggcctgttgcctccttgggaagcagtcttcccaggccctccctgcggggcagccccctgtggtagagagtggtctcactcaggcatctcctcctggtccctggccgaggaggaactgtacgctgcgcgggggtctgtgtgcatctgcgcgtgtgcatgggcatttgcgggtctgtgaatatccatgagcggtgcatctgagcctctgtgtggtctgagtacgtgtgactactgtacctccaaatacgcctctgtgtgggggtcaggtctctctgtatctctgtatgcttgtgtgatctgttcgtgtccgctgtgtatctgggtgtgtttggaagtgtctgaatgtgtatctttcggtgggactgtgagtctgcacgcctgcctgtctctgcgtgtgtgtgtctgtctctgtgggtgaagactgtgcctctctctctgcgtttgtgtgtgccctcccttggttctggatctttctttaccaccactcctctcactgccttctgtgtccagctcccaggctgcaggaacctggcaggactgggagtcacgagttggctgggcctggggctggtgggtggctgtgggggaggagcgaggcctgggaagtggcccctacagctcacattccagccaagagcagggaggccagggcagccccagctctcaccccagtgacctctgcgtccactgcctgcctgcctgcccacccacgaggggctgccagagatgcagcctgcctgcctggccggccctaagcctggaggttcaggaggcgggggccagtcaccagctggctaagcggggtctgcaaggaacatcctgacgagcttcaaacaagctggggttcgtggggtagacaaactgcttcctgggcccagaatcattgtggagggtcactgtgcatgtgtgtgagggtgagtaggtgtgtgtttgtgcatatatgtattgtatatgttgcccataacatctttgtatacatacacgtgtttgtgtgtgtctttagtttgggtatggatttgtgtatgtgggcacaggtgtgtattgtgcacaagtgtgtgcgcgtgtgcttaagtatcttcattgtatatgcttgtctataactgagtgtttctagcacttatgcatgggatgtgtctattgtgtatgagtttgtattttttttttttttttctgagacagagtcttgctctgtcgcctaggctggtagacagtggcgcaatctcggctcactgcaacatctgcctcatgggttcaagcgattcttgtgcctcagcctcccaagtagctgggattgcaggtgtacaccaccatgcctggctaatttttgtatttttagtagagacaggtttttgtcatgttggccagactggtcgagaactcctggtctcaagtgatccacccacctcagtctcccaaagtgctgggattacaggtgtgagccaccgcgcccagcctgtattcattaatttgttttttcatttggcatgtattgcctgagccctgct

SEQ ID NO: 1241547 - DNA, 4001 bp, Homo sapiens
accggcatgagagagacaagtacagaagggacctggcataaaagcaggcttttgtttttaaattttgcctaagatcagctatacaatggtataaaggaaaagaaagggtctcagagtcagaaagcccttggtttgaagcccagatctgccatttactgctttgagactttggataagtcattgctctttgtgagccttggtttccttcgttctagggctaaagtaaggaattcagtaaagcatctggcagtcagtgggcatttaataaatatctatttcctcctcctcacatgaccacatacataggctataagaactcaggctagtactaaaattcaactatacaataaattaaattttaggggggctatcaagtcaacttaatcatcattttaactgacttatgaacaaacttttttttttttttgagacagagtctccctctgttgcccaggctggagtgcagtggcgtgatctcggctcactgctacctccacctcccaggttcaagcgattctcccgcctgagccttccgagtggctgagactacaagcgtgcaccaccacacccagctaatgtttgaatttttcgtagagacgtggtttcaccatgttggccaggctggtctccaactccagacctcaagtgatccgcccgcctcagcttcccaaagtgctgggattacaggcgtgaggtacagtgctttgcctgaacaaacatacggtttagatagttagatagtttcctgcaattagggcagtcttaattctgcatatttctatgctaaattaccatgctctgaaacacgctttgacagcaaaaaagcgaatggatgcagtaatggaaacaatatccaagttacaaaaataaatagccctgctgtacttagctctgattagatcacttctgggataatacattcaattcaggcactacatatgaaactagaacttatcctgaaaattaggataattctttttatttgagagctgtcacaaagttactgcatttaaccctcacaatatcatgaagctggtatggcaggcatgaattctattttagagatgtagaaaattgaggctcagagaaaacaggaatgaatctggaaattgagcacagctatcacacacgtccaaaatttcataaacctttagaaagtacttgaaattggggaagggtttgggaggagggagggttaaaaaactcccttgaaaaacagagattaggaagaactataacactctatctatacacacagataaacacacacacttgtggaggcaaagacagtttgtggaagtctacgtaaagtattgttagcagtactactttgaggagcagaagggatggacgaggaagacccacttagtagttccttgaactcttggaattaaattactgcgcgcctatactacatagaacacatggcagttaaagttttaggccgtcgcgcaagaactagatgtatgctgagtgaacccacggagcagagcacagccacggaaggggaatgtactatccaggagcacacatttcactaaacgtcatttaaagagctgtccagcagcggaatatcgtccccagaacccgtgagttcccgccctcctgtcctatcactgtaggaggggccgaccagaggtccgggctcgaccaaagaccccaaagaccctcccaaagccgaaccccctccttcgagcgcggggaggggccgacttgccattacctcgcagagggtgaagagtccgtaggccgccagccacaccgtgcaggtgacagcggtgagcgaacgcagcgagagccgagggcagctgaggcagaattcccggcaggacggggagtagtagcggcgctgcagcgccaggcggccgccgcagatatccgaaaagctccgctcatcctccatgacgcccccactcggccgcccgcaccgcgcggcgctgcactgcgctcgccggccctggccgtctcgcccgctccagacccgcttccggcagccgcgtcaccacgccccgccctaagcctgcgcagcctcagttgcgcgccgagagctctgctgggggctgatggttgtgcgttcttccgggccggccttgactgtcttcgaaaaaacctcgtcggggcaatagttaagtggaaagattaaaatcgtttttagaccgggcgcgttgactcaggcctgtagtccagcactgggaggccaaggcgggaggatcgcttgagcctgggaggtcgaggttgcagtgagcggagatcatgcccctgctctctagcctgtgcgagagagcaagaccctgtctcaaaacaaacccacagtttgtttttgttttgagacggaatggcgcgacgtcggctcactgcaacctgcttcccccgggttcaagcgattctcctgcctaagcctcctgagtagctgggattacaggcgcgcgccaccacgccctgctgatttttgtatttttagtagagacaggtttcaccatgttggccaggttggtctcaaactcctgacctcaggtgattcgcccgcctcggcctcccgaagtgctgggattacaggcgtgagccaccgcacccagcccaaacccacagttttaatcatgcttttgcttggcaagccgatttctctaagccagagtgagccgcaaggagagcccacgggtattcatttcacttactcttttcctgtgccgggtagtttgaggtgcttgaggatgcagcagtgaacgatgttgatgacagtctctgccctcgggcagcttcctttctagtaggagacaatatggaaataagagagtatcgttggcaatactatgctgactggcagggatggactgaggactttacatagggcagtcaggcgaagtctctaagtaagaggacactgagttacaagggtgacgagccagacaggactgaaggagctctggaggaggaatttgccagaaagaaagaccaggaaaggcaaacccctcgaagttggaacaagcttggcttaatgaaataatcaaaaggcgagaaaggttggtgtgtggggaaaacagttggaagctggggaggcaggtaggggtcagatccaagagggtcttgtagggtctggtaaggagtttggatttcactgcctgggagttctgtctcccaaatgactgcttggaccgtggtagacaggcaagacctggctgggaattaagcaggagcgggagatgcagaagaaatggataataaaattactaaactcatgagtaatagtggcctatgagttccatttttacttctgatgtggcccaggagtggctatgtggactgtcaaaacacttgtgatgggctgggcatggtggcacatgcctgtaatctcagcactttgggaggctgaggagggcagatcacttgggtcaggagttcaagatcagcctggccaacatggtgaaaccatctctactaaaaatacaaaaaaattacctgggcatggtggagcatgcctgtaatcccagctgttcgggtggctgaggcaggagaatcacttgaacttaggagttcaagaccagcctgggcaacagagcaagactgtgtctatattcatttaaaaaaaaaaaaagatccatggcataaaggtctcaccagctttaagtctctctgatgaaaggttccgtttcttcatcttcattcagaattttatttccctttcttttttcctaaaggatttcttcaagcacttctttatttttctagttttatttctgtgccccgaatctgacaattaatacactccttttattagtccgttttcacactgctataaagaactacctgagactcggtaatttataaagaaaagaggtttattgactcacagttccacatggctggcaaggcctcaggaaacttacaataatggtggaaggcaaaggggaagccaggcatgtcttacatggcagcaggaggggagtggggaagtgccacatttttaaaccgtcagatctcgtgagagaactcactcagcatca

SEQ ID NO: 1241548 - DNA, 4001 bp, Homo sapiens
agcacgaggggcgggcgggcgtctgtgcctagccacatgccccggctttctgtgtctcccctttcagggtctcccactcagtgagtatctaggtatttgcatctcagttccctgtttcaaccacaactgaaactgcgtctgaaagggctgtttctgcttttgtcgcttggtcctcttattgctggcctataaataactgcttccctcctgggctgggctcctgtcttggccccacggcagcccctccagagagccacaggtcagagggggcagctgagcagtacccttgctggagaggctaggcgtggagagggcagagatggcggcagagtgggacccctactgctggcagagggggttgtcctctgctgcagggactcgccttatctcctcagagtggtcaccccacaaggagctgggagccaggccatctgggccctgtgggatgtgggctcccatccccactcctacccccaaagcaagcagtcaggctgccccaggtgccaccatgggggaagggtgcctcacaagtacagaggcgccctccccgggtgcagggaggggtctgtgcccagcatggtcacctggctggccagcctctgactgagacatccaccagggcaggagctggctggcccctggctgggatggggatgtctccgaggtttggggcctgggcctgggcagtgctgagtgccagtgtctgcagccaggctgggcgctgggacccagggctcggtgggtcggctgtccacccaggagcagccagctcagcctccaggcctctggggttcgtctgggctgtcctcccacgggtcagggctgagggctttgagaacctggcctgcctcagcatggggcggaaatgccaggaacaccacaggagtcgggcctggactgagtctgccctggagaccaagcgttatgggggattgggggtaggagcataaaccaagtgtggggacaggggactcaggccaagtcactgcggcccaactccccccacgctggggggtcctgcagaggtgggtgggtgccgcccccaccccagagctgaactctgggggatgctccccccaccccacagaggagacctcagggtgcccaccgtgtccccactgtccccagggattcagggcccagcatcgggcctttgctctcccccactaactctcagaagaggaaacatggaatcctgggctgtggctggtcaatgagaggaaacatggaatcctgggctgtggctgggcaacgaggtgccagggctgttcttggacagctgctccccacactccctgccctcaccagagaggacctttgctcccttaaatgctccaggcagacgggcagctcagagcacagaggcgctgcctcttgcaggccccatctcagacttggagcctgtccaagtcccctcccaggactacagaccccagagcgcctcaccacctcctcctgcaatggaacctgggaggaccgccagccaggttggctcaagctgagagacccctgcagagtagggctgtagccccctggtcccatggtagatagcgtaagaccctgcagacatcagaggtcatggctgaaggtgccagatttcctgccctgcagggcattaggcatggctgccagtcccaggctgaggtagagggcccagctgtcacctggctggagagccagggcccagcttatcccagctgcacggactggggacggagcgagtcatctacaggactagctggaggctgtgtgactctctggacctggggttgctgggaggctgaggccatagggaggcagacagcagccctttccccatgcctggcttttctcagctgccctggcctcattggcacatacctctgggggtcctgccttggtgtctatcctgattccagccgcagactgcaggccctcagctcacggggcaggctcggtgctgcctgtgctccacaccaacctcctcttctctgcagctcacctcctcctctctgcagctggctccttccccttccagctacttcctctttgtcctgagaggccccctctcatctgagacagaaacagacggctggagctgggtgggcgggctagagggtagggctgagaaccttcacctccaggaaaaatctacaccccactccctcgaggtagaggccctccagttgcgggcctacgaatcggagtcaagttcagctgcaggccacagacacctaaggaacagtggcttcagcaaggttgttcattactctcgaacactaagcaggtccaggggctggcaggctagagacggccttgctagagatgatggcattgctccactgccattgggagccaggctctcagatcccagtccctaggatccctgccttcatggcctcacagtggctgctggaactcagccattgcctctgtgttcttagcagagaataagggacatcccagaggagacttcctggaagtcccacagggcacttccacttatctgtgatctggaacttgatctagaacttagtcacatggctacacttagctgcaagggaggctgagcaatggaggtaactagggtctttatcttggagaacgaagctggggctgctcactggcatatctgaaaaggtgggcctggctagaagctcctagcaaggggctctgcctcccactgccccaccccccgactggggtccctgagtaaggtctgggaccttgagaacactcctactttcaatgaggtctgggtgtccaccctggctcctccttgtaaggcctatgtagggcaggggtccagggtgatggcctcagggtgcctgcaggacaccagtcaggagggtgcagttcccaagggtggggcctgtcagctgcacccctggggccagtctgggtgggccaggaagtgaatggggaagagatccatcctctccctagcccctcccagatctctcttcaccttcctgatgctctgatttggccttgggttcagcccttacctcccggccatggttggggagccccagccctctggctgggttgctggatgcctgaatgcagctgggccccaggcatgcccccgagggttgggtcctccagggactctgggtgagggttactctgggtatggggaggggcagccaggtgggtcctgctgtgacatttgcagggctggggcatgagtatgaagggaggctgccttccctgcactcaagcaaaaggcagttagacagaacaggttctcttctgtctttttttttttctttttcctttgagagaagtctcgctcttgtaccccaggtttgagtgcaacggctttatctcggctcactgcaacttctgcctcccgagttcatacgattctcctgcctctgtctcccaagtagctgggattaaggcacgtgccaccacgcccggctaatttttgtattttttattagagacggggtttcaccatgttggccaggctggtctcgaactcctgaactcagatgatccacccgcctcggcctcccaaagtgctgggattacaggcgtgaaccacagcgcccagtctcttctgtctggacaacaatggtgtgtgagggcctggaaggccaggggcaagtggaggaccccagggctccttggagcactctcagaagtccttgcaggagggccagccccagccagtcccctctccgatttccccacattgtgaggggcctcaatgagcccacatgctacacccagcccgtgggtctgagctcattgcagccccagaaaagcaccacgtcacctcccctggctgcccctcaggccagcaggactgggtacagctcaggcagctctacctcgggaggatggatccaggcttggggatgtttaagcaaggaatcctgggccttgggctcagggttcggtggactgtcctcttggcctctcaggctgcttaccctggaagaaagattgaggctggaaggggcgtctagattcgggacccagggcaggcctctcagtggctccgaggctgg

SEQ ID NO: 1241549 - DNA, 4001 bp, Homo sapiens
ggattccctaaccaggccacccagaagagaagtcccatcctcctggtgatatcctgggagctctgtggctctgcccttagccctcctctgactctcagcatggtgggggtgatagggaatgatggaaggtaacccccaggaacaggagaaggcctccaaaactcccaaagctctatcagaaggatctgtctccatgttaacttcatccctccacaggctctaccagggcccagctatatcaacagtgccaacaaaaagccccgtgcccagctctcactctccctcccacctcccaagccgcagttaaatgtgagattaggagctccccatgtgtagtctgaggtgcagccacctccacatgctgcgagaaaccggcctatcagttcagccacagtggcaagtgggcgtggcgctttgtactgctctatccagtctgacccttgatctggcatcagcttctaccctccttgcttactgtttacagcaaacagccaccgctctcctgtaccaaataacgtgcaacatcatgtggacacattttgtggggaaaatgaaagtgatgtgagactttagggctgatccagccaccccgggaggcaatgaaaggaagggcccctcatccctcttcattcccctcccaaagctgaaaactcagtagaagaaccagaaagctcagccctggatttatatgtctctttgctatgccatcatagcagtataaatggttagtgttaatgtcattgttcaaattacgctctgtgtggtggctcacgcctgttatcccagcaccttgggaggctaaggtgggcagatgacttaaacccgggagttcaagacctgcctgggaaacatggcgaaaccctgtctccacaaaaaaatacaaaaattagctgggcatagtagtggatacctgtagtcccagctactagggaagctgaggtgagaggaccacctgagcctgggaagtcgaggctgtggtgagccaggattgtgccactgcactccagcctgggtgaccctgtctcaaaaaaaaaaaaaaaaaaaaaaggtcaaatcaggaaaaaattttgaaataacaaacttccttttgcagctgctcttttgttcatcttctaccataatcccaggcactgagtttttgtttgcactcgtttgccctgggccacctggggtggtggggaaggactgaggaggggaggtcagaacatgcagttcctgtcccagctattactggctctggagctctgggcaagctacttcatctttctggtcctcagtttccccgtctgtaatagagtgatgtcagtacccaccgtgtatggcactggggaggcagtaaaggtttgggtcaacctgagtgggtctgatcccgatcctggctccaccacccactgccttcaccgccccgagcaagttccctaactcctctgggcttcgttttcccccttgatgaaagcagggctgctgggaggatgacatgagacaatatccagggctggccaacagtaagtgcttaagacacatagtagcattcctccttcacaggttgtaaattacagagcacgcctatattatcttagtaaatattatttaaatatcataccattcataatattttaacaagttttaattaagacacacgcttcagtacccctgccccgactccatactgcgctaaccaagtgggattctcctccttgcctgtgcgctgagccaccgcttaccccgcgtcccctcggacatgcagctctgcccatcagggccacaggcggcccggtcccaccatgggggttggggatgggaaccagagcatgcccgttccggggcgcgcgtctggccccgctctagggagccgcgtcggcggggccccacccgggcaatgtcccgaagctcgacgcgcactcaccctcttgaccaggaagccctccttgagcacgccgtcctccatgtcgccgcccgcacgccagggccaccccaggtgcgccttccccgcgcctcgcgctcctcggcacccgcgcagcccgcgcagtccgcgcccacggcgcccaggaagcagctccgacgcggcagggcgacgcctccctggcgcgtgtccagagcctgaggccccggggcaggaagtcagaccaagtcgggatttctgacgtgacgtttccacccaaaggtgctccagggtcggtggttggtcctccaggtacagagcggccaaccccgccccatccaggtgcgccccgcgcccctcactgttccagtctctctgctcagcgtccttcgccaggtgcttcccgggcacttagcgcattgccctcgaggaacgcttatcgaattgaacataaccgacaggactccaggatttggagccattcctgagctcattgcaagtaggagatgggacagtgggtgagccgaaactggtatgggaattttatcctggcctctgatgggggcagagaagacctctcagtaacaggaaggtcacagttttaaggcggcaggcacagtttgcagggccccctgtccgcaggatataccccgctccctcaaaaaagatgaagccgaaaattccatcattaaggacaaaatttaagggggcaccaaggagtccagtaacctagacaaattatatatagagagagatgattggttttttggggttttttgtttgttttttgagacagggtctttctctgtcacccaggctggagtgcagtggtgtgatcatagctcactgcagccttaaactctgggcttaagatcctcctgcctcagctccccaagtagctaggactacaggagtgcaccaccatgcctggctggtttatttttatttttcgtagagatagggtgttgctatgttgcccaggctggtcttgattcctggcctcaagcaatcctccggcctgggcttcccaaagtgctgggattacaggcaagagccaccgtgtaagacctagaaaaataatattttaatgcattttttaaaatcaaaattaatgtcaaaaaatccacgatgaacaaaatgctaacattttaaatagataggatcaacaacaatgttctatcaggccatattggagcctggaacagaaggaaactcagtcaaatagtactgattctgtctaacaatccttagaacacagtcacacatttttttaaaatttatttttatttatagagacagggtctcactatattgtccagactggtctcgaactcctgggctcaagcagtcctcctgcctcagcctcccaaagtgctgggattgtgggcatgagtcatggggccggtccatattatttgtgctccagtttgaagggccctgtcaggactcttcaccaggcatgggaaaggccctcagatgcctgtaagggaagagaaggctctagagaggaagaaggtgaaccagcttgtggaaggcggggggtgcctttcagaaccagactgaagccagctcccaggccagtccctgccctggagctcttgacacagtgttgcttctacatgtctgtagtagacatattacatccccccaaccccactcccacctgccagccccaaggaaaactcgcagggtctgggtcactgcgtgccagcccaatggcccactctagccttctgcactaactggccttcagacttcccaggaagccccaaagcagtggggcttccattccaattcagaatgaacatcagctggtcaccttctgaagccaggcctgtagtagtaggtgctaggttttatctaaagtacaacaaccccatgaggtgtttattatgtcattttccagtcaaggaaactgaatccaagtagttaaataacttgcccaaggttatgcagctccagggcattgcaaatactcttgcctcctaaggaattgtcccagctctgaaacctagctgggctgaaagccaggacttgagaggttgagctgggaagttctcatcctcttcggctctaactgtggtctatccatctccttcctcaaagaggctgtcttggc

SEQ ID NO: 1241550 - DNA, 4001 bp, Homo sapiens
caggggacataccctgggggtcacaagcacctagcattttctagggatgctgtcaggtgaaaatgtctggcaagagaagtcttggttgacaggacccagaacagcagccagacccaatagaaaagaaagattaactatctggagctgctgaggcagaagaaagatgggtggtggggggagatattctgctaattgtgcttgaatctacacacagcctttccaccccagctctcctggccctgggggctgtagctcacatagcacaatactggaagctccccaaatacactccatgttgctccaagccttcatttagggggtcagagataagctgaactttggaggaactcaagaagcctgtatcccattaaatcccagagagaaacctgtcagaagcaacaaaacaacatgaaaccagagatataaaatgtgagctactgtccacagctccatttgttctgcggtcttatagaaacattaaattattcatcagaacagaacatcagcacccaccactaccacatccacatgatctgtggtcctgggaacattggaggccccctctgctcaggggcagactcatagagtgtgggatggggaaggggcatctggatacccctggtttcctggaagggtcacacctccgcggaagggctggacagggtctgcattctccaggccataccagtagtgaatctcagaactgaaattgactggagagtggaaactgtccagaaaatggcccacagcacctgcagccagttgggagcttcctgcaagtccagggctgtgaactccctcttccctcaatacctcccaggctaatttgtaagtggagagtggctaccgatgtccgcggagtcgcgtctgagttggggaccaggcagctggggctgaaggatggttgggactaccctgtctctctccaccacccctttcagaggatcaatccttggcagaaccaatctatcccctccttcactccagctgcctccctcctttccagctcctccgtctgaagcactagaatctctcttccctgtgctcacttttaaaaaaattatttcaagggacagttggaggggttgccaaggtcacttccccatggacaagcacccttcctggcccttcctccctccttagcctgagcctttcagaagggccaggtccctctccgtcttaagggtgggtggttggcgggagggagacactcaggcccggtcctcgcggcctgggtcaggggttgtgaagacgatggaattgacagtgggggtcccggggttgggggcatctttggctagagatggagtttctgcctcccctcagtctggcctgatctgacctagctgggatcccaccccgaccacggtctcttctgcccacacccaacattcccactcgagggtcaggttcattccatagagaatttgccaccgccccagggcaggggccccatctccattctcccggcccagactatggtccacattttcctgcgggagccagtgtagagtgaaaaggggtgacgccaaggtcacacaggaaagcagaggcacgacggcgactggagggggtgggaggggtaacgacgcccaggctctctccccggcggtctccttggggcgcgggggcgcactcaccgccgggaccacttggccgacggcctgccgaaaggcctcttccacagcacgccgtagagctgcactttggtgctgatatccagggcgtccgagtcagcctgctccagggacggcgagggcgacaccgagttggacttggacgtgaacatcctgcctcagcggggctgtgcccggcccggaccccacctccccggggtcagcagggactcggggcgagaggcgagggcggagccgtcggagagcgtcccagcgagcagagaagcagagcggcccggcccggagctgcagcatcaaagcgcgctgggcactggacgcggcaccaagggggcgcagggcgcgtagccggcggcttgggctccggattgcagagggccgggcgggaactccgcggggagggtggctcagcctcgggccggcagcatctcctcccctcccgccctagccacccacccccccggcgacagccccaattctggtggccccgattggctgggagtggcaggtgagccggcgggaggccggcctcgggcgccaatcagggcgggcgccggctggagggccgggctccgtgcgtccagaaggtccctgcgggtcgcagggcccggggacttggccgcagcgcgtccccgtccccgccccgcgcgcccaacaccaccccggggtccctctcggcgagcagcgccgacatcgagacgagggccacgtccgctttgcaatggggttggaggcactcctgcagacacctgctcgcctcggggtggaggagaggacggagctagggcgtagggtcacacactccggcctggaattccaccgcaattcctaccgctccgtgaactgcggcggtctggcttttctccccagtgaagtggcgatgcctgatgccccgggcaggcgggtggccaggtaggacttcaggaagtgcccaaagtgcccgcatggggaggggctccatcaagattgggttccccccaacccttccccctcaggtgggtttcactgtgctccgccgccgccgcctagcgcgcatcggatcggatttctcttcctggaacctgaccgtgtctgtgtcggcatttggcactcaacgccagtctggagctatccgtgcagtgtgtgtccgtgatttatctgcgcgcctggcccgcgctccctgggaccagctgttccatccgcttccgctcctttcggagttggcgtttggggtgaccggctcattttcaggccagggagatgccggccgggccccaggggaccgcctcctcccggcaggtggaaatgctaggctggcacagctgcctgccccgcgccacctgccaggcgtggagaccgcgcagtgagcggccgcccgccagaccacgccgcagtcgcgcttttccaagatgaggagccaaggacgcctctggaagtcggattgcaacagaagtttacaaatggttagcccgagagccagatccacattgctttatgaatttgccccaagtttttaaattgaggtatacttcatggtaaaatgcacacatctaagttatttctttgatgaaggtatataagatgtaaccccacccaaagcaacagacagaacatttccatcacctgcagaaagtttcttcatgcccctttatagtcaatcagccccccaacaacaaccacttgtatcattcttaccacctctgcacagtagacttaagtctttgaatgtaatgcctaaaggcgcatccccacaggccccatcatcccctattgtctgacctgcctggcccctctgcaggcatttggatgtgtgacgcccactagatgttccccaaggccatgctagatctccccattttatgactctagctaatcatcaccctggtactcttcccttaaccccctctggggttcccaagctcagacagcatccccttgttgctcactgtcaagaagtgcccatctgaattccttgcacttctctcatggctcaggcccccatgcagaacatctcaggccaagccttaacacagggcccggggcttggctccatcaggtgggaggaggtgggactgggaagatgatgagagcccggggccagagtacaaagtggacattttctgtatattttttgtctatttctgacacatggtctaatgcttggaaatcttcccactttaggagccctgcttttcttttctttcttttttctttctttctttttttctttctttctttttttttttttagagagatgggggtctcattatgttgcccaggctggtcttgaattcctggccacaagtgatcttcccacctcagcctcccaaaatgctgggattacaggtgtcctgcttttctaagatgaaagctagaaaacttgtgtta

SEQ ID NO: 1241551 - DNA, 4001 bp, Homo sapiens
atgaggaagagcaggcaagtaatcccactttatttatgtggaaactgagtcagaaaagataagtgaattggccagatcatgttggagaaaacacagatcagacaatgaggacatctgacctctggtttctacttggccaatagggtctaaggctgaaatcacctcacccctctgggctctgctgccttcacgagtaaatgaagtaggctaatccaaggggccccccagcccaagtgactcgcactcttcaactctaccaatcttccatgctatgcagaagagccaggtctaaaactcaggcataaacccgtgctggactatcaggccagtgctctttccacttcccctgccatgccacttctaataaaaggcagtagaaaagcccccaaagcagctcttcaacaaatcactccctcagcagctaggacttggcctctgggtacctcttcccccaacttcctgccccatccccagggcaagttacccagggagctaatgggttgtcctatcttccaggaagggagtggaggacagcaggtgtcgaaaggagaagtgaggccattgcatccagggggccagcccggaaccacaggggagagatgtataacagagagataaatgtacacttttggttctcactccctagtttcctcctggggaacagctggggtttaatcactcaggatcccatccttgtccaacaaaggatggcccggaaaaccacactgctgaaggcgaggtggccgatgtgctcaacggggaggccctcccccgctccggactgtcattgccctccctgcttattatttcttgagcaagggccatgtgactgggctgcgtgcagaggcacggctggggagactctgggaacccccactccagggttccccgtaaggtgaacgcagtgtgggtctcctgctggggcccccagagcaggggacaggcacctacatatgccaacagattagcgagtgacctcgaggatcaaactctttcgcggcctctaacaacaccctccccaaaagccacacctctccagcctccaaccattccattctcccctccgttcttccttttgtgttccaaaggcgccccgaagagtcaaagtagctatttaacgccttaaaaatttaagcttgcacgccttatactggctttccaaaccaaagggctgggtgtaggggtgcgaagaaccaaaccgacttcaggagtggacgaggtcgaggcagctggtggccgggctttccgctccccgcttctggcccccactctcctccctgccggacaggtagccgagattcccaacagcgagcaccgtgcggcgccaacccggaacaggctgcaggcgcctccggggctggcaggagccgaggctcgggtcctcgcgcagaagggtccacccgccaggcccacagctccagccaaacaccagccctcgggcgcgcgcggcctcgcgggcttcctggatttcaaactgagcctctctggagccgcccggcgcatttgccccttttgtttccggagtggagggaaaaaaagacagaaaaagtctccccatacgaccctcctgcgctcgcgcactctgcggcagggtggcccgggaagcagccaacacagttccaggccctcctcggtcgccccggtcctcaccccgcagggggctggcacgggggccgcgaagggactggggccccagcgtgactgccggcaccgccgctcagcctaatgcagggagataagaggggagagaggagaatcaggggacactcaccgagcggtagctgccccgcgggctcgggacgcgcacggcgtgcggggctgcccaggtgctgccgcgacgcgggcgcgagtttgaaagtcgctctctgaaggggctgaggccgccgaccgctcccgcccaccgccagcccctcagctggcccggactcggccagctgcaagcgcggcccccggagaccccaggcagcgcgcggcttgccagcgcccggcaggaagtcgagcggagccggagctgcagcgggagggcaggagggagcgagggagcgagggagcgagggagcgagggagcgagggagcgagggagcgagggaggggcgggccaggaatttttcctgtgggtggagactccagctcgcggctgcagtccagcaattggcggctctgcgggggccggggcaaccttcgcggcgcggcgagccagagccggggtaaggctgcggcggcggcgaggcctgggcgcggttaacgattaacgcccgcagggtgatgagcgcgcacccccgggcagcctagatgctctaggataccaagacgcacgtggtggggtcaccctggtgtcacagacctgctatcaccgcctcccgagacagcatggactgccagaacgtaccccttgtatggacagggaacaccgggccctgcgaagggggctgagggctttcccaagtgagtgaccagccgggatcgatctggggatcctaatcctaccagagccggccgtgtccgcttttccaagtcagaaaggcatgtcttgaattcctcaccataactcggtccctgtgacgctttacagtggtaaatgcagacctctgagaagctgacgggaaagagataaaggagacaacgtgaaggcaactccacaaggaactgttaaataggaaaaataaaacacagaaacctggatgatagaggacccgtttttataaaacaaagagaaccgtttgtctttatgtctctgtatatgaccgtgtatgcatggaaaggtacacacctggaaactggggggcaaggggtgaggatgggggacagagacattcaatacattttgagcaagagcataaatccaaaaacccataataattcatcagtaaagatcctgaagaacaacaagcccggaggagggaagcccagagtggggctccggaagaggaacaacgcccactggttaggcgctatcactagttccttgggaggaggaataggacgctgatattagaaccacggggtatatttgttatccaggtgtacagcaaacgatttctagaggtatcatttaaaacaaaacaagcgcccgccccaaaatgctgctctgggcaaatgcaagctccaggtgatctactgggaggggagaggcggggcaggcgcggaaggaaatggctttcaggtgactttgaaactggatcctggcggagggtggggtgaaggcagcgtcccggctcctgcctgcggaggaagcggtaggcgctcggtctggcaggcccagaaagcggggcccacattccttagggagggagggtgtgttggaggcttgcagagccccagactcgcggaccgtgaaggtgagagcagagattgcagaagaggggctcggaaatagatcaacttagttggggctccgctagaccccgccggccaggggagaagtgacaagtcccccttctggccttccaggacttgtggtcaccccttccaacctcaggctttcacctttttttgtttatgctttcttatctgatcacctgaatcttacgaatgccttccggtccgcttcaaattccagcttccaaagaagccccctgacttagccacttgtgagcgacccttcactccttagccaggacacgttacagtgttagtggcagtcataactgtcctttagtgaatgcttaccatgcagagggcctgtgctacactcttaacaaactgtgtccctggatcctcacagccaccttgcgaggtaggagatatcctaatccccatcttgcagacagaacactgaggcttaggggcaaggagcaacttggcaaagattacacaaccagcaaaagcagtgtcgggcaagtgcctagatgggtgtgtgcttactatgagtgtgcttactatgtattagccattcttctaagtactttacaaaaacaattgcagtaacagaaaaggaaactgaggcaaagtcacacagctagtgggtggtagacctggaagtcataacagggaattctgcc

SEQ ID NO: 1241552 - DNA, 4001 bp, Homo sapiens
acaaaagggtatatagtgcaaagtaaggcttcttcccatgcctgtacttcagccatagttctccccagcggcaaccactgttacaggtttctgtgtgttctctcagagatattcagagcatctacaggcattcatatgtatgtggcattcacacacccacccaaaaatcgtggcccaccatacacactgtactcaacaatataacttagagatattcctacatcaaagtatatatctgccacattttctctgcacgctttataacagctttaatgtatcctatcgtgtggcttttacatgatcttattgaagggttccttattgatggacatctagattgtttccaaccttttgctaaacaatgctgcaatgaatattcaatgatgtacaccatttcatatacatcagagtatatctgaaggataaagtcccagaaaatggaatttaggggtaaatgatgtacactttaaattgccagacatttctttggatttttttttttctatcaggaatgggaggaacatgctctcccctacagctggtgacttctgaagagggcagaagaggctccacattttttcagcttagttgttagtttcaatgagtttggggccacaggctgcaccccacaattgcccaactctgagcaggccccctcagcagtctatgggaaggtggtagaagtggactgaaccatacgttaggaatttaggaggcttgggtttcagttatggctcttccactttttagctatgtgaccatgggcatatcacaacaattttttttttaacagacaggatcatcagcctcccaagttagctgggactacaggcccacaccaccacacccagctaatttttaaatttttatttatttgtagacacagggtctccctatgttgcccaggctggtcttgaactcctggcatcaagctctcctcctgccttggcttcccaaagtgctgggattacaggcataagccactgcaactggcctaaatcacaacttttcagagtcccagcttcctcctttggaaaaatggggccaataatatgcagaaacactaataccgatgttctataaagcgttcagtgatggtactagccctatacacagtgtctgtcacatagaagacagtccaaacagtttgatgaaggaactgataattctcccactgaattttttaaatggtctttcaagtgttttacctgaaccaaggctctgtcttggaagagttttatgaggtggattcatagtaaaagctatggaggagatatcctggcaagcagaaatcccacaaggagaggagtttccttccagatgaggctcttcaccgcctctgccacccccactaaggcccctggttcctggtgaccgagtcctcgctaagactcctaggacacaatgctctgtgtcattcggcgcccaacctgttttcttttctgcttgaatgacctgctcctaggagtcgagcctgagccatagggtcccaaagacaacactcagaaatcacagaagaaataacctgaggtgagatggggaggggtgcgggaaggggtgaaagggagcgagcaccgatagcaaggtggcagcctgcacgtccgctccgagggcccttcccaggagcggctggatctgaccgatccccaagtccaggtactcccgggggaggctcctcctggcctcgcggcgcgagtcccctggggcgcccggcttcccaagccagacccgcgctccagcgctccccgccgctgggagctcgcttccaggtagggaggcacctgctccggatcgtcctctgggcccgaggggccgtcccccgcgcgcagcctgacgccctccgccgcggcgcagccccagcccaccacagcggcgggagcgcgggtcgctcacctccagcgagctcgcggccgtccccgccgcgcactgggcacacgggcgccctcgggccgccgccgcagccgaccttgcgtcgctctcgccggagtcccgggctgccgccggttctcccctccccggcagcaggggtcgtgggctgcggggcggggcgaggctggagcgggaggggtgcccgcgggctcgctgcacaaagcccggccgagccttgctgcgccccattcaacgctccgccgggcgccctcctcccctcggctccccgcccgctccttaaaggcagagcgctgggctcagctctccaggcagctcgcggagaggcacaggaaatgacctcagcaggctccagcctcccacttctccgcaccgctgggctcgtccctggggcggcagggagggcggcggggtgtcccgggcgccggcccggagctctccgaggaggccgcaccagctgccgcaaggggtggccagagcgccccggggatctgcttgaccccaaatagcgggggaccctcgcgggctgcgggacaagaccagaccgtctccgccaaaggttccagcattctcctggccacctgtgggaactgtaacgtctggatatttggaacagaagtccatatttcagtctggcagaccaaatgttctgagttgcaatttgcaggagaaaaagaaaaaataagttacgacagcccagagagtaacttacttgcttattttctggtctcgctatgttgcccaggctggactcgaactccggagctcaagtgatcttcccgcctgggcctccaggccggcttatgtatatgttattttaaaggagggcccaggaggaccctggctgccaggcagtttgcagggcagtcatcagcgtgcccatgtgctcctcgttctcagacatttgcagatctcagatcgcccaaagcaatctcatacccagaggggttggaaaactcaacatttggctaggtgagcctggagtaaagaagatgcaaatagagaccattgcagggagggatccacacttcaaaacagagccttcttcctcaaccctgcaggctctctgtcagtgaaggactgaacagaagcaaaataccatcagcgcctgtttctccaaatggtccttggaagactcatcccaggcaccatgaagaacacccccaccctgggtttgaatctgaatctctaactaaagtaccccaggccattctcacgtagaagttttgagagcccagacactaaggaaagctggtagtgcaggaggccaaacgtgagaatttaactgggccaatgggacttcaatggctgaacttgcaaacagctttatagctcgtggggattgggatagattagccccattttgtgggacaatgctcaggctatccacttcaacattccagaagttgcataaggaagcccaaaaacacgttctctggattttgctaagaagacattaattcattcattcactttttttttttttttttttttggacataggttcttcttgttctgttctccaggctggattgcagtggcacaatcatagctcactgtaacttgaactcctgggctcaagcaatcctcccatctcagcctcatgaacagctgggactataggcacatgctactatacccagcaaaaaaaaaaaaaaaaatttttttttttttttagtagaggtggggtctcaaactcctggactcaagaaatcctcctgcctcggcctcccaaagtgctgggattacagggatgagccaccgcacctcggcccagaactcatttaatataactttgttatatagtgaaaagagacgcaccatggagagtggaatgggaggagcatgctctcccctatagctggttacttctgtagagggcagaagagactccacatttttttcagctcagttgttactttcaatgagtttggggccatagagtgcatctcaccattgcccaactctgagcaggaccccttggcagtctgtgggagggtggtagaggtggactgaaccctacattaggaatttaggaggcttgagtttcagttatgtctcttccactttttagctatgtgacttgggcaagttacaacttttgttgttgttgtt

SEQ ID NO: 1241553 - DNA, 4001 bp, Homo sapiens
aatactcaggcctgactaaccttcccctccaaaaaacaacaaaacagaacaaggctaagcctttactactcagagacacatctgtaagaccccacagggacaagaaaagtagctgtgatctaggtctgcactaaagctgcctttcctggcactcagaagtgcccttccaggcctaactgcagaagggtggcctcagcctcctcctcctcctccttggcttcctcctcacggatctgcaccagcaactgaaagaggtttggggctggcccttccccagccccggtaagccacagctgccttcggatggccccgctgtggttggccccggcaatgacctgctctaggcgggcctggttcacattatctttatcaatggcccccttctctaccaccttctgtagcagaggctccagacgaatgacataagcagacaatttttctcccgggttctgataagtgttcagaaatttgatctgggcatccctagagctctcaacgctcccaaacacctgctcaagcgccttcaggcattcggcagtggttatcgcggggttgttggacttaaggatgcgaataacatcagcggcggggcctctaagactctccatcaaccgccgcctcttttctacatcggacacctgccactcctctaggacctcattagtgtgctccagccagggatcaaaggtttcctctccaggccctgggatgtccctccccgagaaaagtgtcagcctcttgtaccatatggactcaacaagaggctgaataacattatccaaaatatagtttagcatctctgctggcatctctgggcccggggtcggagtagggttctgaaacccaaggacacgggcaacatcttgcacggtccacccctctctagctaggaagaggtgcaatctttctaaaaattcagcatcagaagttgggggcttaaataacactttccagacccctcctttgcccggcatctccctggggatcgcggcgtaatctacagcgccagtgagctctaataaggctgctttcgcattttcttccctccagaacattctcccaagcattcggtaggagacctggggcatcgcagcctggagggtctcttcgatttcagcctcatcacagttcactgggatgccccagactaacagagctctctgggagttcacatccatcccccggcaccagtcttccaacagtgtcatcgccattttctcaactatcaagacgccaaattctaccaacagactgtggctcaccgtgctcctggccttagaacaataccagacactcccaccaagtaggcccgagggaggcgaccttcatgcagtcacgattaacaaagacagagtcctgatctcgcccttctctgcccccacagtcagtccgtaggtgcactcggagccgagctcggggacgctgaggcagtcacgcggccgtcgccatcttgcgtctgggtctgggtccggtcgggtccgccgcctgcagcaggggcgtcgcgtcgtcgtgcagcgggcgaggagcgacggcgggcggcgaaggcaggcgcgctgggccgagagccgccggggtgtggtcgcggggcgtggccgccgggcgctcgctgcggctcctggagaggatcgggcgttcgcggtcgcagcctggtcttcccgcgggcgaggagcggccgtttgggagactagccagagggagaaactgtgccgaagtcgcggcggctgcgggccagcggaaagcggcttcttggcgggcgcggggactcctctgggcgggcggcgaggacggccgaggaccagaaacgaaggcagcagaggagcaggaaagtcggagaagcgaggctggagacagcagaggcgagggtgggaaggggcggccgcggcggcccgcagcggttcaggcgctgcgcggctgctctggcgtccagtcctacccgcaacccgccgcgacgttactgctgcagtggaggatggggccagccggcgagcggcgtccgccccgccccgccccgtcccgcccccgcggcggagctgctcgggcgtctccatggcaacggtgtcccagccggcgcgaggcacgcctgctccggcggctcgcgggggtcgagcggttgccgtggagccagcgaggggctcgggcatttgtttctctgatggcgcatttcctttttcataatttagcattttaacagtaaacaactactactaagcaccgtgttttaaaaataataacccaatcctggagtggatttaagatgatattgttggaaatgcatccctcatggtggacttgtctactcgggttgctcagccagtccaccctgcacgtgaaaatactctcctcagaaccctggcttcccgttgcccctgaccacactgtgcaccctgcatatttcatcccaatgaagccaaaatgtcggagtgcgccatttctgtgtatttgtgtgagacactgagtttagactttttcttgtctaaaattttgtaaaaatctgtctgtgtctactgagtcatcttttagccaggcaaacattagtgtattattttccttttcctggctggcatcattgacaataggctgctaaaagagaatccttatggttcaaaaatgtcgagtaatctccctgcaagcaagacaaggcgcacttacatcaaccccagatggtgaaaatcccaagagaacaaagcattcaactctgaatttttaaaaccttatttaataaaaggtttaaagatacagaagaacattcaaaagtaaataagttacataggtacattacaatcacatcagcaagattctttagtgtattaatttttttcttataaaaagcacacaaaaaataaaatcttcagtctctatcacaactgtacagcaaaagaggtaatatttatatatgtacactattttaatatgtaacagtctttttaaaaaaggatgccacaggcagcaaacacacaaaaggcagtgtctgatcatttttgtttcaaaataaaaggaatatacttatttatatgctattaaaatatctgtacaataattacagactgtcaaggctgttcctgtgctctgtcccctccaacaaagccttcaacttagagacaaatgaggaaaaagtgaaacagctgcaaattgttagaagcaaatattaacatagcaaaatgtggggaggacacaattgttttataaaaatatccctacttcctgtaaacctatggagttaggcttgccagtctgataataaataccgtcccagaaaagcgagccccagtgaaaacaactaaacaggctgaggcttgagtatgtgttgtattcctccttcatcttaacatctggcacatgagaagaaagaggttaggtcactgaggcagttaaatataggtgatccctttagacataagcagcagaagaccttggtgccaggggtggaggcgcggcagaaggggtggtatgtaccttagctgtgaggggggctgctgaaggcatggaggacagtaatgacggctgtgcctccttggatggtggagacctcagaaatggtctgcaacacaggcactaggtcagtttcccgcccttagctgaatgcagatggatgctgggagatggatatggtgagatggtgtggggaggatgttagaaagctggaggtgtttatcacttctcaaggagctctgaatatagggggaaaaaaacaacaaaaagacaagcccagggagaaagcaccattaaggatatacctatgccagcttctatagctgcacctgctttattggcaggtcacttgccacaattgcatctgccctctaaactttttaattttcacactgtatcctagacatgaatgcataaaatacagtgtctggcgggataatgcagagaggtaccatcttgattttccccagttacattcacctggtctggtctctgtaagcttagaagagtagaatcactttattttttaaagacttccggccaggcacggtggttcacgcctgtaatgccag

SEQ ID NO: 1241554 - DNA, 4001 bp, Homo sapiens
ccaactcctgggctcaagtgatctgctggtcttggcttcccaaagtgctgggattacagggatgagccactgtgcctggccaaaaattaatttaaatgaccactgaggtatttatgtaactgcacaccaagggcaaatgccctctcttctaggactcgtttccagaagctttgttctatcaagtctccatcccattttattctttcctccagcagagaaaggatactacaatgtgtgaactaacgcccaaaccaattttgctctcctgtattttctaagtatttcaaactggttaagtttttcaagtacaagtcagaaaaaatggtactaattgacaatttttccaattttactcttcacatgacctttatttggataaaatttaggttatcatgagtgcagaactgcgttttgagggaactgatagtcaactgttcagtcaaataccaacagaacttggggggggcagggagtggcataccactcaattttaatattgctgaaacagaattattgttaataaacatttatatttgtgtggtacctcagaaactaaagaagccttcaggaatctttttttaaacctacctactgactgccccttcaaggtctctctgtttggctgggggtcctcctccactatctgagaatccacgcctgaaatttaaaatgttcaacataaaacacttgaaatacaagataaatggtatttccatttgacaagagaatatggttaaactttcaaaaatctttccaactaaagtagccttaaacgggcattcattccaaaatgcttttatagtgttactttataagaattaagttcactcaaaattggtaaacttaatatattcttcaacctccagtttttcaggataactatatttatacagaaatctagtctattacaacattaaacaaaacaaagacgacaaacactgggttattgattttatcacaggttttgttcaaaccaacatatttagtaaagtaccagtagtttcagcatgagtaaagtccaaaggaaatcttacctcagtaataaactaccacgtcctctacctccaccaggaccagaaagggccagcaatctggcttggatgggcctgtaaaagatttacaaatcagtgcaaaatcatatgtagacacacacagtcgcacccaaatactttcagagatgtggatcataaggagaaaaaatcacaaaagttccaaaaagatagtttcaaataaatctaaatgtctgaaacaggacaggaagtactatttcatttaacttcctcgtttctccaggacctgtgtcacagaaattatattcacctcgatgcccccacacattaacaagcctggatcaggtccccatcccgccatccccgaggaggctgcacgtggacaggaagctggggtaaggcggcttgttgcgtcccggcagggtctcggggccagcaacgggccgggtgtccgccggagcgggaaggggctttgtgctgcagttccgggcctgcagggccgagagcgggaatcagcagtccgggtcttctcacaggccaagaaagcatgccggcgcacccaggcctcgctctccttcctcagggacctgagaccagcgctctacggaggggacctggggcctctccacctcggcgacaacagggttttacccgccgccccgcgaacaggcctcgaggttccagtcttcttaaggctggccgccctccccgcccccaattcaccccgacctgagggctgcctctccgagctccgagttccgagttcccgttaggcccttacctcacgtcattcggatcccgcccggtgagcttgcgaatgttctcatccacgttcttaagactctctttggccttttccagctgttcctgcaaagttctcacggcgaccgccatcttctccctgcggcaggcttgagactgctttacaggccgagccgggctatgccgcgccgccgaggcgcgaaaggactgacagccgggctcagccaatgacgatgagcgttgtcttccggcctcaaccactcagcgaccggaagggggaagaacctgcagcctttgtgactctgagccaatgaaaagtcagccaggcagtcatctccctccccagttagctgcgggtgcctggatcccgctgctagcgcagagtcggggcgggtttcacaatccctgagttctcggagacttaggctcgcgagtctgcagttctggcaaggggagcgcggagttttctaggccttttaacctatgatgtaatgtgccttacaccgttttaacgtgatcacatcagagtgggacttagccaagcctccttttcttccttaccctcaccttggttaatgatttaattaggaaagggcgcggctattctgttggtgcgcatgctcagagagggggtgggcgcgtgctttcctctattaggttaattttttttttttcacacggagtctcgctctgtcgtccaggctggagtgcagtggcaccatctcggctcactgcaacctcctcctcccgggttcaagcgattctcctgcctcagcctcctgagtacctgggactacaggcgcgcgccaacacgcctggctaatttttgtattattagagaccggattccaccatgttgggcaggctggtctcgaactcctgacctcaggtgattcgcctgcctcgacctcccagggtgctgggattacaggcgtgagccaccacgcccagcctgattaggttaaagtgagaagagggaagacaaaaatgaaaactagtaaaagtcattagtcataatggctaacgtttgttaggggttgatcttgttcccgaccctctgtgaaaccgtctacatgccttatttctcacaaactgaaagtgtggataaaatgcctgttattactgataaggaaattgagactggagataatataactgtcctttggtcacgccagttgagaatcagtctctgattagacgctgagcatctatactagagaaaagaaagcaatggcgagacagacacgcagtcatggttgagttagcctcttcacctggcctagagctggttaagaccagacctaagggagcggccctgttgttagtggtgtctgtgtgtgttgtcccgcttctggttctgccctacctgcactgccaatgtaggaactagttttgttctataaatatatatacaaattgaagctcagaaaacattttttcacaggccaggcacagtggctcacgcccgtaatcccagcacttagggaggctgaggcaggtggatcacttgaggccaggagttggagaccagcctggccaacatggggaaaccccgcctttactaaaaatacaaaaattagctgggagtggtggtgtacgcctgtaatcccagctactcgggagcccgggatgcggaggttgcagtgagccgagattgcaccactgcactctagcctgtgcgacagagtgagactccgtcccaaacaaacaaaaaaacaaaacactttcccacagaaacaatgctttaaataatctcagccaggcatctatcttccttgtacaaagaattagtgggcccagtgtattaattaactcaagctaccactttaatccagcaatcttttagagcttccattgtgtatcagcagtaagctagggtttgaaaataaagcctagaacaagatagttgtgattcctgcttctgtggggtttgtaggcttccaaaggagcaatgatcattcattagttcaacaaatactgagggcccactatgtgccaggtgctattctaggcacttgggtatatcagtgtacaataaagatctctgagcaagtccagtggattgtgcctgtaatcccagatacttgggagactgaggtgggagaatcgctacagcccaggagttaagaccagcctgggcaacatagcaacgatcctgtctctaaaaataaaaattttaaaaattgtactggagaggctgaggcgggatgattgtttgagtccaggagt

SEQ ID NO: 1241555 - DNA, 4001 bp, Homo sapiens
atgtaattttgattttaaaaccaggtttaggggctgggcgcggtggctcatgcctgtaaccccagcactttgggaggccgaggtgggcggatcacgaggtcaggagatcgagaccatcctggctaacatgttgaaaccccgtctctactaaaaatacaaaaaaaaaaaaaaaaaaaaaaaaattagccgggcgtggtggcgggcccctgtagtcctagctacacgggaggctgaggcagtagaatggtgtgaacccgggaggcagaggttgcagtgagccaagatcgctccactgaactccagcctgggagacagagcgagactccgactccaaaataaataaataaaaataaaataaaataaaaccaggtttaggaattgctggtctggagggaagcagaattcgacctagattctagtcccaatattgtctttttaggcatgtaatttgtgctttaaattattttctcaggtataaacaagggatgtaaattggccccatctatcttataggctcaatctgaaaatgaattgaatacttgctaacaacttccaaagacctatggctctgttacacaaagtatttgaatctttctcctgctttccacctgcctgtggtcttcttcctgtccttccccctccctgcctcctcccagtttcctttctctccaccgaggatctttgctcttcagaaacctcagggcacttacccagaacccctacactagcaagaatcaacccgtgttacttttctcccagttccaagtccagttctctcacatccatctgggaagaccaaacgttgctttcagaggtggcaatgaggtgtgacagagctgaacacaactaaccaagctttcacaggaaattttttacttggaaagcagagcccgggaaaccagacatgattgcacaatacaccaggctaccctcagggaagcagttggatcaggtaggttgggggctggtcaacggagccacaggacaatggagagaagcaattaagctggtaaaatgttaatcaaatggcatccccaaaaggtgcaaaggaaatgaatgtgtgaagctgccgccacatggcatgtctagccacatctcacagcacttcctcattggctatcagtcccctcaagaacaccctggctccctgggcatccaaaagcaactgtgatgcctaatgcaggtcacttggactgggatatccaggacccaagccgagagaagagttttcaaaggcgtggggtgggggaagtgagcacaggactgttgctcagttcggtgactgatttccgtctccacttagcagtcacttcccaccgagttaatcatactgccagtctggaaggaagggaggagtgcaactggcaaaggaggtgagtaatcttgcctctaaaggaggaactccgaatttgagcaccaaaagtacctcgcagctttacccagaccctagcatgggaatttatgaagagcgcagggggtgaggagacctcctcctggtatggagtgagggatatatacatatactcactctccacttgttcccctaacacacacacggagacacacaacggctgcttttacggagtagcttagaccgcaccgacctgtccccttcctgctccggtggcgccaccccagctcgattcccgcgtgcgtccctgcccgcgctggctgccgcatgactctgccgccttgctcccgacactaggctcagtgccaggcctctctgcatcccctgggcgctcgctccctccgccagctccctctgggcccagtgtgccaggttcccgggtcacagcacctgcccctccccaagggtcctgcgggcctggtgccctcctcacccgttctccatggtctcgcagacgccttctcgatgagcctgctccggtgtgctccgatccgctccgatccgatcggatccgctccgctatgctgaactgagcaaggctgccgggtctggttcgcacagttggctcactggtctaggctctggcttatatcccttgccctggagtccccagccaatggcaagcgagcacgcgggccggccctgtctccatggtgacacaccctaattcaatcggctgaacctgggctgtaaacctaatcagagttcttcccagccctaaaccttctgccccggggcgggcggggggagccggagcgcacccagcatttcatctcggtacccattccagtccgcagggcaggagttcccagcaagaaggcctatgcggaaatagggctagaagtagggaggagagcccccagccctctccttgcaacctcattccagctgtgtcaatagcaaaccgtgagagattcaaaaaggaaaaatttcataccttagattgtacaaccccagaataaaaatgaagcgagactgtgtctgagttgctccctggacaagggaagctgggtcgcccccggcaacagtgctaacttggaggatacagggtttaggagagcacatccaggcccagaccgggagaagaaaaagttctcaggcaagaattccggggtcctagatgccgacagaaaggataaggatggatttggtgggtagggacacagataatcccttgatctgcgcaatattgatccaagcaattcaggtaactagaggactcctcccacgaagaaaattctgttatcggaatacacgggtaccagaatataacataaatagcgtgtctttggtagaatacaactattacttctgcccacatttacaatttaatttttacatttaatttacatttttacattaaatttacatttaatttttaatttaaaaaattaaaaaaaaatttatatataaaggccaggcgcggtggctcacgccggtaatcccagcactttgggaggccgaggtgggtggatcacctgaggtcaggtgtcggagaccagcctggccaacaaggcaaaaccccatctgtactaaaaatacaaaaaattagctgggcgtggtggcaggcgcctgtaatcccagctacttgggaggctgaggcagggagaatggcttgaacccgggaggtggaggttgcagtgacctgagatcacaccattgcactccagcctgggcaacagagtgagtagctggttcctgagaacttactagcactttgaaaataacaatgcacacaaattgaaaaaaaaatttcgttcttaaataaccacaaacagttacttacgggatatgtacatctgtttggcactactcaacttctcacatgcaggaatccaatgctgccaccctcattttctgttccatgctgatttttacacagtactttttttttttacttaatacttaatttttatcagagggaccttctaaaaccatcttttgtaaagatatgttgtctttatatatatatatatttttgagacagggtttcactctgtaacccaggctggagtacagtagcacgatcttgcctcactgcaatctctgctgcctgggtttgagccattcttttgcctcagcctcccgagtagctgggattacaggtgcctgccaccatgcctggctaatttttgtatttttagtagagacggggttttgccatattggccaagctggccttgaactcctgacttcaactgatctgcccacctcggcctctcaaagtgctgagagtataggcatgagctaccacacctggccagatatattgtcatcaaaaggaatgtagcacaatctaatgttccaactgtgaatcacctcaagttaataggtcacacagtgtttaagaaatataaaatattgctgtgtttcctctgaaaattaaaaatattccacaatacccttgtgagcttgtactttggcacagtttgggaaccatggccccagtcactccatgccacctcattcctgaatctatgtagtgtaaatgaatgggctctaataaaactacctgtgtatgaatgccatcttcaccccttatttactcgtgtgattctaggcaagtaaaattcttattatgcttcaattt

SEQ ID NO: 1241556 - DNA, 4001 bp, Homo sapiens
ctgaggatagcctccagccaacagcctgccaggcaatcaggaactgaatcctgccaacaactgaatgagcttgaagcgaatgctgtctggacaacatttgagatgatccatcttgactgcaaccttgtgaaaagaccctgaagttgaggacccaactaagccacacctgaattcctaacccacagaaaatttgagataatgtgtactgttttagcctttaaattgtggggtaatttgtcacgcagcaatagaatacattatctgccccctacaaagctcttgctctctattgcacccccttaccccagcacggtgctttgcagctaacagatttaagtatacttatgactgaaataattaatgaacaaaagcttaatattaggtcaaattctaagcgaaaagaaagttaattcatcagttcctcatgctttcaaaatgtcaaggaccaattgaacaaaattcattattttctcccaaggcatctcccaaagcacagttaaaagtcccataaaactcacaaaaccaaccaaaaatctacacacacaaaagcaataaaaactgatacagagaggtatatccaatccagcaggtatttcaatatgtataaaatattgtgttctaggtcaggcgcagtggttcacgcctgtaattccagcattctgggaggccacggcgcgaggactacttgagcccaggagttcaagaccagcctgggcaacatagccagaccccgtctctaaaaaacatacaacaacaaaaaatcagccaggtatggtggcccatgcctgcagtcccagctacttcagcccaggaggttgaggctgcagtaagtcaagttcgcatcactgccctccagcttgggcgagagtgagaccatgactcaaaaaaaaaaaaatacatatatatatatacacacacaccacacacacacacacacacacacacacacacacacacgtacatatagaactctaaaacacggagcagatttaatgagagaaatcttgggaaggttcatatgttctataggtcctcaaaaacacggatatgcccaggaaacctgactttcacataaattggcaactgcagacgtgcaagtgggctttctcgggtctctcatcttatgtctcagcaaccttcccgggagcctgagagctgtccaggtcacaatgttgataaccggctgccatagataggttgcagcttctcgggctcagtttgacatgtgcagaagagcctcggcccgcctagaagaaacattaaactcctcgcatgggtcggggaaaccaaagaaggcacggcagcctcaagatccacctcgcttcttagaacttttttttaatggagtctctctctgtcgccaggatggagtagagtggcacgatatcggctcaccgcaacctcctcctcccgggttcaagcgattctcctgcctcagcctcccaactaactgggactacaagcgcgcgccaccacgcccagctaatttttgtatttttagtagagacggggcttcaccatgttggccaggatggtctcgatctcctgacctcgtgatccgcccgcctcgacctcccaaagtgctgggattacaagcgtgagccaccgcgcccgaccgcttcttagaactctgaaatttaaggtcaagccccctctcggcgcgcggggagccgccgcggtgcgtcccgctgccgcaccaggcagacgggccccagctcttccctctcgcccttcaagctgcccgagcccactcacccacggagcagcaagccccgcaacttgaaggcggagagcgcccggctccgcagccgctccggcgccatatttgcgatttggcgccaccgccgcagctccgccccttcccgggcgcgcccctcccagctccggcctcggccctggcccgcgtggcgctaaaccctgttaagatccctgcttggtctccgctgcctgcgccgcagcaactcagaccttacagttcgcaaccccggaccgagtaggctgaaagtggagaccacctcgcgctcctttgctgccgggaaactgagggccagagcgtcttccctggtgtcgggctgcgttgagccagccacagcgctctcaccgctgccctagacattgcaggactgcggccgagcttcccggacacaggatcccccttctttcgaggccatgagagctgttgggttccctacttcgcacaagctctggaaatactgtgcctcgacatttaccggaagctgttataaatctccatcgctcccacctaccccgatttttatttaacttgagggcttcgtatgcgccatgcactgtcataagcactttaaatgtgtgaattcatgtgttgctcatgacagcccagtgagctgtctactgtcttttccacaacagcctcattttacagatgagaaaactgagacacaaaaatggtaaaggacttgctcaagatgaaacgacgagttaaatggtgtagtcaggatttgaactcagttattctgatttcaggtggactgtcaatctgccacacttcaaaacgcttgctccaatgagttgactaacccgtggagtgcttataagtaaacacgcggcttataaaacaggaggatgatttcacagtaccaatataaagtgacctccaacgtatacgggtttttttcttttttaaaaaaaagcgaagtttaatgaaggaagggaaacaaaagtatatgtatttgtttttgcattttaaaaacctctgggcccgggcgcggtggctcacatctgtaatcccagaactttgggaggccgatgctggcagatcacttgaggccaagagttcgagaacagccgggccaacatggtgaaaccccgtctctaccaaaaaaaaaaaaaaaaaaaaaaaattagccaggcgtggtggcgcgcgcctgtaatcccagctcctggggaggttgaggcaggagaatctcttgagcctcggaggcggagggtgcagtgagccgagatcgtgccaccactccagcctgggcaacaaagcaaggctctgtctcaaaaacaaaaaaagccgggcgcagtggttcacgcctgtaatcccagcactttgggaggccgaggtgggcggatcatctgaggtcaggagttcgagaccagcctgaccaacatggagaaaccccgtctctacaaaaatacaaaaaaattagccaggcatggtggcgcatgcctgtaatcccagctactcgggaggctgaggcaggagaattgtctgaacccgggagacagaggttgcggtgagccgagatggggccattacactccagcctaggcaacaagagtgagactctgtctcaaaacaacagcaacaacaacaacaaaacaactctggaaggttaaatcagagaccacaaaaatggttaactacaaaggggtgaggggatagggatgaaagtgaaaactttctttacagtgagacttttaatccatgtgcatgttttacatattcaaaaaatagaaaataaaaaggtgagcttaaaattgaatgcatactaaaactaatacacctaattgtatattaaattggtaacataacatcacaagtgatttttgaacacagttctctttatttagtgaaatatttttcaaagacaaaaagtacaaagaaatttttaatttttatgtaagaaaggataggaaatacgaatagaaagacatatagttaattctcattactgtacctgtgatagttagattttataagtagccaccaacaaataattattgaatactaaaccattcctactaggggaagtacagaattaggttcctgtgagcctctggtgacaatgttttcatcaactgatcaacatataaccttgttttgttttttttttttttttttttttgagacggagtttcgctctgtcgcccaggctggagtgcagtggcgcgatctcgactcactgcaagctccgcctcccgggttcacgccattctcctgcctcagcctcccgtgtagctgggactac

SEQ ID NO: 1241557 - DNA, 4001 bp, Homo sapiens
ccgccatcatgcccggctaagtcttgtattttcagttgagacggagtttcaccatgttggccaggttggtctcgaactcctgacctcaggtgatctgcccgcctcggcctcccaaactgccgggattacaggtgtgagccactgcgcccagcctggtaattactttcttaaaaaaatttttacaagggtagtgggctattgtaattactggtaatgacaccaaagatcagagatcaatctgaacccctgtgcacaggtcacagtggttaatagactggtcttagactgcagcccagatgtctgaaataagattcctcggtgcccccaggacttattcacaagtggctgaatccaggaccctggagggcatggttgaggtaaatactgtaagctggccttattctgctgcttagagtcccattgacaacaaccttaattaaatgctgtaagggacaaactgaaaagatgtgagtagccaggggagttgtatattcatgtgaaaatctgctagaagccaagaccatagaatcgaggagtgagagaggctgtcagattgctcgtgcctctacacatcattctgggtataccaagaatgcaaggccctgactgcatctcacctgggccatttctcatggttgtgtttgcagcaagcaactttgagagaagaggcagtgtctccctccaggacaaagaggaggtctgcgtactgccttctataaaacagcagattttccaagcttgtcgttccttcacttggatgcaacccactgcctgtgcagtcatccatttaaacccatagcgtcaccctgtgggacttggatggcaagggaaactgcttctaacatgcatcctatttcctgtaataaagtcctttgtctctaacccaggagtctcatcttctgccagcagtcacgacacaataacaagctaatttattaatttctaaataaagcaaccctgacagtctgttttcttgcctgctttttgcttaaagaattccatttctgacacccagtatctggatagtacaagctaaaacctttaagaaaataaatctcttctcacaagaagagttctgcctcataaaatcctttggtcaccatacctgaacacccaaactgtccttgccctataggataaaggtacacagttaggtattttctcctctgttgatgcctgaaaatcctgcagacataggaactcaggccttagaaaattctgtacccaaaaatttgcaattctctttggaaagttgaaagcacctttaaaagccacaatttgcaagccaggtgatgcactgtagcataacctggaagacatgagggctgcttcctcagatactaagaatcccactgccccaccaccagagcaaaacgatccccctcccagagaatgcacctcgccagaggccaacccacccgatacctcaagttcccctccaccgtggccctcctcctatagatcccgccccctccgtaccctcgggccaatcagagggcggcgtcccgtcgcggttgccatggtgcccgccgagtccctcccatcactcaccagatgtgcggcggctcgtccaagcggtggaagcgggtggcgaaggacagcagcgtcaccaaggccagcagggcccaccagccgaccgcctcgaagcgccgtgagccccaagcaggccgtttggggcttcgcgccacagcctcagcggccacgtcccggcctgcggccctagcagcctgggggccacagcggcccctccggggacgcagctcggactctgccaggcctccgcccgtggccggcggcatcttccccctcctctgggtcgccctccggcccggaggcacactttgtctgaccagccgccccgccaaggagtcacaagagggcagctcggggtaccccgggaaatgcaacgcccttcactgcagcggagcgcggggccccgggctcggggcggggcgggcagcgtggtcgcggcccgggccgctaggaggcggcaggaggcgcagagcatgtcgggaccgggagggccggccggcccggggcgggggggactgggcaggaggggtcgggctcagggaactgcaactcccagcagcccccaggtacggggcgtggcgggagagctgggcgagccagaggcgaccggaaggatctttctagtccagcccctcgctttacccggacgaaagacacgggcctgattcgtcgagtctcactgagccttagtcgtcggcaggtcccaggcgcgaagtttctcggcctggaggagggggtcgcgcgaagtgccagatgcaggcggggaaggtctgtgacgcgcacccgggtggagggaagctggttagacacctggagaccctggggggcggggtcagaagtgagctgcaccgcccgcccaggccgacaacgactcccggcatgcagtgctttgcgccgggcacgctctgcgcctgcgtgctgcgcgctgcccgctggggctcgaagttccgggagggttgggccagaggaggcggtcctggtagggagtgcgtagcagggtggagtcgctgtccggtcgcgcttcacttctgctccgccctccctgctccccataacagacccctccctccactaaggcttccaaacgtcgccccaagcctcccaatttctcgcagcccttcatgctcttctcttggccctagcaggaggtgaccttccagtaatgtttgtattttaagagtccccgggccgggcgcggtggctcacgcctgtaatcccagcactttgggaggccgaggcgggcggatcacaaggtcaggagatagagaccatcctggctaacacgatgaaaccctgtctctattaaaatacaaaaaaattagccaggcgtggtagcgggcgcctgtagtcccagctactcgggaggctgaggcaggagaatagcgtgaacccaggaggcggagcttgcagtgagccgagatcgcgccactgcactccagcctgggcgaaagagcgggactccggctcaaaaaaaaaaaaaaaaggccccgagcgaggagaggcagtcatgacaatcacctggggagcttcacggctttcacatgttcttcccggggcctgctccagagccactctgttcatctctggtggaacgggctcgagaatctgcatgtttttataagcggtctagatggttcttaacgtgccatgaagtttgagaaccacttttgtggcactaaggaaggtggcacgttagatgggactttgcgtcacgttaataatgtatagtcctccctcttccaaatgggattttaggagtctttttctcaaatcatgtgtaagacatggtttaaaaataaaatctgctaaagtaatcagaatgcatatttgaattggaaacacaggtcttctaggagtgctgatgagatggatacttgggcttaaagtttagttctacaagtgcagaaaggaacggggcatggtttacatagttatcactggtaagagaaggcagaaattgcctaagagatttcaggtttcctgcttgtgggtcgtgacggagggcagcagcatttaccatgcttctggtcactcgtagtacagatccaaaggtgtaatccaaaggcatttagccattaggtaaggcatttcttcagggattctaagctaattaatgtctgccacactctagtggtcaccagcagtccctgtcccttggcaccaggagtccctgtagcctggctaggtaaggaaagggagttgcatctccaaataaggaagatccagttgtggccacccaattcctcctcttcgaaagacactttctgcccatcacctgctttctgtgccaggaccatctttactttctccacaaaaggtaccttcaggacaggctgggactgctgggcttgggaaccatcttggaagggcctaggttcccacttacacccttgccatctagcagactgagttggtagtacagggatggcaatagcaagttcagagagcagcttaatatgctaggggtg

SEQ ID NO: 1241558 - DNA, 4001 bp, Homo sapiens
catcaaaaaaaaaaaagaaattttgtatatatatatatatatatatatatatatatatatatacacacacatgtatatatatgtatatacgtatatatatatatacatatatatatacatatatacatatatatacatgtgtatatatatctgcatatgtaaataggcacttgtgttttcttctggtatgtttctctttttgtatatttaaaatttttaatctatactctgatttttgtgatataaacatctagctagttttctccaaaaatgaattatgaacaatccatcttttttaaataatacaaaacgtcaccattatcaagcgctaaattcctacatatatttcggtatttctaaatttcctgttctgttttattcattgatgtcttttcagctgttagtaaacaatttgtggaaataaataacatgcacattttgacatctggaaaagcaagcctttgtccattctgctacaaaaaaattaacttagcacaataataaaagacagcatgtgtaatttaaaaactctaaaactgctatttttatttggcttaagtaaaagtgataaatagaaaaagctcactttttttttttttttgagatggagtcttgctctgtctcccaggttggagtacagtggcgtgatctcggctcactgcaagctccgcctcccgggttcacgccattctcctgcctcagcctcctgagtagctgggactacaggtgcctgccaccgcgtccagctaattttttttatattttttagtagagacggggtttcaccgtgttagccaggatggtctcgatctcctgaccccatgatctgccctcctcagcctcccaaagtgctgggattacaggtgtgagccaccacgcccagccaaaaagctcacatcttcagaaaattcaatcttcctattcaagcacaagaaccatcttcccatttcagttcttctaagtaatcttctaagattactcagtaaagaacatatttacatagtgtacattgatataaaatccatactggattttatttgaagaatatttagccctgaagttgatgtgttatggggcttcattcttagttctcaatatacacttttttaacgtacagaacattgttttaaaatctgtacattaaaaataatctgctgcatcgacaatgttgcgagttaaatcacttcaaaacagtctattagtgttctaggagggaaattataatttgattggaaatcagctaaagttttgtttttgtgttgctgctcataaaggggcctgtgccctgaactctctgaggtttccacatccagggtggtgtgaggcctgcggaggcgagaaaaccaggctcccctcctcccccgccaggagggtatgtccccatcatcctcccacatcccacctcctcccagcccaggcctggttacctcttttgcttgtccttcttgttcatgtcagtgtccttgagcatgacgatgagatcctttctggggactttaccccaccaggcagctctgtggagcttgtccagatcttctcgacggacgtggtacctcggctccatgaaagcgctgtcgtcgtagtctccccaagggcccactttgctcttgccgctccccctgcagcaggggaagcagtggcagcaccacttgcccatcttgctcctgagtgtcttcatagcagagtcgtcgtggtctccagaagtgcccacgttgctcttgctgctccccctgcaccaggggaagcagtggcggcaccacttgcccatcttgctcctgagtgtcttcatagcagaatcgtcgtggtctccagaagtgcccacgttgctcttgccgctccccctgcaccaggggaagcagtggcggcaccacttgcccatcttgcttctgagaccaaatggcttcttcacagaggaggcagccggcattgaaccagcctcagccaccatctgcttttaacagccaggggaggccggtagtagccagcagatcgcgtctaccaaccagtttcaccaactagcagataactccgggtttctaatctgtttgaagagaaaagtcccgaccaaaacctgccaaccccagcaggggagcccagcccaccccacccagggaaaacccacacccacctggggaaagcccacacccacgctgggcgaccccacgcccaccccaggaagggccaaccccaccccccaagaaaacacccggcccacccaagggaatgccaaacccagaagagaaaaggtcaagtccagcaaagtaacgtgacagaaaaaacgtcagtccaaggaagaaatgtcaatccaagcgacaaacgccaagccaagcaaagaacgcaaagccaagccaagcgctacaggccagccaagccgtcacgcacgtgcagtgtgcgcatgccgactgttacagaccagccaagccgttaacgcgcgtgcagcatgcgcgtgcaagccattacaggccagccaagccattacgcacgtgcggcatgcgcgtgcaagcagttacaggccagccaaaccgttatacgcgtccggtgtgcgcgcacggcatgcacgtgcaagccgttacaagccagccaagccactgccgcgcgtgcggcgtgcgcgtgcggcgtgcgcgtgcggcgtgcgcgtgcggcgtgcgcgtgcggcgtgcgcgtgcggcgtgcgcgtgcggcgtgcgcgtgcggcgtgcgcgtgcggcgtgcgcgtgcggcgtgcggcgtgcgcatctctggtggtgtcagtacacgtggcacagacagtggccgatgcgtgcaacctgcataagccttggaaccacgaatgtcactgacagcctggtgtttcccggcaaacttcctgggagtcagccgagctttcaggccattgagaagcctctggtgaaagaaaaagcttcttgaagcaggactggggctaaggggctggaacttgaggatgctgacagcctcctctgaagaaagcccccaggacactcctggtggtgctgttgtgcatggccgctgctgcagctcagagcaccggctggcggagctggctgcaaatggcctcaaaatcacggagcatgttctcactcacaggtgggaatggaacgagaacacacggacacaggaaggggaacatcacacaccagggactgttgtgtggggggaggggggagggatagcattaggagatatacctaatgctaaatgacgagttaatgggtgcagcacaccaacatggcacatgtatacatatgtaacaaacctgcacgttatgcacatgtaccctaaaacttaaagtataataataataaaatttgaaaaaaaaaatcatggagcacaagacgcccactgagcccagcacctgcctgaggtgccttcgatacctgctcctctttgctccacacccagaacacgaggccatcagcgagggggcatttggggccacaggatcgcagccagctcctgccccggtgccccctgcctgtccaagccagggccaacatctgtggggcttctggcctggggggctctgctccactggcatgcaatagggtcaaggtgcaggccgctgtgtccaggccagcaagagggggcttggaggagcacctaccactgatggggagatgcagaaaggcaaccccacgtgcagatcctgagaacaagacactgagcctccctggtgctggcctctgagctggaccagggcagtggcacctcaatgctcctgccaggactctcctgctgcaaagctttatgcagccaggctccagtctgcttcacccacaccacaggtgctttggtgtgggaggaaaaatggattctgagcctggacaccaacctgctcttaccaaaagaagtagaggaaaagccaatcacaagtgcaaaaaaaaaaaaaggtactattttgtaactgaaatcttgcctgatatgcagggttaagctaaagctcctcttgcttgatactaaattaaattttgaatgaaacaaaaagaagacacacacactaaatt

SEQ ID NO: 1241559 - DNA, 4001 bp, Homo sapiens
ctccagcctgggcaacagagtgagactccatcaaaaaaaaaaaagaaattttgtgtatatatatatatatatatatacacatgtatatatatgtatatacgtatatatatatatatacatatatatacgtatatacatatatatacatgtgtatatatatctgcatatgtaaataggcacttgtgttttcttctggtatgtttctctttttgtatatttaaaatttttaatctatactctgatttttgtgatataaacatctagctagttttctccaaaaatgaattatgaacaatccatcttttttaaataatacaaaacgtcaccattatcaagcgctaaattcctacatatatttcggtatttctaaatttcctgttctgttttattcattgatgtcttttcagctgttagtaaacaatttgtggaaataaataacatgcacattttgacatctggaaaagcaagcctttgtccattctgctacaaaaaaattaacttagcacaataataaaagacagcatgtgtaatttaaaaactctaaaactgctatttttatttggcttaagtaaaagtgataaatagaaaaagctcacttttttttttttttttgagacggagtcttgctctgtctcccaggctggagtacagtggcgtgatctcggctcactgcaagctccgcctcccgggttcacgccattctcctgcctcagcctcctgagtagctgggactacaggtgcctgccaccgcgtccagctaattttttttatattttttagtagagacggggtttcaccgtgttagccaggatggtctcgatctcctgatcccatgatctgccctcctcagcctcccaaagtgctgggattacaggtgtgagccaccacgcccagccaaaaagctcacatcttcagaaaattcaatcttcctattcaagcacaagaaccatcttcccatttcagtttccttctaagattactcagtaaagaacatatttacatagtgtacattgatataaaatccatactggattttatttgaagaatatttagccctgaagttgatgtgttatggggcttcattcttagttctcaatatacacttttttaacgtatagaacattgttttaaaatctgtacattaaaaataatctgctgcatcgacaatgttgcgagttaaatcacttcaaaacagtctattagtgttctaggagggaaattataatttgattggaaatcagctaaagttttgtttttgtgttgctgctcataaaggggcctgtgccctgaactctctgaggtttccacatccagggtggtgtgaggcctgcggaggcgagaaaaccaggctcccctcctcccccgccaggagggtatgtccccatcatcctcccacatcccacctcctcccagcccaggcctggttacctcttttgcttgtccttcttgttcatgtcagtgtccttgagcatgacgatgagatcctttctggggactttaccccaccaggcagctctgtggagcttgtccagatcttctcgacggacgtggtacctcggctccatgaaagcgctgtcgtcgtagtctccccaggggcccactttgctcttgccgctccccctgcagcaggggaagcagtggcagcaccacttgcccatcttgctcctgagtgtcttcatagcagagtcgtcgtggtctccagaagtgcccacgttgctcttgccgctccccctgcaccaggggaagcagtggcggcaccacttgcccatcttgctcctgagtgtcttcatagcagaatcatcgtggtctccagaagtgcccacgttgctcttgccgctccccctgcaccaggggaagcagtggcggcaccacttgcccatcttgcttctgagaccaaatggcttcttcacagaggaggcagccggcattgaaccagcctcagccaccatctgcttttaacagccaggggaggccggtagtagccagcagatcgcgtctaccaaccagtttcaccaactagcagataactccgggtttctaatctgtttgaagagaaaagtcccgaccaaaacctgccaaccccagcaggggagcccagcccaccccacccagggaaaacccacacccacctggggaaagcccacacccacgctgggcgaccccacgcccaccccaggaagggccaaccccaccccccaagaaaacacccggcccacccaagggaatgccaaacccagaagagaaaaggtcaagtccagcggagtaacgtgacagaaaaaacgtcagtccaaggaaggaatgtctatcccagcagtcacgctgccaagccaagcaaaggtcgcagagccaagtctagctgctacaggccagccaagccgttacgcacgtgcagtgtgcgcatgccgagtgttacaggccagccaagccgttaacgcgcgtgcagcatgcgcgtgcaagccattacaggccagccaagccattacgcacgtgcggcatgcgcgtgcaagcagttacaggccagccaaaccgttatacgcgtgcggcgtgcgcgcgcggcatgcacgtgcaagccgttacaagccagccaagccactgccgcgcgtgcggcgtgcgcgtgcggcgtgcgcgtgcggcgtgcgcgtgcggcgtgcgcgtgcggcgtgcgcgtgcggcgtgcgcgtgcggcgtgcggcgtgcggcgtgcgcgtgcggcgtgcggcgtgcgcatctctggtggtgtcagtacacgtggcacagacagtggccgatgcgtgcaacctgcataagccttggaaccacgaatgtcactgacagcctggtgtttcccggcaaacttcctgggagtcagcctagctttcaggccattgagaagcctctggtgaaagaaaaagcttcttgaagcaggactggggctaagtggctggaacttgaggatgctgacagcctcctctgaagaaagcccccaggacactcctggtggtgctgttgtgcatggccgctgctgcagctcagagcaccggctggcggagctggctgcaaatggcctcaaaatcacggagcatgttctcactcacaggtgggaatggaacgagaacacacggacacaggaaggggaacatcacacaccggggactgttgtgtggggggaggggggagggatagcattaggagatatacctaatgctaaatgacgagttaatgggtgcagcacaccaacatggcacatgtatacatatgtaacaaacctgcacgttatgcacatgtaccctaaaacttaaagtataataataataaaatttgaaaaaaaatcatggagcacaagacgcccactgagcccagcacctgcctgaggtgccttcgatacctgctcctctttgctccacacccagaacacgaggccatcagcgagggggcatttggggccacaggatcgcagccagctcctgccccggtgccccctgcctgtccaagccagggccaacatctgtggggcttctggcctggggggctctgctccactggcatgcaatagggtcaaggtgcaggccgctgtgtccaggccagcaagagggggcttggaggagcacctaccactgatggggagatgcagaaaggcaaccccacgtgcagatcctgagaacaagacactgagcctccctggtgctggcctctgagctggaccagggcagtggcacctcaatgctcctgccaggactctcctgctgcaaagctttatgcagccaggctccagtctgcttcacccacaccacaggtgctttggtgtgggaggaaaaatggattctgagcctggacaccaacctgctcttaccaaaagaagtagaggaaaagccaatcacaagtgcaaaaaaaaaaaaaaggtactattttgtaactgaaatcttgcctgatatgcagggttaagctaaagctcctcttgcttgatactaaattaaattttgaatgaaacaaaaagaagacacacacactaaatttccttgttc

SEQ ID NO: 1241560 - DNA, 4001 bp, Homo sapiens
ttatgatatcaaattaaaatgtcttaggcaactgccatgtgcaggaagttcattatagtttcaataatgtggtactgctgtaaacttccaggttaaaagtaatcatccttacatgactgaaagtttaatcagatacatataagttacacataacaagaacaaaactataacactaggaaatgttactttgtgcttcaaattatttattggtaaagaaagcattaagtcagtaaaagcagcatctaagaatagagaatctccttattttcaattttctcatttgtaaaataaggagttacagaaatacaatctttggaaaaggcccaatatgtagcaagataaaagtataaaagtaaagtgtttcaaagagagttggggaccaagctatgctaaattcccaagtgctctggaaccctaagtctcagcagagtagtgtttcaacaaatccctccacttttcggagcgcaacacatgtaaagtggttgtgtttaaaaccccaacgtgcaagtttgaaaagactgttttacaaaacaattgttaaaatgtctaatttctctcaataatgtcaaaatcatttcctttgagaaaatgatacctatctctcatactcttccaaccacttcttaaaacacattcagctcattattccaatgagcaggaaacttgcggggaggtggggctagcacacagatcccatggcttggacaactgaagcatgacttttgtggatttgtaccatgtggtgtttcaggagagaagaaaaatacctcaggtgatgaaattttcaaaacgtatctaaaactgcagttggtagaaggctctccacagccagctgtctttcaagaaaaggctccaagtttatttaaaatctacaagcagaacagaaccatacctcaaccaagctctaacatcaagaagttttacccgatttacgtagttaaaaggataagaaatcggaatttacttcaatggatttgttcgatgccttaataatgaatgaactagaggcatcactcactgacttgagttctgaaggagtctctcagccctgccccctgtaaaaccttaagcaatttctacagaattaggtttttcgaggctaagcccggttcaaaggaagtctccccgcctccctcccaggggctgaagcccaggacagccggggcggcgcgcccgagcgggtgggggcgcggggacgccccctccccgctcgggaaaagttctgcaggccgctctccggccaggccggcctgcggccgtcgcctgcttcgccgccacaaacacccatctcggccgcggacggccagagggtcgcgccccctccccgcgccaccgcaactaacaccccgcccccgcctccccgccaccgccctcgccgagcgttaacccctcgccgtccgccgcccggctcgggggaggaggccggccagggggtggagttgtcgcgtctcctcccgggagcgcccgggcagacgcccggcttgtttacaggccccaggcctgcccgccgccgccgccgcgcaggcccgcaccgcccgccagcccgccgtcggcccgagcgccgcacttacccggagcagccgcaggcgggcaggtccctggtcggccgaggcggcggcggcggcagccggggagggggtcaccgcggcggcgacggcggcagccgggggaggggtcaccgctgcagcggcgggccaggtcaggctggggaaggggcggaggaggggaggagccgggctgcgtccgggcccccggctgtcggcgccctcgcggctcagatcatccgggcgttggagagggaggcagagagcgggtcccggagaaggaggaggaagagccgaggactcatcgctttcgcgcctcagctgtctagagtccccccacccccccctccccaaccacccgttccggagcaacagccgcctgaggacccgaagctgcgggccggacgagcgccgagaccactgctctctagctcccgcgcgcgctcccgtccctagcgccgccaccgccgccgccgccgcctctagcgcggccccgcgcaggcgcgctcacgaccgcgtcgcccctcccccacccctccgctcgccccgccccgctggctccgccgccgctacagctgcggcgcggcgcgcagctacagagacccggatgtcgttgggcaggaactgcggtgagggctggcgggcgggggaggggccgccacagatgacgtcactgccttacccagcttctttctctgccgctgctgctgccgccgcctttgccttacggcctggagcaccaggccgaagccgaagggagcgtccggatcccggatagcagccaggacccgggccttcacgttccggcgccagggactggacagaatgtgcggctattaggtgcccagtagatcgacagcccctccgtgccggcccttggccaagtagggactcggaagctacccctacggcgtccgcgcccggagccctggctcttctacctgcctgcagatacaaaccccactccctgcgaagatggtgtacacgcagccccgagcacagacccgaagctgtccacccttcttgggcgccgtcgcggtctggccgctgcccttcgaacccatggtgggtcccaggcagctgccagacccccctaccccagagtcccactcctccagagccttcctctcccagtgaccccaggaagcccaagcaggtgccacggccacacacctcgcgacccaaagggcagagacacaagcacgctaccaccgcccaccaatgtgcgagtgcaactgattcacgcacggggcacatgctctgagtttctggcaggttttccctctatagttcaggggattccacattgtatttatttgcacatgttagataatcacgtggttctgtcccaggggacctccaacgacctccaatgaggtaggttaagggaacaggatttttcaaaatcaggagaataatcagaaacataacagctgcttctattaagaggtagagatgagctaaagttaatagaaactgcacgtgccagcggccaaaatccagtttagctagctggaaaacccgacccacgctgcttgcagacgccggggatagaatgacaaaccctaggcagccaatgaatcgcagcctaggagcagtacatcaccagcacgggttcccattggctggggtgcccttccctctcttgtcagcggcttaaccagttcacgaatttgacctacaccacattcgcaggaaaagaagttagaagaaaagtccgtatttttaaaagatgttctgatgcacacacaaaccaaagacttcattgtagaaggcaggttcttttactggccaaattgagttctggccagtaaaaaaggtaaatttatgttgaaggcctctctattttacttgaggagctcactatagcaatttgcaccctactactttctatctcctaaaccattttgttgccccaactcttagatcaaaagcaacctatttattctttctggcattcagcaaatatttagctgctgcttttaaagttgtaaaaagccatctctaattttctcaacatgactttggggaaggttctgtttccttcacttttttttttttttttttttttttttttgagacagagtctcgctctttcatccaggctagtacagtggcacaatctcggctcactgcaagctccgcctcccgggttcatgccattctcctgcctcagcctcccgagtagctgggactacaggcgcctgccaccacgcctggctaatttttttgtatttttagttcagacagggtttcaccgtgttggccaggatggtctcggtttcctgacctcgtgatccaccctcctcggcctcccaaagtgctgggattacagtcgtgagccactgttcccggccagaattccttagaagatgatcgtggatcatttccacatatacaaaataaaaataaaattcactatgcatttggtctcagtatcatctgaggatacatttc

SEQ ID NO: 1241561 - DNA, 4001 bp, Homo sapiens
tggcattcagcaaatatttagctgctgcttttaaagttgtaaaaagccatctctaattttctcaacatgactttggggaaggttctgtttccttcacttttttttttttttttttttttttttttgagacagagtctcgctctttcatccaggctagtacagtggcacaatctcggctcactgcaagctccgcctcccgggttcatgccattctcctgcctcagcctcccgagtagctgggactacaggcgcctgccaccacgcctggctaatttttttgtatttttagttcagacagggtttcaccgtgttggccaggatggtctcggtttcctgacctcgtgatccaccctcctcggcctcccaaagtgctgggattacagtcgtgagccactgttcccggccagaattccttagaagatgatcgtggatcatttccacatatacaaaataaaaataaaattcactatgcatttggtctcagtatcatctgaggatacatttcctaattctccacatatctccccgaccccccaaaaaaagaaattagatcagagatctttgaaacgctaccttcttggaatccttaatactccaggcaagtaacagcatgagtagcatgctggtggactcattaacattctgaactacaaaagctcatatggcaaccatttagagtgctcttaaaagacaaattttcttatttataagcagaagctgggtcactagtgacggtagtggaccatagaaaacttgaaatgcctgcctatctttctgcttccttcctttaggcttccacacctttcttctctctgttctgcacttggagaatctgggtcaattgtagaagaagagggagagaaatagaaaatatgaacagaaagaaatttttaaggagtctacgcattgtacagactgccgataaagcagcaccttcctactatttatttctgaatacagcttgcagggacattttggtatgaactaggaaactcatgggttataagattaatattttaaaaagatatcaatattgtctgattaaatatgtttaatatcatcatatccccttttattaaaccttatgctaagaaggggggacagatagaaggggaaaataacattgaaaaaagaggattgaaagttctcttctgaactgtaagactttgccgggcctctacacatatttgggatgttcacagtaagattttagtgggaatatattgccatgatgatgacattttagtaatttttataggtatattataaaactatcctgctctgctttggaaatctgtttatatttcaattaacaaagaaaaagattatctacaagattggctttaaagtcctgaatttagtgtgtgttgatagcctagtaattgggaggcttggggtgaggacaggggctgtagtgtggagtctaaagcttaatctgatcagcaatactctctttccctttccaccacaattgtgacttaaaaaaaggtttacattcctgctcccaaattactctccaggagagtcacccttgaggcagacttgcctgggcctctcaaaatatatgcagtaatgtaaatgaccccctcaggaggctagtatttgagaatacccctcaccatccttttccactgaagccagtcactactcaagagttagaaagccaaccagaacataggttcaacaattccttcctccctcactacctgtttcatatttttttctctcacacatcctcttcatttggtttcctcttttctcatttctccttctctctcctccctttttcttctcttctctttttgccttctttgcccttctcttccccattcttcttttctctcttttcattagcttagtacaaattgtagcttctgctacccattttctcccagaacagaacatgcgagcagacagtgcccctaaatgaatttcattcagggagagggtgtgccccctaccctggccctccttcctccctcccctacatcataatacattatgagaaacttagctgcttagaggactgttacagaatcaaaaggattagagaatcctgtcctgtgtgacatcactgggcagccccattagggaggggcagaggggagcagccagcagtcttatgctaccactgtggctcatcctgcgacctgagagaaacctgggcaactgtgagcaccagaggccaagtcctggacagtctttagggtaggctttcacctcaagatagccatatatggccacagccttacaatactagagtggatcttgtcagataagttcatctgttcatgagatagctattgtgcaccaagcactgtgtgggacactggaggtagataatgacatcaatgggcaagccctgcccacaaagagccaacataataataagaggcatagacaaataagtcagcagatagaaaggaaattgcatactgttatccatgctgtgaagaaaataaataaggaaacagatccgggagacgacttgaaacaggtgttcagtgcagacctctctaagaaggcagcatttgatctaaaggatgagaaggagtcagcttcataatcaggggagaactttccaggtagaggggtcagcatgggcaaagggcctgatgtggaaaagagcttggcagaaaagagtttcttacagcccaaagacaagttcagcaaactcaaggcaaatagtttatggtcatttaagtttcgagagtgtttcaacgtggacattagggatatttaatttataatcaggaaactacattatgtgcacgggtataatccatagaaaataacttggtgagttggtctggtgcaaaaagcaaagcaacttttttaaaaattgaaattaaaaatagtctgggtgcagtggctcacacctgtaatcccagcactttggaaggccaaagcgagtggatcacttgaggccaggagttcaagaccagcctggccaacatggggaaaccccgtctctactgaaaatacaaaattagccacacctggtggcacacgcctgtaatcccagctacttgggaagctgaggcaggagaatcgcaggcaggagaatcactggaactcaggaggtggaggttgcagtgggccgagatcatgcccctgcaccctagcctgcatgacagaaaaaaaaacacctttattcaactattgaaattgagaagtattccataactccaggaaagacccgtcagacaatccagcagcagctagaaaagagtgaattataagcttcaaataaatagttttcatcccaatataggtacctatttgtgctaagtaaagactagcacagatttgagtgggcttcttcagaacaattcttctgggtgtttactgtctatcctgggcattacagaagatctcaaactaaaccatacttttgaaagcagcgacacactgcatccttaacaatggtggcctggttgaaaacagtaatgaaattgtcatcatcataaagccttttatctgaacctgactctgcagtttacaaagcactatcatacagactaaccagtttaatcctctcaaaaacccttgcaggtagacagggcaaggactcttaatctcctcctttatagaagagaaaactaagcatctggtagtaactacccagggtcacagaaattaatgacgggtacccaggtttgtcccccgtacgatactgagcatcattgcttttacatgctggtagtaaaggcagcaggagtggaaagagtgctgaacttagttccagtccgtggtgtggagagctggcctatactggctcatgacagcagattattaaattttcagaaattttgcctgctgtttgttaaatactcattattaaaaattaaatgatataggctgggtgcagtgtctcatgcctatattcccagcactttgggaggctgaggtgggtggatcacctgagatcaggagtttgagatcagcctggccaacatggtgaaaccccgtctctactaaaaatacaaaaattagccagg

SEQ ID NO: 1241562 - DNA, 4001 bp, Homo sapiens
ggaatagaggtaagatgtctgaatgaatcatatggaaaatgtaagccaagtttcttagcaggatatttataattaaacattatacaacgacgaagccagccaaaatttttctagatatccttcaatgccaccacagtatgaatgcatcaatcaactattacaggatttaactaaaactactttcaaaattctgaaacaccataatgcctttcatcaaaatctagctagtgagaattagggagggaagtttccaaatgccttatcttataaagttagaaattgaaaattcaaagccatattaagaataataaatatttgtatgacattctgttcaaccatcacttttggatacatcatcctatttgatcctcaggacagcgctcagatattggtacatttttatccctactttagaggtaattccaggctcaaagaccttgacttcttcaaggtcacatagctaaaaagtggaagaaccagcgtttcaccccagatcttctgatgctcatccaattctctttccattacaagacaattattcatttaaaaccaaatgtttagaaacccaacaagtctgatgctaaagaaagacctaaggatcaagtagatcaaaccttaagacttggaaaacgctgaaagccggctacaaaacatgctggaatccgttaaaaacggggagaagagattatcaagagaaaggaaatcaaagaggaagaagggggatctaatctaaatgtccttgggtgcagcatagcagaatggcaatattcaagtagagaatgcagggaaactgcactttcctgtgaaatgtgattttcaacgtagtattgtaggttaaaaaaatgactgtgttactttactataaacgtgtttgagaattttacttacgatataggcgctcagaaaaccaatacctctccaactgggtacaaccagtcccacattttttcataagtcatgatgcttacctcccaaaaagccaatttttaaaaatcagaattcagcatcccctcctattcagattataggtaaagggaagggtcggtaggacgatggcaaatctaatggccaatgtctttctaggcgaaagcatccttaagggcaggacaaagacaccaccactacaaacgaacctcgttcaaccttcagaacacggagaacaaaccagttaaagcaaaacgaaccaacattgcagatacgggaaaagggaattcctaagatggctctccaaatccgtgcactcggcacctttcctcagtacaaccgcgaaggctacgggaatgcgcctgcagagtgtgggaactccgggcgcgggtgcccaccccgccgactcccagggcgaccccagaacgttcgtttcaggcgggtcacagctgcgccacccaccagacctgtgccccagcgtccgaccgcgcacctgagaggaccgaggagatgaccggccccaaatgcatctgcttctccccgcggccgcggaggccgagcaggaagggcccgcaggcggccccggccccgcgctgacagcccggcgccgcccccacctgcccgcctggggggcgccgcggccgggcgcgcccgcccagccacttccttccccgcccgcccggcctcgcaccggcccgcgggggctgggagccgcgggaggaaggaggtttggccagcggcccgcggaggaagccgccgccacctcccgcccgccctcacccaccggcatcatcgcggggagagtccgcgacgccctcggccgccgcctgacaggacgctccgcgccgagctgtgcccaccgctccggccgcctcctaaggccgcgctcccgccgccgtgctctccggcccggccgcggcgaggcggcagctgcggcgggctgcggggctctcgctggccctgtcgcggccgccggcgcgctgcgtcgctgtcccgggcacccggccgccgccgccgccgcctcaacctcagcctcagcctcagccccagcccgacagcctgcggcccgcccgcccggctcgctcttcagcccccgcaggccccgcccccagcgcgacgccccgcacgggtcccgtagccccctctgattggcccggtgggagcgggggcggggagaggggcggggcttcccggctccgcccgctaccctcgctctcagcggcggccaggtgcgtgcgcgtccgcgctcccggcggcgggggaggggcggacgcgcagtgggcaccggtggcctcccccgcccttgcgtgagccccgactagggaagaccgcggacggtgggaggactgaggcccgacagggaagggccggcccgggtcccgcagcggatcacggcagggccgggactcgaacccgggctcccgggggccgactgtgggccgggagcgtccctgcggcgacggcgcgcgcccgcactctgaccgcggcctgacccccggctgccggcgcgccgtggggctgcggcccagaggccagtgggaggggcgcggggggcccccggagcgagcatgtgacccgaggccgcgcgctcggaaccagccccggcccgacgcccttggctggcacctgcttctcccccaccggcgtcttccgcggctctcggggccgcgccccccgcaccagctcccgagccttggccttcgcccgagcgatctcccgcctagaaccccgcgcccacctgtgccacctgtgcccacctgcgccagcatccctcgaggtccagctccagcgtccccggggagggtccggtcctcgtctccagggcctgggtctctccctgcagtcccgtctccagaggcgccgccccctcgggcctgagcgccggagtgacagagccctgggcagggccctgagcagaccctcagtaaaggctgccaggggggtaggcacccgctcggggccccccacatggtgccattcgcccggaccgcggcggagagcagacagggggactgaggtgctccccgcggcagcaccgaactcccacgggcatcagaaggcaaggtctgcggatggccccagacacagaaggcgtaagccgccctgggaagcgccggcccagtggagaaggccgccgcgaggtcagggtcagtctggagcctgtctggttctcggagaggcttctggctgctgcagagtgggggcagagcaagggaggaggccagggagctcccaccagcccattcctggggagccacccctgtccctcagaggccacgggggctcgtgtttgcgagtgtggactttccagttagacagacttggttcagcaccgcctccgccacaccctcgcctgggatcctaaacaagccgcatcttctctgcatcgtagtgtgcttgtctctgtgatgggagagtgtagggataatagtgcctgcctcgtgtcaagaggctttttcggatgcgagggatggaaagcgcccagcacaatttgtggcacgtggtagctgttccataaatagcattctgtagttgggccgtgattagcaaggaggcttagtgtacagacgtccctgggatttttaaacctatccacacctgggcatgaatggctaatgacacccctcttctgggagcagagtttggagagaagaggaggctctagataatgagtgatcctaggctgaaagtcagagacatacttaagttctaattctagctgctctgcttctgacctcctgtggggccttaggcaacttgcactccttctctgggccttggtttccccagctttgacagctgatgtccctgagtcacgaaggggtacttctggcccacgaagcctgacaaaggacaggttttgccaaggctcttcagagaggtgccccccggggtaaggtgatccaaatgagcctgctcttccaggaagggaagcattggcacaagggctcccctcttgcctgcaggacctgtgggcacagacagtggcagctaccgtgcctcacaccaaagcatcctatatcctccaggtaagggtccatttgaggcaggctggtcagctccccctcaagtccttc

SEQ ID NO: 1241563 - DNA, 4001 bp, Homo sapiens
ctgcttgaatctagcagattctttgaacatgctcaataaatatttgttgagtacctactgaagaagttctgtagctggctccagagacctgaggatgaataagatagttcctgccactgaggagcttactgtctagttgagggagacagcgagtacatgaaaagggctttagcattagacaaatcttggttcaaactatcagttctgctacttactggctgtatgactttggttcagttgcttaatctccctgagccttgtttcttcatctataaaatgaggacattaatgttcactttccacagttgttttaagaattggaaaaatatgcaaatatctggcacacaatcagtgcacaacagatagtgtctagtattaatttagctatacacttgtaagagtcagtgtcttttttcatagagattagaatcagttttttctaatttagtaattttaccttgtgagattcaccatctattgcagcagatataatatgttcccattaatgttaactatatttctctaactcaaaaaggcaattttataattaaaaacatggactctgtaaatcaaacagacctacatttaaataatcttagtcacctctgagctgtgtgattgggctaagtcacttaattttcctcaagtcgctgaaccctttgaaacctcagtttcttcatctgtaaattggttaacatgcagctgtttcaaagagttggtaaacattagcacagtgtctggtccatgtgaagcagctggtaagcgttcagagaaaggctgttcactgaaatgattgtttccttccagatggcaaaggttcagtgggtatttattctctatactcttctgttgcttttttttcccccaggcacatgtaatttttataaaaactctaataaagtgttgttaaattttaccttctgaattcaagagttctggtttcatctttccagtaccacatccctaatcgtaatcccaactgctgtaaaacgaaatgattgcagcaaaaataattaaaagctcaatttacaatccatatgccacaataaacctttaacaataattcctacttactaacacatcttttaagtaataagaaggaaacaaaaaacaatggttcctactagtccctctttacactttcagtaagagtgtagaatcctaaagcgttaaacttgaagctaggattttatcgctttgattgattttaggtgtggcttcagtagaacggcaggaaggagggagagggagaaaggaagggaggaaagtaggaaaagaggaaagaagcagcggaggaagggaagggcgaaagataggaaggaaattgggactacatatagctcatcatagcaatctaccaattaattgaaattcagacaataaactgatacccaggacagcctcagctgtctggttctggagacttccgggctccaacactgagcctgccctttacaggcagtggcaaaaagttaagtacacccttttcaccgtggaagctagcacccaccagcctttctatccagagcggggctgcttcccccgcagtaggtctccctattttgcaaccaaccaattagaggtggtgaggtgggatttcgtaaatatctaactacctgcgcagggagccagaattcaattctgaccatctgtcaaatacaccagagttttttttttttctaggcaaatatggccaggtgtctttgagaaccgccagcccggggcgaaggcgacgacccgcctctggaggagggcgaggggcgcggcgccggttgggggcagcagggcccgccttgcgcccagcccgggtatgggggcgaccaaggctgcacttacatccatcaagtaaggggtctgcccacctaaccgcttcctcctcgcataaaactcgggcacccggtacatggcctcgccctggaagccatacggcgtcgccgaggataccgcccgcaggcgcctgcacacggctgcccggggcgcggagcggggcggggcgtcgcttccgtcctaggccgcgcgggctgcggccgcacccaggcttctccagcgatttctaaagcccagcctggtgccccgtttcccagtcttaaaagccgtggcgacgtattggcctatccattgtaaagccgcccagggcataattcttcatggcattccaaccttgaacttcatgaagttattcactttactgttttaattggagtaactacattcagtcctatagggaagaaagatccatttcttcctaactttcatgattagcactattattaagttcaaatccaggatgaacctaggttgatggggagagcagggttgaggtggggaagcagggtagcctcgtggaagagaacatgggtacggaaataaggttttcataacagttgtgctgcttaacaagctgtggaatctaggacaagactattctgatctttcttctgaaaacaccaaatcaggggttatgtggatttttggagtggtgtgtgtaaagcaccagtcttaagtactcaaaattagtgttgctcaaaaacaaagaaacttgcttagtgtcaatgggtattcaattgatatttttacatttacacttttcaaatcatgtgtcttgtaattccttcttgcaacggagttgataatgctgattctggctgatttttttcctcccagctctaagtgagcaatgctagatgatgcaacatgattgggaatgcctagtatattcttttgtatcaccacagcttaattggtatgagaggctcataagtagtggatatatactcccattaacttttaagttatgtcagtagtcatcccactgcttcttctattcccaccctcccagtctcactacttggtaatacacaatcactggctacagtgattaaatagtaatcatctagattcatgttctgctcacttgagtccattctggcagctgttcagttggtccaggtatatggaaacccacttatatactggccgcaggcaaggctttcttactacaagatgacacgcttgaaaaggagactatcccatatgccaagagcttttcaccaagtagcgaacataacttggggtggacaggacagggaaataatgaggtaaagctcaagaaaagatgcagacagaccaaggaatctggatggcatccaatcactacataatcattaccgggaagaccacactagtggtcagtaaacctcttcagttcatcccaataatgtgtggagaagtgctgatagaaaacttaagatctatatatcttatcacagaataaacttaggctgtctaatgtacaaaacttaggtaaaaataaaagttgagagcccaaaacaataactacttaaaaattaaaggagaagttatttcgcatgtgatagagggacataatatttaaaggaaagtttcagtaactctgaagggacaatcttatacttctctatcactttaccccaaacaaaaggaggaagaaaagattgtttttacatctcttaatcattacagtacttattttaaaaagtgacccaccgatttcctaaggtacatttttcaccagttaggtttctttttaaatgacattagaaactcacaaccaaaactggaaatatgattgtccctgtaaagaagaataaacacaattgatgatatttagtagggatgaaggtaacttctaaatatttgataactccaagtgtcctgtgagggaatttttttttttcctaattaagagaaacttaaggtcatataactatctaagagcatataatatataactaaattgctggtcccagattttaggtccaagacattaactgaatataattcatgctaattctataaaaaagataatggacaggtttgtttttttgtttgtttgttttgagacggagtctcgctctgtcgccccggctggagtgcagtggcatgatctcggctcactgcaaactccgcctcccgggttcacgccattctgcctcagtctcctgagtagctgggactacagg

SEQ ID NO: 1241564 - DNA, 4001 bp, Homo sapiens
agcagtggccaggttcctgggattaagcaaggcaattatggctgagttaaagctaggatgggtaggacagggggatctgaggtggaaaaggccggtaagaagagggaatgcgccagcaatgtaaatgccttcgactgggtgggctacttcacatcatacctcctccatctccaaaaggttcttaaccttcttcaaccgcctaggcctgatggacctcctccctttctcccagagcccactcactgaagggaaggccaccatcatccccattcttttcctttttttataatccctccggtgccgtttcgggtctccttcctcctatattctgagttccttccactcacatccaaccagcttttaacacccggatctcccggagcttctttggttccgctcactccccccgcccccacgcccccacgcccccacgcccctgatttccccacccttttcgccctccccggcttgactcccttggaccgctcccgccaatcctggtctctcctactcctccccgccacatcgggtcgccccgcccccgggtgcctttggtgttttccgccgtcggccgcaggcgcctcgtctcagataaagtggatccagccctgcggctccggagctccgccactgcccgggtgctcgggcccacgtagagcatagtcacggccgccgttgttgtcccagaactcgtgacctgtcacacggtagcgcaaggcgaagagcagggcgcccccaatcggcggcgcgggcaggcggaaggcgaagcggtcggcgcgcggcgggggcggggccggaccggcgtaggcggctggcgcctcgcgttggctccgccagccgtcggcgctccagcgcacgctcacgcgcttctcgtaggccaggtccaccacgcgcgcgctcccggccacgcccagcgggcccgcctcggcgcgttccaggcagatgcgctgcgtcagcaagcgggcggcgaagccgggctcgctggccggctccagggcggcgcgcgcctcctgggggaaagaagaagcgggaggagggagcccagggcggagagaggggagagacagggggcggtgtcagagcaaggcactggaccaatcagaggccgaccccggcgtccaggccggcagagtgcggcccagctgccagggtggcctagagccactcgcagatggggtccccaaaagggatgggcaggcgcaagcccagggatgggatggagatgggtgctctttggcaaatccactcccacaagcccgctgcggccgactggaggaggtccccaggaggggaggtgcccccgccgcctacctggaggccgcgggcgcggggctggcagggcgcgaagtggcggagggcgtccctctgcaattggatctgcacgtggcggggcacccggggcagctcaccgggacggaagcggcgcacgacagccagctccaaccccagtgcgtcggcgaaacgcactctcttgcgggtgtctgggctacggctgcggggcgcccgggccccgccgcctccggctggtgcagatcgggcccggcggccccgactcggtgcgtgagcgcgggatcgggccccgaaccgcgtcccgccctcgcctggctcctcctccggctcctcctcgaggctgggccgctggctacggtagtaggcgcgctccgttagcgcggcgatgaagctcaggttgcggggaatgtcggtgcccgggggccgctcacgggacatggcagccccttccccggcggggccagctcgcagcgccaccgcgctcccctctcttcctctctcccgcccgccccgcgtcagcgcagaagtcgctgggtccgcttctgcagcccctcgctgctgtgtattctccttgcagacacctccaggatcctccacctcccgttgctttgcctctcctctgtgaccacccttccctccctctggccgtcagcttccagggtcttagactatcacatcctgcctcctgctagcggtctgctctgagcgtgcgctcaactgcactcaccctccggttccaaggccctcacggcccgggcgcccccgcccacagccctctgacaggtggctccgcttgtcttcgctgctgcaccagggggcggggactccacctttgcggtcccgagtgaagctactcaaccttttaaaaaaaacatccacggacgggacgcgatggctcacgcctcaaatcccagcactttgggaggccgaggtgggaggatcgcttgaagcctggagttcaagaccagcctgggcgtcatagtgagacccctgatctctacaataataataataataaaatgtaaaaagtcctcaacttttccggcacagcacaggaaaggttaacgccgggaagaaaaaataacctttcattttcttgcaggggaaggttcaaaacgcccagcatgtgactttatctttggggttcactgttttcttttctgaaacctaggctcctggtttgggcagggggtggtggtgcgtgcaaagaaggaaaggtcatgaaagctaggtagagtctttcaaatagaaggtgagaatatggcacccgaactgagaactgcaggaagacctagcttctagtgaccttgagcaagcaaggcataacttctctggagtcagtgttctcgtgtgtgtgtgtgtgtgtgtgtgtgtgtgagtgtgagatggagtctcgctctgtcgcccaggctggagtgcagtggcgtgatctcggctcactgcaacttctgcctccccggttcaagcggttttcctgcctcagcctcctgagtagctgggattacaggcgtccaccaccacgcccggctaatttttgtatttttagtagacacggggtttcaccatcttggccaggctggtcttgaactcctgatctcaggtgatctgcccgcctcggcctcccaaagtgctgggattacaggtgtgagccacccctgaactcagagccatactctgaactcagtgttcttatctgtaaaaaagtggtggagttctgatttctaatccaagtgtaagccctttgagggcaggggctttgtctgattcatggtgagttttagtatatggtaggcactcaaattattgaatgaacaagcacccaacaactctcttggagttgggactgtggaattataggtccagtgggagcttccaagaagggcagagctggctttttcccctttcattttttttttttaacattagtgaaaaaaaaaagtgaagttgtttttagtttttttctaactttcctactgatctaatatagcacttacaatgtgctaggtactgttgtaagggttttacaaatactaacccatgtaatacaaccatcagaggaatagagactattatgtctagtttaaagatgagagaattgagggagagaggggagaggactcttacccagggtcacatagttaataattggggaggtgggattaggacctaaacagtttagctctagagtccacgctcttacccgcttggttatataagattaaaacatttaacaataatagttaacatcctcagagtgttaaaagagggaatattagagtagaaatgaagtctctaaatttaaagcagcaggatagtttaactgtaaaaccacaagtgactaagttgaaaataaaccatgagacacatgttatcttattattatacaattcattcctgtttacatgcattcgcactagtattgactgtagcaatactagttagctaggactcatttttaaagcaatattgactttttaaattttacacgtatatagaatgcatggatgtattctcttcgtatcattatatgtgatacaatatatacaatgtatatattgtatatgcatatacaatataatatatataatgcatataaattaatgtctaataaatcatacattaatttatgttacaatcaagctggcccaggagtttgagatcagtctgggcaacataatgagatccctatctctataaaaaatgaatttaac

SEQ ID NO: 1241565 - DNA, 4001 bp, Homo sapiens
ggctcactgcaagctccgcctctcgggttgaaggtattctcctgcctcaacctctggagtagctgggactataggcgcccgccaccactaccgggtaatttttttgtatttttagtagagacggggtttcaccgtgttagccaggatggtctcgatctgctgacctcgtgatccgcccgcctcggcctcccaaagtgctgggattacaggactgagcgaccgcgcccggccgactgcttctcctttcttaatgagatatatattaaaatacaagttcatcagcttaaagtaagaagcgggtaggacagactgcaggtgtaggagatgagaagaatagtgtaaaagagtgttgcctgggtgcggcggctcacgtctgtaatagcaacactttgggaggtggaggtaggaagactgcctgaggccaggaattcgagaccagcccaggcaacatagcaagacctcatctccactaaaaataaaaaattagccgggtgtggtggcgtgtgcctgtacttctagctgctcaagaggctggggtgggaagatcccttgagcccaggaaatcgaggttgcagcaatacttcactgcgccgctgcactccagcctgggcaacacagggagatcctgtatcggaaaaaaaaaagtgtatttaggaaaacacagattggcagtttgggagatgaaaattgaatgtaggagaatgaacgtccaggaaaacacggtagacatgaccaaaacaccttctttagattagtggacttgtattaaaagtgagataactcggcggggcgcggtgactcacgtctgtaattccagcactttgggaggccgaggtgggcgaatcacaaggtcaggagtttgagaccagcctggccaatatggcgaaaccccgtctctactagaaatacaaaaattaaccggccgtggttgcgcgcgcttatagttccagctactccagaggctgaggcagaagaaccgcttgaacccgggaggcagaggttgcagtgagcggagatgctgccactgcactccagccagcctgggcgacagagcaagagactccgtctcaaaaaaaaaagtgagacaactcaccaaggttctgtttttctccagccactttcaacagcccttagtgcgggtgtggaataggaaaggtagatttaacgaggttagttaataagcaatgtgaaggagaaaaataaaaggaaaaatggattatgaaatataaaatggattacgagggaagcaaaaagcgtgacagtaaaaaggcaggaggacaattataggtcctggtggggttcaggcgttgttggagccggggttccaagttattcttcacaagtttagattaagaccatggaagtcagtgactaaagctaagtttttcgttcctctagattctgccccaggaaagtttgggtcaaacctatcgggatccttaaaccacattccactccgcctcctttgtcgggaggtttcacagaagcggaaaaggcggctcccccttgctcctcctccccacctcccccctacctctaggagtttagggccgggccatcccaacgggctgcccctcccaaaactcactgtttggacaggtgttgggcgtcgctaggcgccgacgaagaacttctttccagtccatggccgacttccgcgcagcagcttctgcatttgctgtttcctacctgctccacccctaccagctcaggcgtcagcaccgccaggccccgtaaaggttaggaaggccgtccaaccaccatcttgatcgagggcggaagtcttggctaaagaggcaaaaacaattactgtcactgccgcggagaataccgctaccacgctgactgggggaaaaaactatgaaagagatggaaaatggttctccttcagaggcgacccaagctcaccaagccggattttaaaggccacgataagcccgcgttttcctttatcgtgtgcctttggcgcgtgcgcaccacgtgacccaggagttcattagttccggcttgagggaagcgccttctttcacaatttcttttcattgttcattgcggatatctggaagccttccaggtcccctgaatgtagtagacacttcagcagccgtctcctaccccttttgccactaaatgcttcaaaactgccttttttcctcgccgccgggccaggcggaacgcctaagtccgggtcagtctcgtccgtcggtcggggctggcgcggtgcatcgtgggcactgtagtttccgccgcgtttatggccgcgttaagtctgagtgccgctttgagttgttgaatgaagtgaacttcatttgtcagcgttcggtacgcagtctaggcagcgcccttcctgtacctctcttcctttcctgagtcgttggcgcagctgactcgccacctcctccctcctcgtccccccaccggaggagttttgcggtctgtagagagctatgcagggtgagggcccctagacttcggctttcgccgctgttggtggtaggctggagttgggggtccctggatacggttttggctttacaccccctttccagcaagcttcccgtgggaatctgttccttttcaggacagctgtgatccacgtgagtaaaactgggcgttccgtcttgtgctttttcctcaggttcatgaactggaatgtaagaggcaccagaggattcctgctctgtcccctggtttgcggcttgcgacgttggacatccccggattgttgtttaatagagaaaactcacctgccttcttgcttttaagtagccccaaaagcagaaccttgatttgtctgtaaggaagaaacacaaaccttttaaaaagttccacttcgactctgcaccgccgacccccaatctctttaattttgccatagaagaggggttttttcaacatctctctcactatctggtgctgatctcactgcataatgactttctatttgtttggtattcgaagctttccgaagctttggaagagcccataccttgggctaggcccagggcactcttatgtctcgctgtttctggcagaccgctgtggcatcaggaaccagcagaggttgttttctcttaaaacaatgtctccacagaataccaaagcaacgaatctgattgccaaggccagatatctcaggaaagatgagggcagtaataagcaagtttattctgttcctcatttttttttagctggagcagctaaggagagatcacagatgaattctcaaactgaagatcatgccttggcacctgtgaggaacactattcaactcccaacacaacctttgaattcagaggagtgggataaacttaaggaagatttaaaagaaaacaccggaaagaccagtttcgaaagttggatcatttcacagatggctggctgtcatagctctatagatgtggctaaatctctgctggcatgggtagcagccaaaaataatggtattgtaagttacgatttactggtcaagtatttgtatctctgtgtctttcatatgcagacatctgaagttattgatgtctttgaaattatgaaagccagatataagactttagaacctagaggttacagtcttctcatccggggattgatccattcagacagatggagagaagcattgttgctgttagaggacatcaaaaaagttataactccttcaaaaaagaactataatgactgtatccagggagctctccttcatcaagatgtaaacacagcttggaatttatatcaggaattgctaggtcatgatattgttcctatgttggaaactttaaaagctttctttgattttggaaaagacataaaggatgataactattcaaataaactactagatattctttcatatctaagaaataatcagctgtatccaggggagtcatttgcacacagtataaaaacatggtttgagaggtaattttggtttttttatatgtatgtttttattctttaattttttttttttttgagacagggtcttgctctgttgcccagac

SEQ ID NO: 1241566 - DNA, 4001 bp, Homo sapiens
ggagatgaccctaaagctaaaagcaacatagcaacaccatagactgcataagaccaatctatacaggagggttgctgggtttgaggtgtgggaaatgaacttaaaaataccagatccaggatgggcacggtggctcaggcctgtaatcccagcaccttaggaggccaaggtgggcgggtcacgaggacaggagttcaagaccggcctgaccaacctggtgaaaccccgtctctaataaaaatacaaaaattagccgggcgtggtagcgggtgcctgtaatcccagctactcaggaggctgaggcaggagaattgcttgaactcgggaggcagaggttgcagtgagccaagatcgcgccactgcactccagcctgggtgacagagtgagactctattaaaaaaaaaaaaaaatttgttgggtgtggtggcatgttcctgtggtcccagctacttgggaggctgaggtaagaggatcacttgagcctgggcggcaaggggtagcagtgagcagagattgcgccactgcactccagcctgcgtgacaaagtgagaccccgtctcaaaaaaataaaaaacaaaaaaaaccccaaaagacccacaaacaaaccccataggcaagcacaattttcataaaatcattaatagttttccaaagcaaaacagtaaatacctaaacaactaaaattgagggttataaaagacaccacaaaaaaaaaacctcacatagggaaacattttagaagattctaggctttatcactctcggtttttctacctgaagttaaaagctgtgtataaaatacaaagtcaatatttgatgacagttacctctgattctactgtgtcttgtccttcttttgaactttttccactcttccctgcttttggtgattcctggtaaacatcaagcaaagtcaattagtcttctcactttttagacaggtaaacatcagataagccaaatgcagttttaaaagtgatttatacaactacagcttctgatatttttaattcataccattaggaaattctatatcataccgtttaggattccaacagtgcaatgccccccaacccccattcagattcttttcgttttatctgcatttgaggttgaaaacttcaagcagaaaacagataaatccaattttatacagtgcttctggcattttgagatccacatcacatccctttctaccctcccaccctaaaccctatgagtgaggatttctggggtgataatgaaacgctacagagctccacctgaagcagaaacatacccgcccccccgaatgcaaacgcagcacccttgctcgcagccctcaccgccgccgccacccaggataataatagtgttcgagagccccagagcgtccctccggggcggcagagaattccttaccagctctcagcggggtcccttctcgctccctttcccccgtacaggggtccctccccaggcgtctacagcccccatccctgaagctcctttccgggagcctgcgaggctgcgaaccccctcggcggccgcacctgcccgcccaagcccacggcgcgctgtcggaaacgggcgcccctccgaccccctccccgggccgcgccctccctccacgcccagccccggcccatcacgaaggtcccagcggcccgggcctgcgccccgcggctccggcgcgatccccgggctccccgcccccaccgggcatgaggccgagagaagcccggggatgcctggctcggccgccctcggggacgcgaagcccgcggcgtcaggcggggaactgagccggggcccgggcgcaggaccccggtgccgtcgcgccctcccccggcagtccctccctgctccctccgtcccgcggccgggcccggactcactttctccttcttgtttttattcggcatggctggagcgggccgccgccgccgccgccgcccctgccgccgcctgcccccgcagcagcagcgcccccgccccggccgtcgcgcccccgcggccgccgccgccgccgccgcccggggactgagtctttcgcttgctctcgcttccccttttccagactcccagaggctgcggcagccacggcggcggcggcggcggcggcggcggcagcggcggcgtctctccgcccctcccccggccggcccgccccgcccctctcctcccaccccccggccggccgccccgccccgcccgccgctcgccccacccccgcgcccggccccgccccgctgcactcaacagcgccctgccattggtcgacgcgcccccacgtaccctaacgctccccgctccccccaccctctccgcgcgacccgttcacgcccccgccctccgtcccgagtcgctgcgagccggcctcaggcaggccgcggcctcctggcgcggggctgaccgctgagcagagctgagccgactcaggggagggagcatgtggctgcgactgcggtgacagggccgtggcccgctgtggaggcgcaagacagagcgtgagacgtaggaaatgcacatttgaaatgtatggcaacaacttctgcagccggcgaaacgcgaaccgtggcctcttggccttgccccctcaccgccgcggctctcgttgcagtcaagagtgcctggcacgctttgcactgaggcgcacggggaggcccgggaaccgagcgagcggcagtttcgcgggacaccgctgggccccgcctcccctcccttccctcccctccccttccctcctctccctccactcccctcccctccgtcccctcccctcgaccaccccgtcccctgccctccccttctctcgaccagcccgtcccctgccctcccctcccctcccctcgaccagcccgtcccctcccctcctcttccctcggccagcccctcccctcggccagcccttcccctcgaccaacccctctcctcgaccggcccctcccctcgaccggcccctccccttggccgggccctccccttgaccggcccctcccctcgaccggcccctcccctcggccggccccttccctcggccagcccctcccctcgaccagcccctcccctcgaccagcccctcccctcaccagctcagctttccgcagctcctcccgcgaggtcccgcccatccgacagcccgcccctccctggttggtcccgccctccgcagtttctcccgcaaggtcccgcctacccgacagtcccgtcctttcctggttggtcccgccctccgcagcttttgccgcgaggtcccacccacccgacagccccgcccctctccagtcggccccgccctccgcagctccttccgcgaggtcacgcccacatgcgcagcccctctcctccggcgtcggccccgcccaccgaggcgaggcctcaaagacttggtggccgctgcgccaataggattttatttttattctttaatttggcttgatcataaatggtgaggaaacctctgcatgactgggagtcacctgatttctctcagcttgttaatagctgtgaggagagggtgtccaagggaaaaacgttaacttttcaatacaatacttccgcggtccacctcgtgcccaaaactattgaagacgctaaggacaggcgtcccagattgcagaaatgcattaggtagtaagactctaggagcgtacggatttcacgtgcgagaggcattggtgcttcacctgtgatgatgaaggagctgcatcttaactggcagcttaaaaatcatcgcgttctcttagcccccggagttttgttcttggaagtttccaggcaaagcattttccattattctcagcagttctgcaatgagaaagctgaaagacggggtaagaaaaaaaagatctaaagggaggaatgttgtgggaggtccagaaagtaagttctgtctgcgggtatctgaatgtctgccggctcttagacgaatatctgtaggtaagcaggacagtctcaactatttgtgcggaataagtggcttttttattaataatttaagtgggttaatggtgtctcc

SEQ ID NO: 1241567 - DNA, 4001 bp, Homo sapiens
aaaaactgagtagtatattaggcatctaataaaaaccagaaaacacaaaccaaaaagatttatgttatttataagtggataccttaaaagtataaaaatttacattttatatgcagttaatttatcttactgctaactagttcgtttttaagaactaacttggccaggtacagtggctcttacctgtaatcttagcactttgggaggcggaggtgggaggatcgcttgagcccaggagttcaagaccaaccagggcaacatggcaaaaccccatctctacaaaaaatattaaaaaattagctgggcatggtggtgcgtgcctgaagtctcagctactcaagaaactgaggtgggagaatcacctgagctcgggaggtggaggctgcagtgagctgtgatcataccactgtactccagcctgggtgacaagagtgagaccctgtctcccaaaaaacaaacaaaagctatctaacttaaatccaaacaattacattttgttcttgcccatttggttcttgcagctaaaatacctgaatgttacctgtaggcaacctttgctttttactgggtgcactacaaaaacaataaattcacagcctgtcctacaatttggtcattgaatgctgatttccaccttcatgaaagatagtttggagagaaaagcaccacccattttattccagtagattgagtctgcatgtgcctgggtacaccctaggatctgaaaagtctggcctggcgttttagtcatagagattattagtcacctagaaatcttgctcccacccttccttaaaagagattctgagaaacagttttgttggggcacagctctgatactataaattctaaagtgatctgatgaagcttaaaatcatttttctatttcacccaattatgaccaaaaaaaaattcatatatcttaaaataccaagaataagtaggctactaccctgatgcctgtagttcaatataaccgctattaattactagagtagttgtgcttttaggctaagttttgaaaccaaaatatgcataaaaagaagcaaactaattattaaaacagtgatctctatataccttgaaaacttgttgccatttaaaattttaaaagccaactggcaacacagagcctatttaaatgcaaaatatttcctaatattccacgaaaacgctaacatttcaaaaatgatgacccacgatagatttcaatatttcaaagtggagcatatttctctctcaggctccacggcaagaatgaaaacaatccttttaaaggaagttcttttccaatcaattgtgcatattttctgactgcaattcatctttaattctgagatgtgtcctcgacaaaacctttgcagcattaagccacacatatgtaacagaaactctgcgtacgaacaacttggccaggcgcgacaggcccgcctctccttcctacccccacccaataccttccctgggcagtgacttcacatcctttgacatcagcacagctttgaaagggggatgggagagcgagcagaaagcagaaaaaccagctttgaactatgcatgcaaggcctctttcaagcctcaaattctgtaagtagttcgtaaaatgccaaactgcagtgacacacccaacctcctctggttaagtctgcagcgaaatggggtgaattctgctagaaaggacttcctgcttttcttatctgaagcacaatagccatttattaactacccacggaaggttccgattcagtgaaacacacaataacttacctcgaatatggagaaggaccacgggctggaaaggcccattggagttggccgcatccaccaccatcctgctgcccgctttattacatgtcaacatctagacttcagcgggaaaggcaatgggctccttaaggcaagaaaccagcctccattttagtttaaaaaaaaaaagacaaactgaagctctctgcagctggagggaactggctggttcgtgatgtcagcaggcatgaagctcgctgattggccggaagctgcaacttaaaatgacactaaaaaaactgcaaacggaaagagcgttctgtttggctgtcagtgtgccttaaaagctgggatattttccggctttttgcagccttcgtttctcagtaacttttaggcaaagatcccatctcttagggggaatactggaggccacaaccttggccagactgtaaacaaatgatttcgagggagccaccaaaaaaaaaaaaaaaaaaaaaaaaaagtgtgtgtatatgtctgtgtgaactttagcatttcccagtgagggatcccaaattcattttatacccacctgtgcaacttcgacttgctagttctaattaatatctgcatcttaggtaggattctggcaacccagtgttttttttttgttttttttttttaacaaatggttaagcaaatattacacaattctaatccattagtttggactcttattcaacttcccttaccaataggatgagttattaacttatgatcccaaacactttttttcttgagatctattttttccctgaaaaaattaagcttaaaaacttacgtagaaaatgaaagccgctttataaattcgatagctagaaagtgacacaaattgaaatatttatatcacctggccgtgggagtaagaaagcaaaaaaatgaaatggagcatgtttatttttgtattgcaaatatgctgacatattaaataccttttaagttttagatattttgtttaaatttaaaattaaagatattttcacttatttttatggggctattaaaagctgctattcagatctaaattttctatcttcaaatacagttaatgtaaaaagctattccaaggagaaaaacattatttctgaattggatggagtattgcaggatcccatgagggggtgcggtgagatgattccctacaaaaatgagtgttattagtagttccaaatgaaaacgaactataagaaaagcctcttcggcaggtggaactgaaaaaaattcctcctttcttcacaccaacaaggaagtttgtccaaaccatggctcctcatttttaatagtttctcacacaattcccctgctctcttccccccacttgtgaaggatacaaaagccctttagttcctaaacataattcacagtagagtaagaaacacctgaaatacagctagggctcgcagttccagctgagggtttagcgccagatacattcaatgagtaagggaactgctaccgcccttcagggctgctaatcaagtcctccctcacaagaatgtagcttttattgtgtgtatcaatagcaactaaaataaatagataaaagcaaaccaaatcccacccttccccctctttccccagagctgacagacagtgctggattccatggccggccaggagatgatgtgatttctaacacaagtgggcagtgggcacgcaccacctgagcaggctgccggcctcacacctgctctgactttgctgctatctgaacagcagaattaattttttttttaaagagcacgtgctttcagttgggtaagaggaatttagatcttagctgccctcctgcctctaagccttcactgctgacctgtgggttgtctgtctggaggggatggccaccgatcaccaacgaccactaggaagcagtgttgatgactctcactgccccacaccccagcctcctcctcctcctcctcctctgagtgatgccagatgaactcagacacaattaggaacgaggcgttcaggggctcaggaaggagcccaggagcagatgcttattgaagatctgggctttaaggagacagagacctgccctccaatgatttaatatttcatacgagataagatgaaaaaatgtgcctatcctacaactgtgctgatgagtgggaatacagaaataagggggaaaggctcctaagagctttatatataatatacggaataggagtcaaagaaacagtgaagacactttttgatgtattttt

SEQ ID NO: 1241568 - DNA, 4001 bp, Homo sapiens
tagaccttgaagttcatcatcaaataccaattttcattccatcaaacttacggaactgaatagcacttttgaattgtttaaccctctcgagttattaaaatgaaggctatttcctgaaagtaacaagcgttaagcttaatttcattcaccaaattaaacagatgccatcatttccatggcactgaggcttcatgcaagactaatggcagactcggatagaaagaatgcatatgggggaaatgctgaaatgcaattactcacctgtcattccaatagacaagacaagtggtttttaacttctaaataaaacagtaagggaatttcttcctgaacacgtgagaataaaaagttacctggattacgtggattttgacaatgtaaaaataacaaaaacattttaaaacacatgcacacatatgatgttgacgtttggaatttggaagtcttctttggttttctttaaaaaaaaaaaagtttttaaaaatctacctaatttagccttaatataatgtgatggattcaaaatagaatcacaaactatgaatgactatagatgttaagatcactttaaaatatcaaaatgactgcatcagccaaaagctccacatcttatttgtacgttgtaaatttaggggccgattttccattcgggtatgtgaattatttagacttcactctaactctaacactacaacatttcagtaaatcctcttcctccatcactcttttcgtctcttctttattccttatctctcatctctacagacgatatataggtagcttttaaaaaaatcatttaccccttatgcccgaggcccagaataaacgtcaaggatcgcaaccctgaagcactgcaaaactgaacgtaaggtaacagcgggtccgtgcaaagcccagggaaacaggtttcgccctgggccagggctcccgaagctttatcatcctctaatcagcaggcatggggcatttccatggctcaggataatccaaagggggtaaggggaagtagggaaagacagggaaggggtttgtctgtggggatgcttacatactccctttgctcctaacccacaccccaagccctggagacgataagctgctagagaatcctcctcacaccaaacccctctttattccccgcccccgccagtggataaaggggggcaagaaaacgcctccaatcccagaaggtggagaaaaaggggggagggggcagagtgaatgagaggtatcatcagaagcatttgtaggtaaatcagacaagtgggacgggcgctcccgctcccgcaccccaccccaccgcacccctcgcctgcccggccaggccttcccaaggccggtgccccataggttccccaggaggaccgggaggaagaagggaagcgggcgagccgcggtgctggagggactaagttaccttgaagcttctggggaagaatccaaagatgatctgtggcttggaggggcgggagacgggcgaggtggccgcagcgggggcgggcggcgggaccgggacgtgcagggggaggtccgggcagctgcggggagcctggggcgacggctgtccggtacggggtccctccggttccgcggcggcggagcctctaggcctcacggccggacccgaacctcagcgttccggtggcggcggcggcctcacgatcctcccccgcgggcccgtcccatcaaatcggcaccgaccccgttgcggctccgccggtggctcctcgctcacattcctggcgggcggcgcctcagctcgttgccccggacccggcggcggcggcgacgacgtggggagggggggaagggagggaggaagactggatctgcagcggcagcaagagaaggggacagaataaggaggaggagccgcaggagctggagccgccgctgccagagccacctttcgctacccgcggtgggtcccagtcaatgcccctttctctctcctattgtcaatatcaccgggcggctgagtccatggcacacgcgcaaccgaaccttctggccagcagcgcccgcctccggcgcccgcccactggagacttcaaacgggaagcgaggcctcattggccagtatccgccttcactcccctgacagcatgttcggctgagacctgatcagggattggcggcaggagggcggagaaacgggagggtgggaagagagaaggtcgaggattgggccgaagcttgaggaacccggatgcagccgcgatctcgggcggtgcagccgccgcttccgcccggcagtggggcaagctgaagtgagaagccgctgggcctgagaggagctctttaattccgggaggtgtgcgactagcggatcagcgggctggctttccgtgctgtgcggagcctttgggcggcggtcgtcttggaccggaggattccaagggctcgggtcgtctaagggtcggggagccccggagacttgatcccgccctgcagctagtgtggcccctcagggtttggggagtcccactctggacgggaccctgtgatgcgtaggcaggaataagatcccccgcccgtgccggtgtgccactgcttgtgtaaatgggccccttgaaacccccagcagtcgctctccgctgaaccttcttcgaattttctctcacctcatctccttttccttaaacgtctgttttgaatatcagacccctgtagcgttgaagccagcgctcgtttaattaatgcaggtgggaacgctgtcgccacagtttgcagtctattcattcagaataacccgccagtcagccgactgctcagagctcggaaagacccagctccaaactaggagtttcgagattttaattggcaagttggacccgaaagagttaatggagaagactacttaaatctatctagaacaagtgatgagatatttggagatgtgtttgcatgcttggtgaatgcagacggccaaatggtacatttccagataatattcttggattaatgtatttgaatgcaccctacgtacattttttgagaggaaaaaaggaagaaagaaattattaatgctaactacaaacgtcagagtaccagttgttcaaaacttagaaattggggggggggacaaaaaaattaacattcttattttctcaactcagagataaccacttacagtatttgcatacttccttttagtattttttctctttatgttaataatgtgtgtcgatctgtagcctagttttttccctcagcattatatcatcttttcgatacggttagggaatagagctatatataaataaaactatatgtaccatatgtacaagtgacaacgaaaaatgcatttgcatttctcctgtttgtgttgttaaacactagagttttgaaattttctttgcacactcccagaaatggctcttgagtggaaaaataattttgtgccatgaaagataaaaatattcctgctttgaactgaaatggaaaacgaaaagatgactcttagatggaagcagtctccccctactgactccagatgattggccactgtatggctagtgcccacttttgccgtgataaagttcatcaccactaagtatgaactatagaataccagcagtctagttcctaccctcaagaaccttaaattttccatatctcaatatcctgtacagtcttcatgaaagttcagtgtcccagccaaggacctgttttcttcaatctttgattgagggtaaattcagaattaaaaccaaggaagattttgaagccaattcaatttcccttggcaacagttgaactgttaaaagcatagtgcacgtttgaaattctcacagctgttgcttagaacatgtcatagagtggggattttgcttgcaaattatggatctctataaagacaattcatttcaaagtcatttcactttctataaaatggctgagcaactgaaatgagcaggttttttaaaatggaaacatccttgcctatgtgagaaattgttctctggaccagtaatttctcccatgtatcccagggattt

SEQ ID NO: 1241569 - DNA, 4001 bp, Homo sapiens
aggagatggagaccatcctggctaacatgctgaaaccccgtctctactaaaaatacaaaaaaattagccgggcatggtggcgggcgcctgtagtcccagctactcaggaggctgaggcaggagaatggcgtgaacccgggaggcggaccttgcagtgagccgagactgcgccactgcactccagcctgggcgacagagcaagactccgtctcaaaaaagaaaaaagtaataataataataacaaaaagataatccaaaagtaggcaaaggatttgaatagacatttctccaaagaagatacacaaatggccagtaagaacatgcaaagatgttcaacatcatcagccatccaggaaatgcaaatcacacccaataagatgactatcatcaaaaagagagaaaataatacgtgttggcaaagatgtagagaaattaaatccctcataccttcctggtggggatataaaatggtggagctgctgtggaaaacagtttggcaatatctcagaaagttaaaacagagttaccaaatgacccagcaatcccactcccaggtataatatttacccaaggtaactgaaagtatgtccactaaaattgtacatgaatgttcataacagcattatccataatagccaaaaagcagaaacaacccaaatgttcatcaactgataaatggatttttaaaatgtggcacaatggaatattattcagccacaaaaaggaatgaagtgctgacacatgcgacaacatggaggaaccttgagaatctggcctcaagtgatcccctacctcagcctcccaaagtgctgaggttacaggtgtgagccacggtgcccagcctgggacaagagtattaaatgcacccattacctcctatcccaggccactgctgcagggggcacaagggaggatctcagtagcctgggtaagtagtgagcactaaaggaccatcagtgggccttcaaaaactcacaagttgccttacagaaaggatatggggccttaaaggcctagaagcagcagtgagggaataccaactgcctacctgctgtgagtacaaggccccttctaaagacctctctctttcctggcatccaactaccataactgttaattaccttgctcctggattaatctcagaagggcagtgtgggttccttttagaagccatgagataaacatggcacttctcccttggtacgattaactttactaaaaataccagcgtttagaacgaaaagaaacaaatagattatgaaatgcaaaaatctctgaatttttaaagtaaaaaaaaaaaacaagacttaaaaataactgcagcaagggtaattctcttttttttttttttttttttttgagacggagtcttgttctgtcgcccaggctggagtgcagtggtgtgatctcagctcactgcaagctccgcctcccaggttcacaccattctcctgcctcagcctgccaagtagctgggactacaggcgcccgccaccactcggccaattttttgtattttttagtagagacggggtttcaccatgttagccaggatggtctccatctcctgaccttgtgatccgcccacctcggcctcccaaagtgctgggattacaggcgtgagccaccgcaaccggccccagcaagggtaattctcttatgcctaggggcacttgattagataagtttgagaagcctgaccctagggatttatcataaacccacagaactcttttcttccggagcctcagtttgtatgagtcccctttgtagagatccagcttgagtggcacctaatgcctttgggatccaatgtaatagcctgatccaagcccataaaccctcactccaccctccttcccacccccacacacacttctacacacacgagtgttctcttccagcccctgcagctctcaggccttcattaccaagtgtgtgctcttccctcctcgcacacctcacacacctctttggagccactatgcacacaaatgctttcctctctaaaccacgcggctcacttgtttaccccaatgctatggcaaccccctccctctgcctgtcactctttgttctgtcactctcacaaaacaactgcatatattcgctagtttcatagggaccacaatggcacataaaactgtgtcctgggtgcccatttaagcccttctggtatcattttcctgaattcttcagaaaatatgccttctatatatattagctaacatttcctgagcatctacaataagccttttccatatatcactgcattgaatccttacaactctaaggtatgagccctctcaatattcccctttttaccaccaaggaaactgaggcatagagagattaaataacttaatctaagatcactccaacagtaaatggcaaaactggactgaagtcctagcttgtcttccccaaaaggggatgttcttaacccttcctctcgtaagaagccagagtccagaagagacccacaatcctgactgtcattatcagcaccctctttccactaaatatttaaagctctctcttgctttgctttccagctttctaattcaaccagctttggggcagcaaaacataaatttccacttctggaatgggagacatctccagtgaaagttaccttaaggtccagaagaagccaggcagagaaatcacatgtctcagcttttccactgcaaaatttctattttatacttgaagaatatgattctaatcaagtacaagttaatctgcacctgaacatcttcaggtccattaatataaaatcagtaactttttcaaatcaaaggtttcaagaaattagatttatctggttctttagccttcaaagtctgagtcaaataactcttacacagactttgctgcttaaaatccttcacttcttctctaggcctgtgtagactgcaaatatttccattacagttgcttttgggactcataccccagttgtatcttagtctatgacatgcgctataatttaaaaatcatagaattacctttattttaaaatatcctttttttttttttttttttttttttgaaacagggtcttgctctatcacccaggctggagtgcagtggcgcgatctcagctcactgcaacttctgcctccaggttcaagcgattctcgtgccttggcctcccaagtagctgggattacagatacgcaccaccacacccagctaatttttgtatttttagtagagaaggggttttgccatgttggccaggctggtttcgaactcctgacctcaagtgatccacccgccttggcctcccaaagtgctgggattacaggcctcgtgagtcgctgtgccaggcctaattttaaatattctgtgcatcagatatttcactaaaccagactgcccctcctcctactcattctcatctcatctcattattccaaatgttagaggtttgactatatgttacaaacacacacctgcaaatggagtcaatgcctgtggactaacagaacccatattcaaagcctgagaatcagctatgggaaagccatctgagagacaaattatacttgaaggacagcaactctatccctgagttagctaacgctcagcagaagtctggcccactgggacctaagcaatttggtacgtagatctgagtataataaggtttgggagcttgcaggaatttcaagagtacacaaagaaggcatcaacaccactacctgagcatccatgcctaagtaaaaagtgtttgctccatgtgccaccctcttcaaaaaaacaaacatatgaatactcatatttatgtaaaccataagcatacaatgattatatatttaaatccatgaagatgggtatttataaagaaaaatgaccataaagtcatcaaattaaaattctgttggcaaaaagggataggatgaaactttccttaaatatcacaacaccggtccagctgagcatcaacgaataggagaaaaccagctgcctccagcccaacaacaatgggacac

SEQ ID NO: 1241570 - DNA, 4001 bp, Homo sapiens
tctcaaagtcataagtccatagccaaatctaatttataatatagttaagtactatgcacacaaaagtactctgttcaagtggctaagtaaatctgaacataacgcgaacatacattttagaaagcattcatctctgctgcacagggaaaaaagaagagcaatttcacagaaagactaggaaatacctgagcagataaacagccctttcaatatcactgaggtcttcatcgactgtcaatctttctatttcttccggtgtctgtcaagggtaaaatacacatttatgcaccacaaatattggttcagtcttgccccccaacctcccagtgaccctctatgaggataaacgaatgaaaaagtttcacaattaagcattaacaatgaaaactaatcaaggagctgaggataccaggcgacatcaatcacggaggtctctaattgggtggtttggggagtttggggagggggctgtatttttctgtttttatccttctagctcctggactgcagcttgaaaatcacatcgtggcttcagaaccttggctgaaatccatttcatacgcatgttataaaacgaatacacacactttttatctctaatacttcaaggctatttctccagcattttccaccccaagaaatgctaaaagggagatggatgaagactgcagccgagtaggcatgaaaaggacaagatctggagtgggggagggaaggaaataaactccggggctggaaaaaaaccagagatttgagatattgcggcaggtgggagtgagaggcgctaaggcagctaattaagcaatggccaggggaaaggggtccggtccgtaaactaggtttgctggcgctaaaggttggagccgccgggaggaagatgactctgcggggtgggagagccagtaggggtggggggagcaagctgaagcttgaccccctcaaggggattggggagctgggtcccagctacagtcctggaggggatgggaggaaaggatgagcggtgactcaggatggcggcaaagggtcgcgagggcttgtagacagggaccaggacgacactgagaaagagtgctggctgggaagcgaggggaggccgggctacctcgagggcagaaggacccgagcttgatctgacttgggctgggggtgaggggacgggacgcggggtggtgtctccgggagaggtggggggaggagttgggaatgtgtggaccgatgggtgggcctggggccagaacccgggcggcgtcagcggaccagaggttggggagcccaggagaggaccggggagaagtgggctgcggcctcgaggggcagctcctttggggggggggggcggaaggaagggggtccgcgacggaggacgctggggctgccccgagggctggagctcggccgttcctgggggtgggccggggggattcggacgcctcaggaggggcaagggccgcggggctggcgccggtccggggctggggcagggacccgtcccttggggatgggggtccagactagagaggacccggtccgctctgaggaagggtccgagagggaactggcttagggcgacacggcaagaggggtggaggaggaggggccggcccgactgagagggtcccggcggcccggaggaggggagggtggtggcgtggggcagagatcagcgcgggaccgcgcggggcaggcggccggacgccgtgagggcaggtcctctccccggggcgcaccttgaggctccggcggaccggcctctcgatgatggtgagctcctgcaggtcctccatgtaaccgaacaggctgttctgactgaaatccatcgcggcggcgggcggcggcggatgcatggaccgccgggcactctcgccgcccgggccggagcggccccgggatgccggacgccctcagccccgcggccgcccaccagcaggactttctccggctcttggccgctggagccgagcgtgaggctgccaggcggcgggagcaagagcacggcccggcgagggggcggggcgggcccggcgaggaggcggggcgaggctcgcgggcgggctgcgggggcggggccaggggcgggggcccgccaccttgcccgcctcggccccgccccttcccgggcgccgcgcgcaagaggccggacgcaactgccgcgcaacgacccggcggccccgccacccttctgcgcccgctcctcgccgttctcctaaacccccgtccgcccccaaccaagtgtgccccaccccacagcgcgtgcgcagagccttttgcctcccgcagccggctgagggcgggcgctgggggcgggcgctggggaggggggctggggggcgggggctggggggcggggaggctgagccaatgagagcggaagcagaggagagggagctggctgggctgcggctgtacctgctgacttaactgtccagttattcccaggaccgcccaccccagctggcgggccgtgaacccagagaccccccccagcacaactccagccctgaggggagcgctgagtgcccaaaataagcagttaggacgcggggtgcccggctgacgggggagggggctgtgggaatacagccctggaggggctggcttttggtcaagggcagcattcggaaaaggcctcccagagaagagtcacttaaactgaatcttagcgaccgataaggctttcccaagagaaataataaaagcaagccggtccggggttgaagcctgggtgtgtttggttgtgtttgaaaagtgccgtcgaagtacagctcggggctcgggcaccgagggcgtggcgaggtgggtggaaggaagaggacctaggtccttgatgaagaaaagccctgctctggacagccacgctgagtcccttgcacttggttctgttaagaatgggacgagatggaagggggattggggcgatttttttggaccttggggacaagttcgtactgttcagctcgtcagtcagcaaggcccttttcttttttgtttttattttttactcgttccttctccacacccattcttctacccgccatatgcaccctctcctctattaaggtatgtcccagttcatgcaccgtatacagcctcaaaagatacatggtttgtgtctgtttttaacatatatgaacggcattgtgatgagaactcattctgttccttgtttttctctcagtgtcttagagatctatccatgtgacactatacaacaagagttcattaataatgactaataataatatttgatttgtgtgtctatcatattctacttatcaattcctcaaataacggctagttaggtcgccagcagttccttactaccacagaccatgctggaatggatgttagacgtgtcccttacagaacataagaaattgagtcgctgggtcatgaagtccacagtgtttggtttcactctgtcatgttggcctccagatggctttgccattcacacccaccaatggcacatgaaggtaggaaggtacccgtttcccattttatatgctaacatttggtattatccgatgtcctaatttatgtcaatctgaaatcagtaaagtagtatcacattgtaatttcgatttgtatttttttgattggtggtgttaaccatttttccatatacttaagaaccatcgagattgttttccttctgtgaattatctatttacatcctttacctattttctgctggattttattattttttctgaatgaattgaagcagttgagtttcttatatgttctaaatattaatcttttgtcagttttagaaaaacactgcaaatatttctctcaatctttcatgcatcctgtttgcttggtctttgctatgctgcaatggaggagaaatccttaattttcatttagcctaatgcatcaaattttagccttgtgcagtgtggtcttggggtcttgtttaagaatcttttcccacctgttagtcgcaaaatattctcctacattttcccctagttggcttcatacttttacctgtc

SEQ ID NO: 1241571 - DNA, 4001 bp, Homo sapiens
tcacccaggccatcatccaggcaggactgactgagcaagctctcggcagggccccatcatttggggcagctcatggacctcggtagactggcaagtggtcttgcccgcatccctttttttcctggtctgtcacccctactagtacagagcaaccatgtgaattgtccccaaaccccaaaatgccatcaggagcacatgaggctacaaataccccagagtggatcctcaatgcccaaaacaatgaaaatgtcctccagagcctgcagaaaaaatgtcaaacagaccacgcagtgataaacagagtacctggtcagccaggcagaagaacggcattgctattactcctatcaacaatggcagcaaccactactggttaatttcatcatggacctggcactgcactaagtaatccttacatgcatttatctcatcaagtacttacaatagtacagtcaggaagaagaaactaactctcagagagggtaagtgggttgcctaaagcctcccagctggtgagggacagagctgaagctcaaattccagagctgacatcgaagtccaccttgtcacctctccactgtaccagtgacgatgcgcattctgggggggactagggaccaccccattgaaacccctctctgaccctaagaggtaactccagttagtggctgcctggcctctgccctgggatttaagggacccagggtgagagattcaaccctgggcagtcctgacagatgggccaccatgcattatctgtctacatcctcaactctgatacctataagaaacacggctgccttccgtgttgaaaaccagtttaagaaagctaatttgaagttcatcagtggttctggtgagaaagaaataatatatatccttgggatcatttttctttgtaagtttgtttctttgctgaatttctgccctagaatgttatcattggaaggtattctctgagcccctttccattccaaggccagcccggtcctgcaggatttaggccacaatcgaagcctctctttggagtttcttatcttttcaggggtagggtataggggaccgtagcagcttttcttttcccaagctcttccgagaaccaatcagtggggtggctgcaagaggccagggtctcaggagggaagggacagctcgccccttacccaggaggccctcccagccagtgcgcagccggcgcgtctcacctgcacgaagccccagagcgggtggagcgcgcagtgcagcagcagcgaggaccagcagcagccacggcgcagcaccaagtcccggaggagcatctcggccagcggcgcccgctcctggggcgaactgtcaggagagcaaggctagggtcaggcggacaccgcgcaggcacttccgccgccgcgcaccaatatacctcccagcccgggtcggacgggcacgccccgcacccaggggcaccctagtaaaccaagcctgcacttacactccagcttacaccttcactgactcttcgtcagtcccagaattcacactcttcttacgcacatccccagagccccgcgtgtacactttagctccgcgcacagctccagaatactgcgtgcataccttggccccatggacacctccagaaacagccaagcacacttactgcgccccattaacccccatacaactcactctcactgtgagcacacttcaaacccggcgggcactactcacctgcgcgcacaaccacagaaacagccgtgcacacacactgatccccgtgcacacccaccgactcctgcctgcaccctcgctgaccctgcatgcacggccccaagaaatctcacgctgcctgcacccacactgcccagccggcctcattgcgcacactgcaacataggcacctccgtgcgctgcccctttgcacgcctccgcccagccccgatctcccgctcccgggcgtgggttcccccacgcctccatctccgcccgcacccttccaacgcctcacgctaccttgcctggcggcggccccagccgaccctgggctcggggaaaagaggtccgcgttccccccgcggcagctctgtttcccagcagccggacagcccccatttaaagccagccgcctccccagtcccccgccctctaggcggggcctccgtcctcaccttggcggctgcgcgggcgcccgggggcttcacatgccggggaggagcgcccggcgctggagcaaaagtttgcgcgccggttgggcctcccgggccgctgagcagaggaccaggagcggcgtcctcgcacggggcgcagggcgcggtggctccggactgcgcctagccgcgcgcggggcgggaggggcggcaccccgctcccagggccagggctggccgccgaggcggaggcagagggcggggaaagtctcctccacgccgcctggagccggccgcgcgagccctccccgggcccgcgttggctccccgcctttcctggtggcgccgcgcggctgcccggggcactggggtgcccgagctctctactaccctcacgctggcccgcgagaggcagcggcgggaggcgccggcagggagctcccgctggggcagcaaagccgtgggtggaggcgaaataaataatccacgaaaaaggaaaacagacgtgagccgagccagagcctctcccgcctcccgcccggggttgcgctccccccgccgccgccgccagcgccgctgcagtgattcctcgtctccatctagcgaggctattgtgtattgggcgcttaattatttattcaccctggaggccgaggattcccacttccatggggttttggcccttgcctgcgcttcccccaagcctctcccgaggctgcggaaaggtggcgaggactgacttgagacccttttttgcgctccatccttgaggactctccccgccgcactccccgcaggctctcccgggcgccggggctgaaaggtgcaggccgcccctctcccggccatgggccttgtcctctcctttgtagtcccagcagcagaaactctcttgcaacactaggctgcggctgggaaggagttgtgacggccctggggagaacatttctaccactgctcttcctcaaccatctgcaaactcctctgtttgaggcaagattatcaacaagtcggttcttcgggaggtagcctggttgcatctctttcagacaagctgtgcctagcagcatcacaggcatggcgcggcctctctgctcttgtggtggaagcactttgcaagcgctttgactgatgggggcgccttccagaaggccctcaaggcctggacaatcctatttttaggttggatgagagaaccaggggcttaagacacagagctgagggtcagatactacagtgcatgcatggaagaaacatttactgagcaccttttcccggtatttggacacccttaagccactcatgtaaacacacactataaacgctggtttgcagagtataaactaccttgcaagccagctttcagaacaacgtcttagcggcctccttcatgccagagcgccgccccgaggctgcagattgcacctcaaccagcaagatgcagggacaaatgtgaatgagaccttgttccttcccccctaagaattcaggggcctgtcagggagatggataaaaccaaccattccactgtgcactggcatgtcacacacagctgccccgagaaaggggaagacaggaatggagggcgggttgagtaaaggctcccaggagagggtgacttcctgggagtaggggaacatctcaagcattggtaactctttgtgcaaagaaatggagacatttattcaatccttcattccttcattccatatgtagcctccatgggcacctgctgggggccagacagaactctggatgctgggtagaaaagggaacaagaggatatctcactgggggtgggataggatggagggaggatggcaagaagatgaaggggtagggacttcctaggtgactcatctacagtttggagaaatg

SEQ ID NO: 1241572 - DNA, 4001 bp, Homo sapiens
tactccactttgccaaaccagactactttattataattatcattccatcatctcaaagtgggaacgatgacacctgcatcacaaagacagtgtgaggattaggcagtaaaagcatgttagcaccgtgtagagcgctctagaagttttaattgatttacagcagaaattatgcctcctgggaactatgtgaaaagcagaggcaaggggagagctgcgggtagctacacgtcaatacccaggaacacaggctggtgatggggggagggaagacagttaacaacctcctgaggagtccttacagcctcttctcagacccatagcagcagaaacccacactgcaggactcccacctcggactgactaagttacttgcaagtatatgtaaatctcatctccttggaaaaatgctaaataataaaactgccaacgtgcagacccaggcgctcatttccctgccagtgtagctcatgtacctctgggatgtgcaagccgaaacacgtgtgcacgtctgagcggctgaaccaacatgtatccataaacattatgaataatactcgcgagaatgtacggctttctcctaagtagcgcttgaagcactttacccaaatcaagtcccttttgtatcactccttccctgcctttcctacctatcactctcgtgctgaaagttggagctccttacccaaagactgggcggaaagggtgaccgccctggacccctgcccgacttcccgttaggccaagccgctgtcctgaaaggggatcgtgtccaggccggcttcctggagacacacctgcgcctgcacacacccaccgcggtcgcgtcaccagtgccgcggccacgtggacgaagaccaaagtctggagggaattccctcagccacaaagcgatgggaaagcgggacccgggtgagttttgaaaaacataaggggaacgggggttgggtggacacaaagggaaggggtcaccgctactcacccaaccctcgaaggtgtccgaggcgccggtcgtgcgcagcagctcctggaactgcagggtgcagttggccacgaagtggtcgtagcccaggggcgtctcgtggaagacggccaactcgaggtggccgccgtcggtgacgttagcgcaaaactcctcgttgtacgtgggtttgttggtcttctgcttggtgctggtctggcccacgcgcacctggtccacgctcaccgtcagataggggtccagcagctggtggcccttcttgaagagcgagtggcgcagggaccagcgggtgggctgcagccccactgcctcaccgatgcggaccctcaaatagccattgaacttcatggtgccagacgacatgccggcgccgctgccccggccccggggggccgcgctgcttcgcagcgggagaaccgggagtcccgtctcaggccagccctcgggacaggtgcaggagtcgaggcagccctggggaaaggcagcgcctaagcgcccctcgactggccattctgcctcctccgtgggacttttccctcccctccttccctccctcccgaggtggaaaggaggggagcccgccgccgagccctcagcgggccggggaagcccgaccgtcccttccaagcgcgcggcgcctcccggggactcgcgcaggactcgccccttctccagggccgggcagctcctctccctggagagccggacctacccgtccggtgagccccagccccaagcgtctcttcccccgcctcctcttgcttctcctcctgcccccgcctccgaaggctcacgctctcccccactcggcgagcttcaaaccaggaagcagctgccgccgccgcatccccggcgagaacctcgcaccgccaggttccaagttcacagaacccccgcgtccgctcccgcgccttccggaccccaggggcgtggcccgcggtccgcggcccggccctgcggtgggtggatccccgcgcaagcccccgggaggccagtgcccgcttgcgccgccctgcgcgccctccttgtagcgctgggtctggccgtgcgctgcgggttaggggccaccccgggcgcaggccaaaaaggaaagggttcgtggcccagcccgagcaaacacctgaggcgtggtagactgacctggggagcgatggaaggttgggaggacgcagaggagggcgctccagccaggaacccgcgcggcgaggagtcgcccgccccctctctcccaacctccccggtgggctggtgaccctgcagggccatccccaagaggccctggccggaggcgggggcacggcggggaggttctttttcctaatatttacagggatggctcatcccggggtcagctcgaacgcatcctgtttgtgcgcctttcctgcagaggctaattacacagttgtgtgtatgtgtgtgttttaatagggcagtagtaatgatggaaatcctgttcgcctccttcctcggaaggtgtgtcttgttgcacatagagcaggaaaggtcggttcttctggagacagacatggccaagaggtaataagtctcttcctctgcgggtggtttctggtccacccagctctgcgcggcaagggcagaaaatgttcacacacacaggctgtccccaacacacacgcggaagaaattgcctcttctaggaacactccagcttgttgtatttgcagtcagagtgggcagccttctgatgcttcccaccccgtggtccctgcagattttgtctccggggaggaccttttagcctacgctgctatgccgcaaagcttgctccctgagggccagccacaaccaatttgttccccaaaaagcctaggccactttttgttgttgttgttgttgttgtttttgagacggagtttcgcttttgttgcccaggctggagtgcaatggcgccatctcggctcaccgcaacctccgcctcccaggttcgagcgattcacctgccccagcctcccgagtagctggaattacaggcatgcgccaccacgcccggctaattttgtatttttagtagagacagggtttctccatgttggtcaggctggtctcaaactcccgacctcaagtgattcgcctgcctcggcctcccaaagtgctgagattacaggcgtgagccacagcacccagccaagcctaggccactcttaagatacttgattacattctgtcttgctatactggttccctcggagcagattcggcttgctttcattcctttctttcttccttccctcctttctttcttttatgttttagagactgggttttgctttgtcatccaggctggaatacagcggtgtgatcatggcttaccataacctccagctcccaggttcaagtgatcttccagcccctgcctcctaaagtgttaagattacaggcatgagcccccgtgcctggccccaggttcatctttctagcccccactcctctaaggccctgttcagaactttctaattgagtaggttctcaacgatttcacatgagtgcaaggaggcctgacccgtaataacagcactatacagaatgaaaacaagtaaggacaatgggccaggggggaaagggcctgtcttgaaaacaccaaagcttccttagagaacaaggcagggatgcaacgcatcactctaatgacatcttagctttaggcagggcttgtaaagcctgctcccaaacgtccagggggctcctgtttggccttagtgctccaggggaagatgtcgcatctaccctgtgggtcagctctgtcaccctttcctccaaacagctgaactctagctttaagagccactaaaggatttgctcctgttggactttggggctaaaagaaaacagtccccatacagaatcatggggtgtagactttaaatttttttttaaattttaaaaagaaaacagtccccaaatggtaggtggccacacagctgtcctgggactgggatatgacgataccagacactccatcttcaccctatcagtacctatcaggattggcaatggtgacaga

SEQ ID NO: 1241573 - DNA, 4001 bp, Homo sapiens
tattactttgacccaatttgaatattctctgacactacttcacttgctttagaatttagaaaagttaaaattgtacagaattacctttgctttttgagaaattttgttttacattgtatacgtgcttatgaagcattgctgtttcattaactggtctgcatccaaatggagaggattgtatacaaggctttcacagtgcctaggagtgctcctgctgacccacaatagacattccacaatactgatgtggaaaaggagcatgatatgacttacatcagcattagacaaaacgtgtcattttcttggaagttgcaaacagttgacattacccgtaatataaaagtaaatttccataaataaattcctggcactcattgttaccttagtctagaactttcacaactttctagatcagtgatttttttccacctggagcttttaacattcctgtgctcagtgctgcaattcacaacccttaagatttagcaaactctgttacaaataatttaaagaaagcaattcatgattattcaagtgataattagaaagcaaaaggagtgctagccagtcctccagggctgaaaaattcagcacctttagagacctctgtctccactcctgaaacgctggctgtttacactaagaagactggcgccatggccccctctgcctcacgtctgtatcacccccttccatgcaacatccatctggatggctccagaggcaacctgaaaatccaaattgctactgtaaacagtggtgggtgggctgagtctcctctgggggtggcctggccccggataatgacccttctaacctgccttcagtggccgctgtccagagccccacagcctcaaacttaaggacacagccagcctcggggtgttcctggacatcacccccaccacttcaacgtcctactatcagcatcccgggaatgaaaaataggaaggtcgcaactttcaggttttgtcgttggaaaatgtgtttccatgctcatacagaagtggaactaaaagatgacaaggccttgggtacctgcactcctggtcagttgttttgacaactggccgagtcaatcacactctcttaaaagcttatctgacaggtgagaaattccttgtctccaggtcattccgggggcactctggtgcaggaaggaggattcctgcaccaggaatgcgctggtccagggtccgtaggggagagaggggaagaaaactgggaagtctcaaggacaaggaggggcgcggcgaggaaagggcaagatacctggaaatgtcatgagaaggatggaaatgggtgaggaggcggcggactggagagaaatcggtgaatagaggaagatggggcgagaggaggatgagcaacagcgagcgcagcgcctcgggttgcaggcgtccagccgcggcggggccagccgcttccagagcgccggcgaggctggcggccagccgagccccgggagccggaaagttggcgcggagagggccagccgggcagcgccccctgcgccgcggggaggcgccgggctggcagcggtgcggcgacttaccttctggtcgacaatggagcaagccatctcgcggacgtgcgccaggctgtagtccccggacgagtcctgcagcagcagcaccggctcacggctcaggccgatctgcagatggaacgagatgcccccgaccggggccgcgacaggagccaagaacggcgcgggcccgggcccggaccctgggaccagtgcggcggccgctgcggcagctgccgccgccacgggcagcagcggactgggcggccgcaggaccggaggggcgctcatcgctcggcggggcgcagggccgggcagcggagggcgggggctggcggcgcggcagcaggaaagttttgcagccgctgagccaggagcttctttctccgagagcccagacggaaaataaaaactttccggaaaagtccctgggctgggggagggcaaggggatgaggatcgggaggggaggggactaaggggaggagatggggaggagggaaaatggccgaggcgggaggactctgaggcccggaacgcggcagccggctcggggccgccggcactggggaggcgccgccgccgccaagaatctgccgcctggcgcgctcggaaggacggggcgacgggtcggcgcggcccgagcgccgggcgggggccggggcgggaagggggcgtgaggggcggggaaggggagctgggggcgggcactggggagccaccacccggcgggcgcgggagtcgcaggagcagcggccgcagtggccgcagggtgcccggtcgccgccccctccgcccgcagttcccggggcctgagcctccgcgagccgggataggaccgagtggcggggctcggagccgcctcggcaggcgcggcccttccctccctgcagggattcccgtcctctcgggtcccgctgccccgccccgactgcggacggagtggatggggtgcaccgcctcagacccgcttcctggggtcgcgaacttcccgggccccaaggtccctgccacctcttccaaatgctggaggactacgcacttctacaagtgaggtgacttttgaggaattcaagaatgctgatcacagcggttccccttgggtcttaccttcggagggtcaagggaggatgggtcatctggaacccacttacatccaggcccctctgggagccctggggtttgtggccaaagagggtaggaagccactccacagaaaggggtttaaacttgtctctaccctttttgtcgctctgacgcgcccttacagccaaacctacgtactccaccccagctcctaaggcaccggatatacacagtgatctaaggagagggtcgctttggaaagaaaaggcattgactgcccaagggcaggagggaggtctgatgcggtctcctttcctttaccttattctttgcgcctgaagtttctactttggagcttcagaaactattttccttctcctctatcaatctaaagtctgttatataggagcagtgcccccaagtccacctcagcaccgccaccgtcatcacaagcacagccatcaggattgggcacaacctgccctaatttggatcgccgtttatttttactgttgttttggcagggtggggattgctttacattcgctggagatgaattataattctcccctccaaccagggtgggcttcatgggtgtgcgactatgcagttgtataggccacagctcataagacccgtgtttggtttaatattctgggacaatagtctactgtcgctgttttgttcttcttcataatttttaatcaaggagtctcacatttgtattttgcaatgggccacgcagataatgtagtcagctttgcctctctcttcgccacttccctagactttccccttcctctgcgtaagtacacacaaacatacctaaacaaacattttgtattttgtatagcttattttgttctgttttatttatttatttatttatttatttatttatttatttattgtcttaacttctggttgtggcccaagatattgcaaggtagcttcctttagaaccgtgttcccagggtcagtaatggagccccaaacactgcaaggctgcacaactgcattgaagagacttgaatttattctctgaatgtgatggtttgataaggtctacctgtgtttacattttccctgcatagttacttatgaggtggtcctcttcatccctgatacaggtaggtaattttcctaatgttctagactcagctaatctaggaaaatggtggaatttttcttgatgaaatgcctttctgaattctgaaggaggtttttttcttttaaatgtccgaaactatacttcattttctttgaaatcagaataaagttaatattccacagttttctattatcaaaaaaaagcttgctggtcagtttacaagagacttacaaaaagctagtttcacttgagattcaagagcgctgaagacattcat

SEQ ID NO: 1241574 - DNA, 4001 bp, Homo sapiens
atcttcctgattaaggggcagcaggaaagctggaagacccaaatatgcaccaaaattcagctcctgtaacatggcctggaacggagatgaagaggaaaagtttgagctaacaagcaaacagcttttttttttttttttttgagacaaagtctcactctgtcacccaggctggagtgcagtggcacagtctccactcactgcagccttgaccttcccaagctcaactgatcctccctcctcagcctcctgagtagctgggaccacaggcatgcaccaccatgcctggctaatttttgtatattttatagagatggggtttcactacgctgcccaggctggtctcgaaatcccgagctccagtgatcctacagcctcagcctcccaaagtgctaggattataggtgtgcaccacagcacccagcctaatagctttaatttcattctatcagttaatttaccaagttattggggatgggaggggaccactctccccacccagcttggttagaaaaatccagcagagaagtcaaacagtcttaccgcctcggagttcctgcgaatcttctccacttttgagtctggacgaatccatggagaaagctttcccacaattagcgtattccagtctgcactcccccacccaagaaagacaaatactgaataaggttcagcactttacttgttcaatttttagttttgggaatcaagagtagaaatgagagacaaaggttttttctacatagacatgggatagcctgatgcagaatagagaagcaaggagaaaacaagttatctatatcccagggactaacaaatatatccaagtcagaaaaggaggagaatgagggccccgataaagcagaagttgttattgcctctaataattaaggggcatatgggatggtccctaccccttcctgacagcagtaggtctgatcgtgtctggggaccgggccgattcttagcaggttcctgaatgaactccctcttgaaacgcggatggaagacaggcatgcagaggaaatcaaacctacaaccgcgacagacccagaatcatgtaaagacagcagcagtgccagagagccaagcaactggatttaggctatcttgattttgcacagccctttcagctgccatcagttcagcctactaggctgctgagttcagaccaccttgggggatatcaactctgctgtactgtgcctcaatttctccctaaaacacagccatgggacatatgagtaaggagaaaatgatggatatccacaagtagaatttttttctcctcaggtgtcagtatgtttccaagaccatcacatccagatttgccccagttctgcccatgcctcccccgtcaaaattagcctcttctctcccttgccccctaacacctcctcccactcccagacaataatcgcgacctccagggccctttagagtttacccaacaactctcccaactttgggactcagtgaccacaggcctcccacaagttattttcctcacgttactgggtccgaggctcctcccctccaaagagtaatagtctctcccctcctcatcctagccgaccccctcacccctgcttctccgggatgactagtctgcccttctccgtccccgagttcggaccccgcattccgctcgtggaggtccggccctcacccctgcttggccacagcccctagtgtgtcagctatttcggggacgcaattcaggtccctcccgctggacacgcggctcccaccagcacccccgaccgccatcgccgccatctttctcctcgcgctgtccacgccgggattccttgatactagtagccaatcacaaagtcaaactagtgccccagaaggcgggacgagtcgccttaacaaccagagcgtctgccacagctcccgaacaggagggatggggagtggcttttcctgccaatccgcgggctgcacagtggcgtacggcatggatccaccaatctcagggtctggttcctgacgaacttcaatctcccagaatgcttagtctatctgaagaacgccgttgagagactacaccgcccatgaaaccctgcagtataaccttgaagtaccatcacggagagaaacagtgccatctcagggccagtggcgcaatggataacgcgtctgactacggatcagaagattccaggttcgactcctggctggctcggtggggttcctcgcagcttcgctgcgtgagcattttgtaattttcctttcctttcgcagcttgatgcttctttattatcttcacgctttcattatcagatcctgagtcggttgggttatgcagccatgtaatgtcagcttttcccgtaactaccctcaaaagtgtttttcttgtgtcattatttacgtccatatgaacactgagaaaactgggttaatggctggtgctattaaaatgagctttgtcaccttactatgttacatattaaaataaactgctaactcagctactacttcctagtgattctaggaagtagtgttttgtgtttcaaacacaaaaggtgtaaataaacgcctaaacacacacacacacctcaagatagagaaaaggaattcattaattacagtgggcagcagtcatgaaattggctggcatggaggccagagagaatctacattttctcatgtcattagctgctagagatggaaaggaaggaagcaaggaaagacatagggaggtaaatgggaactccagaaggcagggggcccactggtgttgagggctcggcagcaaggatggagaggagaacacggtacaagagaccccacgcaggcgccgctggcagaacttagggaccgactggcaaggagtcctgagaaagcaaagtagggggtgatgcctaggattctgtccatgcagtgagcaagaaatgcggaaagagggtttgggaaatcagggtttgggtttggtcatgctgaattgaacgtctagggggcgctgtgtaatagaaagttggatggaggtcgctagaagaaaagaactgaggccatgcgactgagatcaccatagctcgttggggacagagccataggaaatacgaaaagggtgtggggtaggataagttctggggaaccctgggtgcaatgcaagtgccccaaaagaatgaaagccggaaaaccggccgggcgcggtggctcacgcctgtaatcccagcactttggaaagcggaggcgggtggatctcctgaggtcaggagttcgagaccagcctggccaacatgaaaactccccgtctctcctaaacgtggtagcaggcgcctgtaatcccagctactcggccagctactcgggaggctgaagcaggagaactgcttgaacccggcaggcggaggttgcagtgagccaagatcacgccactgcactccagcctgggcaacaagagcaaaataatgtcggggcagggggaggaggaaaggaaagtcggaaaaaccaaagcatttaaaaaatgcaccatgaaggccaggctgggcacagtggctcacgcccgtaatcccagcactttgggagggcgaggcgggcggatcacctgaggtcgggagttcgagactaccctgaccaacacggagaaacccatctctactaaaaatacaaaatttagccagacgtggtggcgtgcgcctgtaataccagctactcaggaggctgaggcaggagaatcacttgaacctaggaggtgggaggtggaggctgcagtgagcctagatcatgccgttgtactccagcctgggcaacagcaagactccgtctcaaaaaaaaaaacaaaaaaaaaccccagcactttgggaggccgaagcaggcggatcacgaggtcaggtgatcaagaccatcttggctaacacagtgaaaccccgtctctactaaaaaaaatacaaaaaaaattagccgggtgtggtggcaggcgcctgtagtcccagctactcaggaggctgaggcaggagaatgacccaggaggcagagcttgcagtgagccgaga

SEQ ID NO: 1241575 - DNA, 4001 bp, Homo sapiens
cttgtagagctatggggttggggaggccataccttagatgacgtcattcctttgaccctctcctcctaagtttatgggtggctgacaaccaaattatggattctttcttccttagggtattcattgtatttcagaagcctatttgagtctcaaaacaaaacccttttagacccaaaggaataagtcaagtggcagaacccgatgggtcatagaagaagctaagtgaaccttcccaggtccttaaattccagaatgtggtcaccactataagctgaaggcccagagcaacattaagaagaccctgagtgatctgtccccagctcctcttcaacttttagttttcttgtttctctgcacagtgtcaatggtattttaaattatttattgaaacattgtctctctctgttgcccagctggagtgcagtggtgcaatcatagctcactgtaacctcgaactcccgggctcaagcaatcctcctgcctcagcctcctgagtaggactacaggcatgggccatcatgtgcagataattttttatttttagagatggggtctagctatgttgtgcaggctagtcttgaacacctgtcctcaagtaatcctcccaccttggcctcccaaagcactgggattacaagcatgagccacactgcacctggccaacaatgagaacttcaattgctattaaaggatatgtggaccaaagagaaaggcagtgcctccatgacagcatgcaggcctctctgttccatcttcaccgagggaagaaggggtagactttccagatgggcagaggtgaaaggcaagggacactgctgctggctcaggaccaatggttgcggcttagtagttctccaaggtcgtagggcaggctctgaggaggggtgcctctgggaagatgagtcctggggaggactgctactccaatggccattgttgtatctatgacccagtagctggctaagaatctgattttcctggatgtgggaaggtgcagtcaagggaaagtttgctgggggatcctgacagggtttgggggtcattcttggagggatagggtacctaggagaatctagacgcttggccagtgataaatttcctactgggaccccagcttgtagctggaccctcctgggcaaggcagccaaagcaagtggatctttacaggcccctcccacaggaggtgagggctcgcttctaccctctgccacctgcccctggaagcttctgcccagctgagtcaggtggcctggtggatccaatagtaccttttgtaataccgagtccacagcctgggacactgccctggtcagctctttcctcagaatctctagtgaagctggtgctccagaaggaaggaaactgggcttctcagactcttggtgtttttctgccccagagaggtccttgctggtaccttgctggtggtcaccgtccacaacccaggggcgaggcccacagccattcccctgctttgcactcagagggcctttccccgtgccacagcctcctggcccctgagctgtgtccctgggcttggcagcctgtaggatgtgctcttgcagatgtcttagctgttgcttcagcagatgaagttgttctctcacacgagggccccccttcctgttgccctggtcccaggcaggggctggcatcaggaggccttgcggtgtgggaaggttctgcttcctcttcctctctcgggccttctttgggcagcgtgggctgaccccagcttgcgcattgcctggcaccagaggattcggggagagacacatgcctcggacaatggtctccactctggccctctttgcctggatgtgctcatcaccaaaccattcggggtctgtagggctggagctggggacctgactccagggaaacggggagtctctatccagctctggaggggatgagcttctctcgccttccgtacaagcttctgctaggtgggagcagatctggggctgaggagaaagcaagatggagtttggatccatcccaggcacttgttcagggcttcaggaattcctcctccttatttcctcagctggaagtgcacccagaatgcgctgggcttcctcctctgcacttagaagggtaaagagccactgtcactgaggaaggattcagattctgggatgccagggctcatgaacctcctgggcagactcctgaaattagagacaggaagaaaagagtacgtgtgactttgaacagtccttttaaaatgtgaatgtgcaaacattcaacgcggtctcgttaaagtgtagatttcaattcagtagatgtggggtggggcagagattctccattttaagccagctcccaggtaatgctgatgctgctggtctcagaaccccactttgaggagactccgagagtgatcttacagggagaaaaatcttctcctgcttgggcataacaataaaataataataataataataatatcgtagtggcagccgcctgaacaactggcattatgccaagaactctacatccattaatttaattaatgtgtcataacagctccatgagaatgtggtcatgcctattgtctacagataagaaaacaagatcagagaagaagctacttccctatggtcatgcagctcgtaagtgacagactggggtcaaaccaagcgttgtctgattcggagtgacttttctagtgactaagggcaacagaatcacccaaggcacttctagaaatagcaaattcggcagggtgcggtggctcacgcctgtaatcccagcactttgggaggccgaggcaggcggatcacctgaggttgggagttggagaccagcctaaccaacatggagaaaccctgtctctaccaaaagtacaaaattagctgggcgtgatggcgggcgcctgttaatcccagctacttgggaggctgaggcaggaaaatcacttgatcctgcgaggtggaggttgccatgagccaagattgccccgttgcactccagcctgggtgacagagcgagactccatctcaaaaaaaaaaagcaaattcaggccgggcaaggtagctcacacctgtaatcccagcactttgggaggccagggcgagtggatcacctgaggtcaagagtttgagaccagcctggccaacatggtgaaaccccatctctactaaaaataaaaaaaattagctgagtgtggtagcatgcgcctgtaatcccagctacttgggaggctggggcaggagaatcacttgaacccaggaggcggaggttgcagtgagccgagattgttccattgcactccagcctgggcgacagagtgaaactctgtcttaagaaaaaaaagaaaaagaaaaaaaaaaaaacactgccgtcctaactcttggaaaaatcagattacgcattcactgttcaactatttattgaacaactatttattgagcacctgctgtgtgtcgggccttcttctgggctcatggagtgagcaagatcagcatagtctgccctcctggaacaggcagtctagcagggaaagcagagaataaacaaacaaatatattttcagtgtgtgatacctgctgtgaagagaaagcacaacaaagggttggaaactggagagagcggttggggagaaggagggagctatttcaggaaagactgcctaaagctgttttattcccacaaagcatcaaagtacactatactccaaccacgtcacttgctttctaactaataataatcattgaactgggccgggcgcggtggctcacgcctgtaatcccagcactttgggaggctgaggcgggtggatcacaggtcaccatcctggctaacattcatgaaaccccgtctctactaaaaatacaaaaaattagccaggcgtggtggcgggcgcctatagtcccagctactcgggaggctgaggcaggagaatggcatgaatctggggggcagaggttgcagtgagccgagatcacaccactgccctccagcctgggcaacagagcgagactctgtctaaaaaa

SEQ ID NO: 1241576 - DNA, 4001 bp, Homo sapiens
tggtggcgcgcatctgtaatcccagctactggggaggctgaggcagaagaatgacttgaacccgggaggcggaggttgcggtgagccaatagcgccattgcactccagcctgggcaacgagagtgaaatgccatcttttgacctaatacctttttttttttttctgtatgcctcttattcctgtagaggtacttaaaaattataccattgactattctttttcataaacacagcaatatataaaaatctgaagtcatcactaaagactgaaaggagttttgggtagagcaaaacaagtagctttgcaataagcaaatctcatccacaaggcaatctggagatttgggatgtaagaagaaaagagactatcataaccactggttttggcagctgtttttaagggctaagtagtcacacgccgactttttaaagtctctacatattaaacactgtgttccagaaactagattttgtatatgtatttacataaacgtctacatcaatcttcggctttttggaaaacgtaccatttggctggaactacactaccttcttcctccttcggctatttttaattttttttgaagtcctatcttccatgtagatttgttaaaacataccacagaaaacagcacatacaatttttatcatttgacttttaaacatcttctttcttattcaattataagcaaggaaaaatattctgagactttacacaaatagtgtctcataccacctatgagccatctatgctcaacccctacttcaaagttcacaatctaagtactagtcctctttaacagaactcctttccatcactttatccctactagagagtgaacagtggaaagttccaacttttgcaactctagaatgaggttataaatctagagggaggaggaaaacctgacagtagacgcttgttcttttcactccattcaagctcccatacagcctaaaacacttaagtttcaacatgagcttcatacgtccctgtccaaaacttgctttctcaagcctcacgctttccagctgtagcaaagtttatttctgaacagattaaatcagttgctaaataatctgaagtcctcaaacagaaggccatatgagtatcaaacgaaaaaaacaacatttgaatcagcataaattcacatggtattatggcatcattactaatacactgagcagtattatttattaacttcaagtattaattaacttaaagatgtgattttggagaaaaacaccagtggtggtctctgattaccaaagttaaacattcttaagcacaatcccttaaaaaatcctgccaggatcaatgatgtgttttttctgttttaaagtatcctgccaaaagctgtgggtgctgtgacttagggtcgcaaaagtgttgcttatgtagtcagaagacagaacgtgccctacaaggcgctcacatgccttagtaatagaacgtatattatcttcccaatcctctggcggctgcaaatgtgctccttccacttccagccaccccagccgtgttccagctccgggagaagcaagggctttagaattacccccaaatatcttcctaaatccaggcgaaggaggcccacacttctccaccctacctaacgcacccctcaagtgaaacgtttggtctaagaaaaaaataccttgcaccgctccacccaacaggtgggaaggagaaaggaatggacagctgagcgctgaatccgagccaggcctcaaacagggcgggagagggaggccgcggccagagcgcggcctgaaacccggcaggcccctttcagtaccaagtaccaccctctgccccagctaatttcaaggagcccgccccagcagaccttatgatggatgccacttgatgccatgagccggagcctgtgacgacctagccgaagatggcacttcaccgcctccgtccccacagccagcacagcagccgccacccgcgccacggccgcctggtccagggcacgatgcgcatgcgtcagtgtccctggaggcgaaaaagtcacgtgggttcgcagcgcgcaggcctggccctcccagggatcctcgctgcccgtgcggccccagccccgcccccgcagccccgccccgccccgccgcgagcgagggcggggaccgctgcgcctacctgcctttccctccatagggacttcccaaaggaaaggagggcgtttaggggctttcacacgcctgatcttaaacacagcgccctgacccctccccaccaaaaacggcaaaatgtcatttttgggggcaaatctaaggttttccctacaattgttcaagctttcacactaaaacatttacctaaaaacgggcagaaattcagccttaaacccacaaatctcacgatggtatagaccctgggcccactcaggtttcctgaaaactaaacagttctggagttaggggtttggagaacgggctattgttaaagaaaaaagtatttagtgacacttgttaaagcacaaaaagagggctttattcaggaccatcgcaacaggtatagggaccactgactgcaatggagacttgcagtagggaaagagatattgggctcaactcctcatacagcatgggcaagtggagatttatagccaaggagcggtggtaagtgaatgtataattactaagaggaaacatcagggtaagggggattttggctaaacccacctaataggatttttgctgaagacaggccaagataatgaggcatcacctgggggatggtggagactgaagaacctgatcagatattgaggatgatcagctatcaaggatgggggtttattgctaatctgacttagcaaagttctttgcttaaactggattttacaaagaaagtgtacagaagagcctagcagaagattcagaaacctgactaaagttggccaagcaaaaaaaaaaatctttgtatctgaagggatatgttatcctctggacaaattgagggggactgtgcgttaacaatcttagcagtcctcttcagttgtaccaccatctccactttaataaaaaaaaattttctttcaaatctggcctctctccctttaagattctgttacattggtgcccccgcattcacctgtcacttaccatgtaatctgttgttccaggtgcattagtattactactgggctccaagttcctcatctgaaatctgtctcctctggaaatacttatttacaagacgacgtttcttgtcacaacgcaggttaatcataaatcctctcaccagcacctttcgttcgaaataccaaattcagtcttttttcctaccttttacttgcatcacactgcacctagtagtagctttccctttccatttgcctcttctactttccaagctaacttttttggattctctgacagtgtggccatgttttttgtttgtttgtttcacaggtttaaacagcagcttttaaatgtttactgtgggaagaatagtcaagggagtggtgcgttgggaagacagaccagagtttgctgctggcactgttacgcagggactgtttggcatgaccttcactccttttctggttctttggtctttctaaggtggcctcaatttctttatcagtaaataagattatctctgagatgtcattcactcaaatagccattttataaaaatctacttgcatcttcaacttcattcactgtggattcgttgttttcctttatctagtttttacattttacctttcaagccggtgctattgctctcactcccccgcttaaaaacctccactggtttcctcctccactttttttttttttttaaagaaatcctaaacttttagaatggaaaatacggtgttttcataatcatgccagccttctcactgtttctgcctccccgtaactccacagaacctactgttcccacagcccttttatgcgtggaaacctttaagtgggctcttctctttgcctaaaatgtgatccccgctggcagaaacatacattatcttaaaaactga

SEQ ID NO: 1241577 - DNA, 4001 bp, Homo sapiens
catactggctaacacggtgaaaccccgtgtctactaaaaatacaaaaaaattagccgggcgtggtggcggacgcctgtagtcccagctgctggggaggatgaggcaggagaatggcgtgaacccgggaggcggagcttgcagtgagctgagatcgcgccactgcactccagcctgggcgacagagccagactccgtctcaaaaaataaataaataaataaataaataaataaataaataaataatagtatgtttattagaaaatttaaaatagggataatcaccttgtggttctcccagtctgcatgctaataaatttgtatgccttttctccaaaagaaaaacaaaacaggttttttttttttttgagacagtctcactcttttgcccaggctgcagtgcagtggcataatcttggcttactgcaacctccttctcccgggttcaagtgattctcctgcctcagcctcgcttgggagcagctgggactacaggcgcgcgcccccacgcccagctaattttttgtagagccggggtttcgccgtgttgtctggtctcgaactcctcagctcaaggatccgccccgcggcctcccaaagtgctgggattacaggcgtgagccaccgccccgggcctcacattttatttctattggctagcgctgctctaaatcttctgttccttctgctacaccaggcctaacactcaaaatccctgccaaccttttccttcctgaagcttccctccccttcctcagctctggcgaccctgcgctgtggtggttctccaaccacactcattctcctcagctggctccttgctcttcttccaccccctcgttgcaagtgttcctaagtgtttgccttggcctcctcttccccttccttagcttagacttctccactgctccaacatcaactggaaatctatggaattgattcctgttttcagctccagtcctgttcacagggcattttcacctgctggcacttccaaagtgacacttccaaaccacttcctcgccctcctctctaaaccaggtctttcttcctaacttccttatttctgagaatgtctctgccatgttctaaactgaaaacctcctagtcaacttcacactttattccctgatcctcaattggttcccatgtcccgttagtgtttcttgtaagcctctgccaccaccgcagatcgaactctaatcacatctcacctgaattatggaaaagtcacctcaattctctcacccatcccagcctccactatggattaatatgcctaaagcagagctgaccacaacggtgagaagaatctgagagggaagcagcagcaaacacaagagtcactggacatgcatgcctcgagacagtcccgaccaaggagaaagcatcagaccccgtcttccgcctcgaacaagaggcgtgcggacttcgcccagaatgctcgtcgcccctggacaaggacacacccggggcgtgaggcgcggagtttcaccagttgctcaagcagacccagcccaagacgcttcctctttctcctactccactccagttcagacggctactaatcccggcccaaggcacctgcgccctgagacgtcttcgagcaaacagcatttccggaccaaggctccccggaatctctctccacccggccgcgcccgaagcccgagaaacgggccgcccctcctggtttcccacacggggttccccagccccaaccggccgcgccccgcccctcatcttttaggacaccggcttcgcggcccgggcggccacaaagggccgggccctgcccgcggccgcccatgtccgcggtgccttcctggcttgcccggactccccatcacgcacatacgcttccccgccgccccgctgccgccgcggctcgtagctcaggttccttccagaccagccgctgttttgtttccgatgtgaaaccgcggaccccggagctgcctgtcccaggccccgcccgagaaccctcaccgttgtcgtcatttccggctctggcgtcgttggcggccggcccacggaggaggggaggagccaggaggaagggggcggggcctccggcctggagaaacgattgcggggagaacccagagctccacctggccttccccacctgacggaatccgcccagagcgctggcgtgggttgtcggggttctgaggctgctcgagctgaggacgaaagcccctatataaattgggcccagcgtgtgcttctcccggcatacaagcgatggccatcctaaatttaacacctgtcatttctttagggtacctatttgcgaaccagctgcatcacaatcaagagaatgctgttaaaatcgcaaatatctctgccctctcccaccactcaatgaatcaaaacttctggtgggtggcgagaacctgagaaactgcattttaaacatcctccgcgattcttggactccaactttgacaaccagtctttctaggtggcaagctagctgagagcagaaaatgtgtctggtttgctgggtcacttgatttttgcatctgcctgctctttgtccagttttggtaaagacagtaccaatgtctaattcattagacagcataccacacttacacatatatccaaaagctaaaactaaaaaatgaatactaccttatttaatcaaggtgaacggagaaatgtcaaacatgggtattcaaaaaaccgaaaatgaaattaacggtacatggtatctgggcaagttacattcttctaaagtttctttaaaaatccacccccaagcggccgggtgcagtcgctcacgcctgtaattccggcactttgggaggccgaagcaggcggatcatgaggttgggagttctagaccagcctaaccaacatggtgaaaccccgtctctactaaaaatacaaaaaaattagccgggtgtggtggcgcgctcctgtaatcccagctactcgggaggctgcagcaggagaatcgcttgaacccgtgagctgagatcacaccactgcactccagcctgggagacagagcaagactccatctcaaaaaataaaaattaaaattaaaaaataaaatccaccccaagctatcccttcacattcctatcgcatcaatctccaatccctcctcccaacccactgccaaccttgttcaaaaacatgagattctaatactttttacacacaaaagcttcatatttaagaacaaaagtaatattttccattagcagaatgaaagataagttgtgggagaaggttgaacgaaaaaagatgtttttaaaattcttcacctcccccactttaacaagagtagggattttagtttgttcatttacaagtgctcatgcttgtcagcagcacatatacattttacaagtgctgagaacagtgcctgatacataacagtgcctgatacatacaatagttcagtattgaacaaatacaggctaaaacccatctatttgtgaactacttcaatctgattgcagtccgctaatattaataggatgtcttaaaatgctgatgaactattcttagaaacaatctacaaaaattttgggcaaagatattcatggaatattatatagcaaaaaattgggaaactaaatatggtacaataggcagggtgcggtggctcacgcctgtaattccagcactttgggaggccaaggtgggcggctcatctgaggtcaggagttcgagaccagcctgatcaacatggagaaaccccgtctctactaaaaatacaaaaaaagttagccaggcgtggtggcgcatgcctgtaatcccagctacttgggaggctgaggcagaattgcttgagcctggaaggcagaggttgcagtgaaccgagattgcgccattgcattccagcctgggcaacaagagcgaaactatgtctcaaaaaataaaaataaataaataaataaataaataaataaataaataaataaataaatgtggtacaataaattatggtccacccacctcacagaatgtcatgaaaattttt

SEQ ID NO: 1241578 - DNA, 4001 bp, Homo sapiens
gataaggtgttccaaagatagcggtagtagcttagacgagagaagaggtagaagggaatattttttgagagtagagtaaaatataaaaataataaaaataaacttgctaggccaggcgtgatggctcatgcctgtaatcccagcactttgggagggtgaggcgggctgatcacaaggtcaagagatggagaccatcctggccaacatggtgaaacctcatctctacgaaaaatacaaaaattagctgggcgtggtggtgcgcacctgtagtcccagctcttcgggaggctgagacaggagaattgcttgaacctgggaggcacaggttgcagtgagccaagatcgtgccactgcactccagcctggcaacagagcaagactccgtctcaaacaaaataaaaataaaaaaataaacttgctaaagcgttggttctgggagtaaagtaaaaaaaggaattaaagatgaataacagattttttcatatgaccattcactgagctgaagactgtagtagatgcaaaatggcaaggtgaggagaaaacccagagctctactttcacatgcagtacgaaatgactattaaacgatcaagtgaacagacatgtcaagcagacaaacaaatattcgtatctggagttcttgggagaaatgaagacagaagaaaagccttcagcagtggtactttctgagtctgtttcctgatctgttaaacccagatcattaaccctaccattgttactaaaatatcccacatggttacattatcaagtattctttaaaaggtttgtagaatgaaatactattaattcaaggtaatattaatataattgcaaagtcagtttgctacaagatttaatattgagcatttacttatccaagaaaagtatggcagaactttagcattcataactgaatggattaaaccattccagacataagttgcctattatcaaatttagaacaccggtacttgaacttaaggctgagcatgagaatcttgttaagaagtagaaattgaggaactgagaaactcattattcaataactctagtgcaaataaccaataaatcttttagaaactgtattttctatatagagaagtacataaaaggagtaaactgactgcacatatgcaatacgtttaacaaaggaaagccaaacaagttaacaagtcccactgcaaaatcctcaacagtctatgaaaagtctgaagctgttaagttcctaagtaaccatttaaacgtttacggaataaatgcctacaagcgctgttaggtaatttgtataggaaaaacgagaaaggaaaaactgaaggattcatcagattgtttttcagaccatttttattagttctgttccgacaggatttccagtgactcttaaactgagcggtcaatgatctgcacacttaaagacagagaaggcctgtgaatcagcagcaccctaggaactgcaaacgcagtccacaaaaagcacgatctccagaccccggaatcccaaatctcactgcctcggtggttctcaagagaacacactatttcaagccccacgagtttccactttcggtttccctaagtggctgaagaaagtgactcagcaatccaaagcggctccaaacctcactgcggcgacgccaagccggctacacctgcgctgaaaagcttcaggagtcacggtcacctgagacgcaggcctagcatataggggataaagacgaccggtctccaaacagctgcaaatggcccacccagccgaaggcggtctcagagcaccccgggtccgcgaaccccatgtggtctgtccgagttcccttcaaccccaatccttaggttaaactattacaccgacagacagcgaactcaccccagtgccgattgagctcatcgtgctaaacccaaagggacgcgtagggattccaggcccggagcgcttcccctataccacaggatgccgcaaactagtaacaggcccgctcattggctgaactgccaaccaataacctttttctctgtggctcgttccgcggctccggcccccaggacgaggagtattgtgggaaaaaagcgggccgcgagaggctggcggcgcgcatgtgcagaagcaatggaggcggggttggggaaagcaaaggctcctccttcggttcgcgtactttgagccgcttggcgtcgtggtatctgagaagctgctctattcctttccttggaattattatttatcttttatattattattctctcctcactttattctttctttaagccaaagggagagatgctggtatactctcacaaaaagtagaaaaagcagtaggcgcgaagtaacctgtcttcctccgcgtcccgaccctgacccagaatcttgatggcatccacttcacctccttgtgctcaggctctcgtgaagtttcacttaaagggtatcgtctttgaattcagcttagaattttacggaagtattagtgctctttctatgagtataacgctttttggtaagagttaaagataagtctgattaaagatattttttgagcgctagtatattccacgtgttcaagaaaaagccgtgaacagagcatacccccatttctaatgtaatttccattcagtgggaataaataggtaacaataaataagcaaaatagtaagaagaaagagtgctttaatagacaatggaggtactaactttaggcagtgtgctcagggaatgactttctgagtgagtgatatttaaactaaaatagggtaacaaaagacagtggtttagggaacagtaaaaaacttggcttgcgctgggaactgtcacgtcagagtgacctctcataatgattaagtggggaagaatgacaggaagagaacaagtgcacaggagaccaaatcttgaagtggtttgaattttaatccgattgtaaatagggcatcagcattttttttactcctaaatattaatacgtcagtgtgtattttcccccaacacaggaacattatttcacagagacacagtattattgtgaaaatcagaaaattaccaatactatgatctatcaactttatgcattttttttttttttttggtaaatggcccaataatgtccttcatagcaaaagaaaatccaagatcacaccttgcattcagttgtcatgtttccaatctgctttagtctggaaaatagttgcttagtatttcttcagttttcatggcatgaacacttttgaagaatacaaaccatttattttgtagaatattccttaatttaggtttgatttttttgttatttgattcaagtgatgcatttatggcaggaatactacagaaatgaccttgtattcattcatgtcagagcattacattagaagggacatgatgttagttgttttattgctggtaatgttaactttgatcacttgctgaagatttatccctgataatgtttcatttttccctttgtaattagtatcttgtgaggaaatactttgagaatatgtacacatcctgtttacgcctcaacatttcactcattaattctaatatctgatgattcttatttgaattgattattacaatggttgccaaatggtgattttctaattccatcattcttttcacatttattattggttttctactgtgaggttatcaggagtttttaaagcaagagaattatatgatttgatttaaatcattaaatgacctcttgtttctgtgtgaagaatgatagctaagggaaagaagagaggcagggatactagttggaaagttattgcacttttgtgagctagcagtaatggagagtgatttggactaaagtggtggcagtggaggtggaaatatgtagatggatttcagatgtgtagggagctatggtttgaatgtccccttcaaaacacgtgttgaaatttaattgccaatgtaatggtattgcgatgtggggcctttaagaggtgattaggtcatgagggcactatggatgaatgacattttcagaatgggttagttatct

SEQ ID NO: 1241579 - DNA, 4001 bp, Homo sapiens
tgctcacgcctgtaatcccagcactttgggaggccgaggtgggtggatcacctgaggttgggagttcgagatcaacatggagaaacctcgtctctactaaaaatacaaaattagccaggcgtggtggcgcatgcctgtaatcccagtacttgggaggctgaggcagaattgcttgaacccgggaggcggagattgcggggagccgagatcgcgccattgcactccagcctaggcaacaagagtgaagctctgtctcaaaaaaataaaaataaataaaaaatcattctgtctagataatgaacttgttttcagatagatgttctcttccaaatcttttaaaaccatcacaatgacactgtgttcagcctttccactcaccaaatctgggaagcattaacgattatgctttatggctggacttcacaatacagtatatagaaacaaagtaaaggtctcagagtgacttttcctgttcacatattaaaaatcacgaatggaacgctgaaagcagtagtctaatatacgaaaattatttaaaactcaggaatttaatacaataaatgaaaattctttgaggatacagttatctctttgttctatctttaatcatgtttttcaattggggataaattaaaagggctactgaattatccaacaagatgtttcttgctacattatatacactatgcagtaatacactgagcagtttcattccaagttatctttaactctatttctaaaatttacaggtgaagagaacctcatttacagaccaactctctccttatgattccaagcacagatgattatattactgtgcaagacacggagccactaaactcattcaaaaataaaaccatcacggaccagatgtaaatcaagccctcctgacactaaattctctatggtaagagatcaagggtctggcttataatcataacctaaaccttgacaccgtttcagcgcaatacattactattccgagtaactgatagtttctttccactacaggtgttcttcagtaaactagtacacagtacctcatctacaactcagaatcggcatttaaattacaggagcattcaaacagatgtgggtaaaaaggggatgccaatctcaagagcagctctagaattgagtcactcattctatcagattcccaaagatgtcttgaactctgtagatatttgtaaattggcacttttaattttttttatccgtttgtttaacgtatctgtcactctaagctgtgagcttcagtatagaagagggtgtaacattcacatttgtatctcctaggactagcagtgtctggtatatagcaggcttcgagtgcctgtgtggaattaaccacagaagtccatgctgcaaacaaaggaaaacggagaggaggcattttagttgagacgttaaggaatcaattaccctttagaaacagaccttgtgcctggccaggacagaatacaataactgaaggggcctcacgaagccggagtcaggcattacagccctatcttccttaactctccattgggtctacgcagtgtggccgctcgccctgcagagacaggccttcaggcccccgatccctgcgtccagacgggggtgcaaacaccacagagctcaatccagcttcagccgttctcccttcccagctccagcccagcttcggccccagactaaacccgggccgcgtctgctcgctccaggcacgtaccatgacagggcaattcaggtggcccacaggcgaacctggttcactcacctacttggtagagccgaccctcgggtgaaaaaatggtaatgtggcggtcaaaaccggcgctggaaccacgggacatgttggtagaagcactactttaaacacaatccctgggccccgtagctcccgcaccaggcacacaagcacctcccggaagttgcagcgactgcttccggggtaccagccgcgtttcttccgctcttgcatgccgaactcacggctctggagccagttcgagcactgagctctgaggccccgccccctaagggggtggtggagtgagggcgggaggcctttgaaggtatgcgcctgcgccaagcaggcctcttgagtggatagacgtgaaacttgggtcgtggcgctttcaggctttcatctggagaatgaattgactatagcaaggacgaaaaggcttcctgggggcccagaatagcgatttgcctatcagtgtgacctaaatagaacgtgtaattaacaagtctcttacatgcatcctgtgtctggtcagactgctggcttgccttcttcctaacctcttttatcctccactttcattcctattacgggggaaacaggttgcagctgcagctgcagccgttaaatttaggcactgaaggaagcgggttcaagcagccgctggaaagaacattattttctgacagccaggcaagatcttcttttggccagcagccccgacaatttttagtcttttttttttttttttttttttttgagacagagtttcgcccttgttgcccaggctggagtgcaatggcgcgatctcggctgactgcaacctccccctcctgagttcaagcgattctcctgcctcatcctcccgagtagctgggattataggcgtgtgccaccaggaccggctaattttgtatttttagtagaggcggggtttcgccatgttggtcaggcagctctcgaactcctgagcccaagtgatccaccttcctcggcctcccagagtgctgggattacaggcttgagccacagtgcccaggcaatttttagtcttgaaagcggaggccgggcgcggtggctcacgcctgtaatcccagcactttgggagaccaaggcgggcggatcacgaggtcaggagattgagaccatcctggctaacacggtgaaaccccgtctctactaaaaaatacaaaaaaaattagccaggcgtggtggcgggcgcctgtagtcccatatacttgggaggctgaggcaggagaacggcgtgaaccggagaggcggagcttgcagtgagccgagatcatgccactgcactccagcctgggcgacagagcgagactccgtctcaaaaaaaaaaaaaaagaaagaaagcctaactccagcctggccaacataggaaggccccgtctctacaaaaaataaaattagctgtgcgtggtggcgcgcgccagtagtcccagctactcggggggctaaggtgggaggatggcttgagcccaggagatccaggttgcagtgagctatgatcacgccactgcactccagcctgggcgacagaggaagatctatctaaataaaaaaaaaaaaatgtggaactgaggttgaaatacgagtaatggggaatgaggttaagcacccttgattaataatgaactagagctgaggggatggggcttagagcagctagtgttgcatggattaatgagagtaattccaagctggcgaggtagctccgggagaagagcaggtggcttttcaaatcgcaaatttgtgcctattttgactttccccaaggcacactcccatttaatgaatacaaaatgcaaaacataatgttaggatagttgtttttctccccagataaagatggtttgtgtacaaggaaggcaagatacactaatgtttgtggcactgtaatgcctgctgtaatactgaagtagggattcttactcctttaatgtatttcctaaactaactttctattttaaagaaaaaatgttctaagaccttcataagggaattccaatttctcaagtgtttttaaaaattaatttctattttattaatctaaaaaatcccaaactgaaacatggttaagaaaacggtaaatgcatacagcatctctggcacaaagggtactttccagcactggctagttcccaagtggactgataaaagttttcccttgcttctggttcaggtccctactctcaggaccaactcctcttgaccttttgaagacttttgtcttctcagactctgaaag

SEQ ID NO: 1241580 - DNA, 4001 bp, Homo sapiens
catacaaaaattaggtgggcatggtggcacgtgcctgtaatcccagctacttgggaggctgaggcatgagaatcacttgaatccgggaggtggaggttgcagtgagccaaattgacgccactgagctccagcctgggtgatagagtgagactccatctcaagaaaaagaaaaaaaaaaaaaaaagaaacaatgagaccaaaatgtggatggagttggaatctctggtgatactggcaatgggagtggaagaaaaatacatttttgttgttgttgtatttttagtagagacagggttttgccatgttggccagcctggtctcgaactcctgacctcaggtgatccacctgcctcggcctcccaaagtgctgggattacaggcgtgagccattgcgccaggccgaaaaatacattcttttttttttttttgagacggagtcttgctctgtcgcccaggctggagctggagtgtagtggcgcgatctcggctcactgcaagctccgcctccctggttcacgccattctcctgcctcagcctcccgagtagctgggattacaggcacctgccaccacgcctggctaatttttttgtgtttttagtagagacggggtttcaccgtgttagccaggatggtctcgatctcctgacctcgtgatccgcccgcctcggcctcccaaagtgctgggattacaggcgtgagccaccacgcccggcccgaaaagtacattcttataacatgtataaagtacaaactattcaatactgatttcctcacagaaacttcccttggtgtgttgatgaacaaagagttacatgatttgctttaagcagtaaaaagctctttatctgtgtaaagcagcaattgttccttagacgttctcttcaaaaacatggcctgaccagagtttatttctttaggagttggagatcagagggcctgacttagaaaagacccattacatcaaggatttgaccactcctgccagaatagcgctaagtgccaaaggacgtgacccttaatttgagccaacagctattatcagggttcagcttctgtgaacacagatttccttctgaacaaagcaagccttgagtagcagtttgtgagtatacagctatgcaaatactattttatggtgtccagcaatgctgtagtttaagctggctgcccctttttatgaatttacattattaattattagaatacatgaggccgagtgcagtggctcatgcctgtaatcccagcactttgggaggtcgaggtgggcggatcacctgaggtctggagttcgagactagcctgaccaacatggagaaaccctgtctctactaaaaatacaaaattagccgggcatagtggcacatgcctgtaatcccagctactcaggaggctgaagcaggagaattgcttgaaccagggaggcggaggttgcagtgagccgagatcgcgccactgcactccagcctgggcgagaagagcgaaactccatctcaaacacacacacaaaaaagaatacatgaggaagaagtgactgtaagaacagggaaaatttttcattttctgtcaggtgaaaaaaacatgttacgaaagagttcctagagaataagtatatatgtatagaaaaacaaaaaatgagtatatatgcatagaaaaatatatacgtacaacaacttaatagcaatagactgctcagccatggaacacaggatagaaaaaaaagcaacttgggattctagagcaaggtcattgtaaagaggaataaaatataagaatgatttattttcaaagaatcagtaatatagtacatctcaagcaacaagtctgagtgagggacttacctctccgaagacctgccatagccacctccaaaggaagctacttcatgaggtggaggctccatcccattctcccagcctaggacactaccctgctccagcagagccgcatggatggaatcgtcagggaattccactggcatcctattggatactgacattctctgttctgatgcagtcatagaaagcacaagaaaccttatttatttatttatttttgagatggaatctcgctctgtcatcaggctggagtacagtggtgcaatctcagctcactgcaacctccgcctcccgggttcaagcaattctcctgcctcagcctcccgagtagctgggactacaggcgcacaccaccatgcccagctaatttttgtatttttagtagagacggggtttcaccatgttggccaggatggtctcaatcaatctcttgacctcaggtgatcctcccgcctcggcctcccaaagtgctgggattacagacatgagtcactgcacccggccaggaaacctcttttaatagtagactttaaatatttagatgtgaactgaacttggtatctatataatgttctagtccatctgagagtgatgaggcaatctgacctggtctcattaaaatgaattaatgtctatcatattcaaaattaaagcccctactattgatttctcaagtatttgcttcttgggctggcttttaaatagcactgaagagatgagtgggacagtcattttaatgtgctcgaaattaactctctacatcaaatttcttgtcagaagttaccaaaaccttcctatgttactgctatttataacaacaaattaccacagttatcataataactcgatccattagataagagtatacttctgagggcactctggtagcaaaataatttttagctgccatcagtgactagataattgtcttcctgtttatttccattaccagttaaaagcaagttgtgtatgtagtagaacctctggaagcactcgtcagatcaaataatgccaaaaaaacccacaaaaacaaaaaactaaacttggggagagggaacgtcaggacatcatgaaaaagcataaatggagatgataaaagtaaagattatttctcaaattttattacatttattcatctgtgttcctgtctcttgtattttcatcctgttaatttctatggcttcccctctgtagagctctaaatggaacttcctttgtttatttagcacagactcaagcagactgcttgtcactggccaggactgggcaggtaaaagctggtcctatttcctttctgctcactcctaagtgccttttacaaatttcctttcttattcttgctcccctcctgcctcctgtagggctgctggactatagatagagatgcctcatttcaggctgtgcggggtgactcacacctgtaatcccagcactttgggaggctgaggtgggtggatcacctgaggtcaggagtttgagagcaaccggggcaacatggtgaaaacccgtctctactaaaaatgcaaaaattagccaggcgtcatggcgcatgcctgtaattccagctgcccgagaggcagaggcatgagaattgcttgaacccaggaggcagaggttgcagtgaactgagatcaaaccattgcactccagcctagatgaaaaaagatcaagactctgtctcaaaaaaaaaaataaataaaagtgagaaatctgctagaggaccaaggaagcagtaattatatttaagtgcatacttgagaagaaaaattaatttcctatgaagaataagccacctcagatgaggtagacccaacagagccctgagagaataaactcagccttcttccttgagattttctttccactgggtctgagaacagcaggaggaaaagtgtataaattcagaatgcaagggggaagcacaaagtattttagaaatacttttaagtggcaaagtcaatgctctttcaaatccttcattgttcacaactgattttaaagatactaacaatttaagagtacagcttttaaaataattcctccttcttgtggtgtccaggagcttgcttgacaggtacctttttttcactcaaatgatcagaacacaaatgggcagcctaagtgtctggtaccagctgcttccttcagggaatccctgcactcc

SEQ ID NO: 1241581 - DNA, 4001 bp, Homo sapiens
cagacagttcccactggcacagccacctctctcttgtcttcattctccagagggagcatcaggaaggaggggctggaaagaaggcaaagggaagaaaggaggaggggaagtctggcagcggcaccgccaggcccagaaagctggagagcaagggtgggctgtgggggatggctccaggcctggaagataaagccacatgagccaccaggcaggggactggcctagctactttctccctccacatccctctccggaagcctgcagggaagagaggaaaggcagggcagagggcctgggagggggagctgtgctgaaagagcatggaccctggaggagaaggcctggatctaagtgtcatccctgccacttactgtgtgaccctggcaagccacataaccctttgaacctgattcctcttctgtaaagagagactcatttttacctcaaagggttgcgatgagaactgcattcagtaaagggataatcattctagtcatgatggtcaagtcagagaaggagagcagataagacaagcccatcaccatccaaagggtgtctatcactacgcctcgttctgagaggggctgctcccttcccgggtgccccatcttaccatgctgacaaagtgatcaggagaaaaagacaaagacgctgaagctgagacacataaaggaccgaaactaagagaaactggggatgagatgatggaaaaaagcagagaagatggcaagaaaagagggtctagcacctagcatgcgtctggcatgcagtaggcacactgcaagtgttgaatgaaagacggacttggtgccaagaaggaggctggaccaatccactgggagtcaataggaacttgttgggcagagccataatagctctgggagtcatgaaaggatggagacttgcaataaatgaagccagcaacccatacaggctagagccagacgctgtgaggctgctgccagcgggaccctccccctgctgcccatcctcccacccactccccaggcctacaccatccccaaccaagtcctgcttctcacaccgtctcagtccctgctggcatcctggagtctcctggtgtcacctcccctggccccacagagagctctctatcttctgcagctctgtgggcagtggcaggctcaggatgggcatggctggcatcctcctctggctccggctccaggagcttctgtaactccacgtacagcacacaggcatcactgcgtgacacatgctcccatccactctcccgcacgtggaaaaggtctacagagccccctgaataggcatcacggtgggtggcgtgggccacggcgcagcgagccagggcgtaggcttcctgggtgctcatgtcgtagcgatagccacggtctagcacgccgtaggcatagggagatccagagcccacagagaagatgtccccctgcaggcgggtgccgtcgctatagacgtagaagagctcagggccagagcggtcccagccgcagagggcagtggccacacagagatccagtccccggtattgagacatcatggctgacaagagcttggcagcactggccacactgggcagctgaccctccctcagttcccgaagccgcagctcccgctgtaatacccgataccaggtagcacagtcggcagaggtgccagaggtggtacccaggaggtgctggtgcacagggatgaccttgcatgaggctggacacgccacatagctgccacaggaggaacgcgtgtcagctgcagcaatgactccatgacggaagcggaaggccagagtggtggtgccgtgggccagtctggggccatggatctgcaggaaggtttgagggtcacaaccccggggcacagcccagccgccagcccgaggcaggtgaggtgatggtccctgggtgtcaggggactgccacttgcacacatcctgcagagccatccctggggctgaatgaagtttggaagaagcaagccaggaatttgtggctggggtctggtgggataggagggacgctacagagaagctgggccacagccagaaccggccaggaaggtgtgtgagctgacgcttcatttctcctcaacccccaattcaggctttgggattggctgatggagcagcccccttcatctcagaggacagctgaaaggagacaggatgagggctgtagagtctccagcactaggaagacgctgccttcacggtcagaccttcaccttctgctgcccatgacgcatctgagagtcacccaaagagtctcctgtctgtcatcctccaactatctggagttgggcggggggggctggggtaatgcaaagaaacatgagcacaaatggatggagcagggctgggctccttgtttctcccatgcggggcactgggcacgtagagacaaataaggccctgtccctggcctgagagggctcccagcctaggacgaggtagacaattcagtggactgatgtggtcagaatacagcgctgtaaccccactgaggcaggagaccttggtgctggggactcccttcagagatatgggagcaaggaactcagctcatacttcaaactcaagggaaagatggggaaagaaaaatggactgaggctgggcacagtggatcacaccagtaatcttagcactttgagagaccaaggcagggggatggcttgagcccaagagttcgagaccaccctgggctacatatcaagacccccatctctacaaaatatgtaacaattagcctgggacaggctcggaggctcatgcctcccagcactttgggaggccgaggcaggtgaatcacgaggtcaggagttcgagaccagcctggccaatatggtgaatccccatctctactaaaaaattagctgggtgtggtgacgcacacttgtagtcccagctgctcaggaggctgaggcaggagaattgcttgaaccagaaggcggaggttgcagtgagctgagatcgtgccactgcactccagcctgggtgacagagcgagactccatctcaaaaaaaaaaaaaattagccaagcatggtggcacatgcctgtagtcccagctactcaggaaactgaggtgaaaggatcacctgagtccaagaggtcaaggcttcagtgagccgtgattgtgccactgcactcctgcctgggcgacacagtgacaccctgtctcaataaaaaataaaggaaaatttaaaaaaataaaaataaaaaaggccgcacatggtggctcatgcctgtaatcccagcactttgggagacagaggcgggcggatcacctgaggtcaggagtttgagaccagcctggccaccatggtgaaacccccgtctctactgaaaatacaaaaaaaatcagccgggtgtggtggtggatgtctgcaatcctagctgcttgggaggctgaggcacgagaatcgcttgaacccgggaggtggaggtcgcagtgagctgccattgcactccagcctgggcaacaagagcgaaactccatctcaaaaattaattaattaattaattaattaaaagtggactaaagcaaagacgagaaaaaagagcaagagaactttgtaacagcggagaggagaaagaggctgaaatatcttccacaaaggcagattgctgaggaatgaaggaaactagaacctgaaggtctctttctcccttgctttagagataaatatgtccttctatctgtatacagagaaggcattcctgacagttctctggcagtatgcctttgacttgtgttgaagtccaaaggatctagtggccttctagctcctgctcccccttctgcctaatagttcacaatggcaacagagtggcttgtaattccagggcaggagaaacaactgatcttaactccataatgttgagtctataagtcttagaccaaccaggggtgttagagtggtggggttggtggaccctgatagctgacccttcagaaagtcgaagtcaaggccaagtgtgttggctcacgcctgtaatctcagca

SEQ ID NO: 1241582 - DNA, 4001 bp, Homo sapiens
caggaaaaaaaaaaagagagaaggaagggctaaggacctaattacacttcttcagcattgacaccaagccctttaattcatctgtccatccaacccctcctcactgtagtgtcagcccaaggatcatgtggttgcagcttaactcaccagggcctctcttatcccagccacagatcatggtgcccatggacagccccatgcctttgtactgatacaccatgttggcaagcagtttggaggcagctgctacagagatgcgttccttatttcgaagctcatagattcgacattgccgagccaacagccgttcccagaagctgcaatccgctgcgcccccagccatggtgcctagcaggtatgggttgatctctatcaccttcttcaccgtctgggaggcaatgtaagcacccgctgtagccctggagtcagctgcaactatgactccatggcggaactgttaagatcagaggaaaacacaaaacaggccacataagaccacaaaaacactcctacatacttctttttgcatcaatccaaacccagcacatctctttctccgtccttttatacttcacagtatacttctatacttcaccatatattaatgtcacccgagcttcacatcaatcccttgacatggatataacccatattaaattcattttataggatgggcgtggtggctcactcctgtaacccaggcattttgggagaccaaggcgggaggaccgcttgaggccaggtgctggagaccagcctgggcaacacagggagatccatctctacaaaaagtaaaaaaacttagcctgtcgtggtggtgtgtgcctatagtgtcagctactctggaggctgaggcgctggagccactgcactccagcctgagcgacagcgaaaagccctgtttcaaaaaaaaaaaaaaaacaaatcattttatagatgaggaaacaggttcaatgaaatcaaatgatttctcaatctagagctagttattgcagagctgggcaaggaaccccaaatgtctgattcttagtacaatgcttaccctcaccacgcttccccttcatgccagtttcagttacccctgccttgaggggccgcccagtttccaaaactttggtaaacgtttacaatagccttccctcggccaagattcattgttgttgcggcctttcccagctagaagatcctgaacagcagcaacctggggtcgcctaggaatcaacccaagaggcctcaccttcctcccccgacttacccccggccccaccgccaccctttccaaccagagcaaagacaggggcctcctgggccaatgagacagcaaaactgctgcggtccgaacgagaggacccagcctccgcctgggttggtggccaaggccaccgcaaactccggtcaggctgggaggccaggcaagtcgcgggcgttcagtactcagcctggcaagggggctggctccacaccttgaaggccagggtggttgttccatgaagcatttcgattcctggctcttctgggacaccccagcctggcgcggccaggctcagaccatcactgagactccctggacctagatccagcagatctgcacgacccccaagtccgaaaaacccgcgctggttcaccggtagcggtctctccaacacgctggcaagcgccatgtctagtgtgggcagaaagaactaattctgagaacgcctagcaaagataggccgggcaacgcctcgccgtcacagcttcacttcctattaaatctattccggaatggagccattttgactgctggcaagcacgcctccaaaaagaagagccagatgcgaaagaccattttcactgaagggggtcggggaaatagatggcttcactaaccttaaattctaaaaggacgtacctgccatcttggctttggtcatgcaagtagtcctggatcagaataacctcaaaatcacaggaagtgactgaaaacgtccatgttgcgtaagggaagtgaggtcggccatctttgagaagggcgtgactggttgaaaatcggttctgaacccttagcggtgagtcctcccactccagcctggtgtccaagcaacaggttacatcgctgctgcttcagcaccttgttaacgcgcctgaggttgccatcttgtttaagggcaccttctaaaattgggtaaaataatgatccattctgaggccatttccctatattagttaaaccacagcaattagtggtaaaacaacgcaacaaaataaaagtgctatacctcttgttgtcagtcgccatacagcaacccttctttaacagtaaccggttattaatatccaatattcgttctcttgactcctaccttctggtggaaattcgaataagtaatgaattgcctaaaaggcagatggaagaagaaaaagcaaagggtccagttaatccacaaactagattctcagttcagacctgaataagtgtcagtagtaatttaccatctcagagacgggaggacggttgagactgcataaatatgtaccaagagattctctaacttcaacttgctaagatgatgccttttattcaggaacatactatatttcattgcctcttcctccctccacccaccttcatttttcaaatcttttgggaactataacaaaccgggaagtgtgcatatgtatgaaatgttgcctcctgctttatggttctatgaagtcagtctctggccttccttgttggattctagcagcaacatctatcaacaccgaaattccactttcctctgatgcccagttcggccccatctttcccccagcagactctgcatatgctgtattgtttttgtttgtttgtttgtttgttttttgagaccaagtcttgctgtgtcccccaggctggaacacagtggcacgatctctgctcactgcaacctctgcttcccaggttcaagcgattctcctgcctcagcctcccgagtagctgggattacaggcgcctgcctccacaacaggctaatttgtgtgtgtgtgtgtgtgtgtgtgtgtgtgtgtgtgtgtgtgtgtgtttagtagagacggggtttcaccgtgttagccaggatggtcttgatctcctgacctcgtgatccacccacctcggcctcccaaagtgctgggattacaggcatgagccaccgtgcccggcctcacgcctggctaatttttgtatttttagtagagatggggtttcaccatattggccacgctggtctcaaactcttgacctcaggtgatccgcttgttagccaggatggtcttgatctcctgacctcgtgatccacccacctcggcctcccaaagtgctgggattacaggcatgagccaccgtgcccggcctcacgcctggctaatttttgtatttttagtagagatggggtttcaccatattggccacgctggtctcaaactcttgacctcaggtgatccgcttgccccggcctcccaaagtgctgggattacaggtgtgaaccactgcgcctggcctatgctgtatttttaatgctgaaattggcaaccctttccaagcccaatcatcagaatagaattaaacaggagatctttgtgtttcacacttggatgatgtggaaaatgcggagtgcgtctgtttactgagcatatattattttgcagtcacccctgcagtgcaactagtctttctgcctccttccagtggtttttcactctgccactgatagcatgtgtacctctcttaaggcccttttacattttacctggttagaaattacatttatctcctaccggattgtgagcttttaaatacaagtacttactattcatttctgtacccactgtatgcttaatacatatttgccaaatgaacacctgaaagaatgacagcagtggtcttctagtcaaaaaggcttgaagtccttgcttatcttttacagcttttttctttccttcatatccagttagttgcatggtcctgttgattatttccacttcagtgtttctcacattct

SEQ ID NO: 1241583 - DNA, 4001 bp, Homo sapiens
cggaggctgcagtgagctgagatcatgccactgcactccagcctgagcgacagaatgagacacagtctaaaaaaacaggaaaaaaaaaaagagagaaggaagggctaaggacctaattacacttcttcagcattgacaccaagccctttaattcatctgtccatccaacccctcctcactgtagtgtcagcccaaggatcatgtggttgcagcttaactcaccagggcctctcttatcccagccacagatcatggtgcccatggacagccccatgcctttgtactgatacaccatgttggcaagcagtttggaggcagctgctacagagatgcgttccttatttcgaagctcatagattcgacattgccgagccaacagccgttcccagaagctgcaatccgctgcgcccccagccatggtgcctagcaggtatgggttgatctctatcaccttcttcaccgtctgggaggcaatgtaagcacccgctgtagccctggagtcagctgcaactatgactccatggcggaactgttaagatcagaggaaaacacaaaacaggccacataagaccacaaaaacactcctacatacttctttttgcatcaatccaaacccagcacatctctttctccgtccttttatacttcacagtatacttctatacttcaccatatattaatgtcacccgagcttcacatcaatcccttgacatggatataacccatattaaattcattttataggatgggcgtggtggctcactcctgtaacccaggcattttgggagaccaaggcgggaggaccgcttgaggccaggtgctggagaccagcctgggcaacacagggagatccatctctacaaaaagtaaaaaaacttagcctgtcgtggtggtgtgtgcctatagtgtcagctactctggaggctgaggcgctggagccactgcactccagcctgagcgacagcgaaaagccctgtttcaaaaaaaaaaaaaaaacaaatcattttatagatgaggaaacaggttcaatgaaatcaaatgatttctcaatctagagctagttattgcagagctgggcaaggaaccccaaatgtctgattcttagtacaatgcttaccctcaccacgcttccccttcatgccagtttcagttacccctgccttgaggggccgcccagtttccaaaactttggtaaacgtttacaatagccttccctcggccaagattcattgttgttgcggcctttcccagctagaagatcctgaacagcagcaacctggggtcgcctaggaatcaacccaagaggcctcaccttcctcccccgacttacccccggccccaccgccaccctttccaaccagagcaaagacaggggcctcctgggccaatgagacagcaaaactgctgcggtccgaacgagaggacccagcctccgcctgggttggtggccaaggccaccgcaaactccggtcaggctgggaggccaggcaagtcgcgggcgttcagtactcagcctggcaagggggctggctccacaccttgaaggccagggtggttgttccatgaagcatttcgattcctggctcttctgggacaccccagcctggcgcggccaggctcagaccatcactgagactccctggacctagatccagcagatctgcacgacccccaagtccgaaaaacccgcgctggttcaccggtagcggtctctccaacacgctggcaagcgccatgtctagtgtgggcagaaagaactaattctgagaacgcctagcaaagataggccgggcaacgcctcgccgtcacagcttcacttcctattaaatctattccggaatggagccattttgactgctggcaagcacgcctccaaaaagaagagccagatgcgaaagaccattttcactgaagggggtcggggaaatagatggcttcactaaccttaaattctaaaaggacgtacctgccatcttggctttggtcatgcaagtagtcctggatcagaataacctcaaaatcacaggaagtgactgaaaacgtccatgttgcgtaagggaagtgaggtcggccatctttgagaagggcgtgactggttgaaaatcggttctgaacccttagcggtgagtcctcccactccagcctggtgtccaagcaacaggttacatcgctgctgcttcagcaccttgttaacgcgcctgaggttgccatcttgtttaagggcaccttctaaaattgggtaaaataatgatccattctgaggccatttccctatattagttaaaccacagcaattagtggtaaaacaacgcaacaaaataaaagtgctatacctcttgttgtcagtcgccatacagcaacccttctttaacagtaaccggttattaatatccaatattcgttctcttgactcctaccttctggtggaaattcgaataagtaatgaattgcctaaaaggcagatggaagaagaaaaagcaaagggtccagttaatccacaaactagattctcagttcagacctgaataagtgtcagtagtaatttaccatctcagagacgggaggacggttgagactgcataaatatgtaccaagagattctctaacttcaacttgctaagatgatgccttttattcaggaacatactatatttcattgcctcttcctccctccacccaccttcatttttcaaatcttttgggaactataacaaaccgggaagtgtgcatatgtatgaaatgttgcctcctgctttatggttctatgaagtcagtctctggccttccttgttggattctagcagcaacatctatcaacaccgaaattccactttcctctgatgcccagttcggccccatctttcccccagcagactctgcatatgctgtattgtttttgtttgtttgtttgtttgttttttgagaccaagtcttgctgtgtcccccaggctggaacacagtggcacgatctctgctcactgcaacctctgcttcccaggttcaagcgattctcctgcctcagcctcccgagtagctgggattacaggcgcctgcctccacaacaggctaatttgtgtgtgtgtgtgtgtgtgtgtgtgtgtgtgtgtgtgtgtgtgtgtttagtagagacggggtttcaccgtgttagccaggatggtcttgatctcctgacctcgtgatccacccacctcggcctcccaaagtgctgggattacaggcatgagccaccgtgcccggcctcacgcctggctaatttttgtatttttagtagagatggggtttcaccatattggccacgctggtctcaaactcttgacctcaggtgatccgcttgttagccaggatggtcttgatctcctgacctcgtgatccacccacctcggcctcccaaagtgctgggattacaggcatgagccaccgtgcccggcctcacgcctggctaatttttgtatttttagtagagatggggtttcaccatattggccacgctggtctcaaactcttgacctcaggtgatccgcttgccccggcctcccaaagtgctgggattacaggtgtgaaccactgcgcctggcctatgctgtatttttaatgctgaaattggcaaccctttccaagcccaatcatcagaatagaattaaacaggagatctttgtgtttcacacttggatgatgtggaaaatgcggagtgcgtctgtttactgagcatatattattttgcagtcacccctgcagtgcaactagtctttctgcctccttccagtggtttttcactctgccactgatagcatgtgtacctctcttaaggcccttttacattttacctggttagaaattacatttatctcctaccggattgtgagcttttaaatacaagtacttactattcatttctgtacccactgtatgcttaatacatatttgccaaatgaacacctgaaagaatgacagcagtggtcttctagtcaaaaaggcttgaagtccttgcttatcttttacag

SEQ ID NO: 1241584 - DNA, 4001 bp, Homo sapiens
tcagtgggattcctgattttaagagaccctacagttataggacaatgcttaacactgagcaatgtctcagaaatggtggcatttcaaatataaagatgagtgaacttactgattagaagggcccactcagctccctcaaatcagctccacacaggcacttctaaattaatacaccaacacttcttcacctcttgggcattttacatgtttctcagtcttaaataacaagtacatcaattactgaacccctactatatgccaggcagtgtcctaaacattctccaagtattatcccacttaattcttacaaacacgatgacactggtaccatcattaccccctcatttgcagataagaagaccaaggcccagagagcttaaatgacttgcctgttgtcacaaagcttgtcagagatggagccaggaatcacattcaggtttgctgaatgccaaaacctgggtgtttctctactgttctagaaaaaaaacgatggggcttgtgttccagcacagccacttactgtgtttccatttcttccttatcaaaatgaggacagtagtaattacctcgagggaactgttgtaataaatgagaaaatgctggaaaagtacttggtacatgcttagaatactacccagaaatccgtataagacctctatgaggccgggcgcggtggctcacgcctgtaatcccaacactttgggaggccgaggcgggcggatcataaggtcaggagttcaggaccagcctggccaacagagtgaaacgccgtctctacaaaaatacaaaaattagccgggcgtagtggcgggcgcctatagtcgcagctacttggaaggctaaggcaggagaatcgcttgaacccgggaggcggagatcgcgccactgcactccagcctggacgacagaccaagactccgtctcaaaaaaataaaaattaaaattaaaataaaaaagacctctatgagatctggccttcttgccgttcatgatacaggttaaacattcccatctcaggtcctttgcacttgctgtatcttctgccttgaccacatttccctcagacatctgcaggggttactccctcaatttcggtccgctcaaatttcacctcctcagagctaccttcgctgactctataaaaagcagccactcctccaagctatccctttctatacaataaccatacaacaatgaccaccccacccctgacatcatattacatatttctgatgattgtctgccttctgctctagaatgtacgcactatgaaggcagggacttcaatcaatcctcagtgtctacaacagaagctagccaaaagtttaacaacaacaacaaaacaccaagtgctcagtaaatacttgtttagtgaattgatgaataaatgctagctgtttttattattactactgcaccacgggccctttccgtcttagctccgcctgtcataacaacgtctttaaggcctccttcaaatgcccccagctccgaaaggccttccacgactccgcgctcaactcctcaggtggaatgaatcccaccctcttctccagcacccttcacctgcccgactcaaaaagcatttttcccggtgactcgaggaggcgcccccgaaactcccagcgccgatcagcaaagccctggtcggcggagcagcaaagccagcggcctgatccgttctgccgccccacaagaccacgcaggagaccctctctctgctctgagccccggccccaggatccccgggcaaggcccgttggtcggccccggcccgcggtggacatgagcgcggtctctgggagcctccacccgccgagaagatcaggccggcaaaaggagaagagggctgtcccagttcctcgggcagccgcctctttctctcgcctcaggctgctgagaccccatcgcaccgcgacgaccagcggaaagaaacccttagtcactcaccatcttgccttggccacttgagctgccgctgccggaagttcctccaccactgcggcccgccagaggcggaagtcgttagggacgctacggaagctgataggaaccaaattctgcgctgaccaagttgtgctccaagggcttgtgcgggcggtctagggcaacgcagcagtttataagcataaagtgaactttataaatattttacttgaaagaaatttttgaatacccgttatgaggcgcttgtcaacaacttaagacaatgacccctactgtcaaagaattaggacaatcgtgaaaatataaaatatttaaattatgcaaaatttataactgggaagaactttatggttctaaaaactggaatggtatttggaactgggaagttgacatatacatttgcacaaatatttcagttattattcagcttctggaatttaacctgcacatctgggagtatgtgtgtaacgagtcttctaaacctgtctttttctgatgacctgtgacttgtgatgatgccaaatgtcttaaattcctcatcttgaagctgattggtaaagttcctcatttgttacaccctccaggacatcagaaaaatggcaacaatcccttctgtttctggaaatttcattaacaagtgctcaaaatactgcatctttctgaactggagaaatggatgattttttttctgctccagattgatttagggattttagttgtgaaacactaaaaatatttcccttatgaacacacaacaggtatacttcttccttttcatcatcactgcaacacggtaatagaaagtcttagcactatcgacctctgttaacaaatctggcatctagtgtacatgacacatgaaatcacacgataggacagtatcacacataggatagagatggtgaaactcccatctctactaaaaatacaaaaattagtcgggcatcatcgtgggcatctgtaatcccagctgcttgggaggtcgagtcatgagaatctctcgaacctgggaggcgacggttgcagtgagatcacgcccctgcactccagtctaggtgacagagcgagactctgtctcaaaaaaaaaaattaataaaaatttaaaaaacaaaataaatatcctttccctaatgcattttacaagaaacaagtaaatagtaaaatatatagtatgccacatagtggtaaatgccataggaaaaattaatgcctaggaaaaatgcctaggattaggagcatgcagcagtggtgggtgattttaactttaaattggatgatacttgagcaaaagcccgtaaggcatgaaggagtaagctattcagatatctggtggaagagctttctaggtagagggaacagccagggcagaggccctgcagtagaagctgcagaggatggagattagagacaccatatagtgaagaagtcagaaacaggcacataactcccagtggaagctcagcggttaaaggcgagtcaatagaacccagtaatgaagagagtagccaacgttggcatcagactttcctattgtggctgtaggaagtgacataaagtaagcagaaaatttaagtttatctacataatggacagctaagagaaagcagggagaggattagaaagactacttggagtgctcagcacttggggaggttggaagttgcaagtggaaaagagggagagttgcagagatgactgtcaaccgggtggggaggattgagagtcagccatagggcaaaagagatgcacaggggctgggcgccgtggctcacgcctgtaatcccagcactttgggaggccgaggcgggtggatcacctgagttcaggagttcaagaccaacctgaccaatatggtgaaacctcatgtctactgaaaatacaaaaattagctgggagtggtggcagatgcctgtaatctcaggtactcgggaggctgaaacgggacaatcgcttgaacctgggaggcggaggttgcagttagccgagattgcgccattgcactccagccggggcgaaaagaaggaaaatccatctcaaaaagaaaaaaaaagaaa

SEQ ID NO: 1241585 - DNA, 4001 bp, Homo sapiens
taacagttctgaatgtctaaatataaacacaggtaactgatgatatctaacacttttaagtcctctttaaaaatgacattaaaataaaatgtctgttttccagttctaaaatacttttatttctaagtggctattaacagatctgactgagacaatgtaatacagtagaaagtacggaatgccaggagtcaaagcccatggtttgaattcaggctttgttaataactagctatgtctgaacaaatcatccttgtgagttatgggcataaatgctccacctgcttgcctcaagaattagagacaataacttacatgaaactgctttgtcaatcatcaggcactatacaaatataaagtattacctgtcgacgacaacccacaacatatcttggtccattggtagctttaacaatgactagaagaaaaaacataaaagaactaattgaaaaatagaaagtaaaaaaatacatacccacgttgacagagggtttagttgtatttctgtcctccaaggagacattagttgaaggaaaacttaagtctattcaaaaatactctctctctctgcattattgtcattaaaataataagcatttcaaaagtgagagagaggtggactgtttctttactaattaataagctaattcatcactcacatttttcttcagttaactgtttaagcacttcacccacgatctaaggaagaaaataaaaagcattactttttggcaacagctaaataaaaaagcaaattaccatcaccccctattccccaaactccatcacctacctgcccaacactctgtagggccttcagatcattttcagacttttcatactgcttggtaagttcttttaattgttcccttactgaaataatacaatttgaacatttttaattgaacagtaatcttagtgtgtttaagtcgctacgtctcactttactgtttacgtaagtctacttcactttacctaagtttcacatccactgtttcaaaccataaaagaaataatgctgtttgtaatgagtaggtggcatgtataacaacaaaatgttacagagaaagcaccatacttttactttgttgatcggcaatacttgtttaagcacatcttaagttatagtcttagaagatattgacaccctgacacttaggatttgcgactacaaatccgaatgataatcacttagacccttcctcacctcttcacctacccacgtggattgttctctgacattctaccctaaataaagtcaacaaatgcagttctccacagaatcatgtaattatggtcctccatttaattaaactactcatgcttttcaatgaaaatgcactggaaaaaaaagttaagcactcaggaggtaagggaaatttgtatgcctgatacagtacaacacgaaacacaagacgatatgggttattatgacaactggaacacttctctcttaagctccgcggccgtctttcgactccaagaacaagccgactccctgagtctcatctcttgtttgagcttacttgactcaagcgccttcccctctccaagtcccgggactccaccaagactgcccttcttgcaccctaacctgggaaacatcctcggcccacttccccactcctcctctacttctttttcattttcacctcaaggccgccgatgttctgtcacccgggctggactgggccatttctacacccgaaggagtgctgctccacaagctcagggccggatgacaaagcgccttgtccctggccctaggcctggtcatctctaaggctcggttgccgggctcggcgaaaggcttctgctttgtcagaggcagaagcgagtcgaggcacttgattaaatggaaagaaaggtgcactcacactccttaagacggccgtcgatctccttgtgttcaagcaacttcttgcggtagtcctgaagcgccttatctctagggtccgccatgatgagaagccgtctctcataggggatgccgggaatggccatggccgtccgggcgggggaaggggcggggcgaggggcgaaaccctgcctggaggggtgggttcgcccatgagccctccccttccggttggccccgtctttctactccacttccacctctatgtctcggttcacctagagcgccggcatacactgaaagaggcctccacctataccgtttcttgcaagccgagataggtaaagcaggactcagttatcccggtcttcccctgagaggcctcagtattaagtcactgctgtcccggaagtataaaaggctctgtaataaactgagatggaagtgaagtaggaaatgtgtaatacctcaaaggagttccgatggcctgtcgacacaacacagatggcctttgttataacacagtactgtccaagacctccacgtgctggagaagtagacagttttattcatccattcagtcagtgaatgaggtattaaaggtagatctgcttatcatttgataggaaataataataaaaaaaacttcagagtttaacaaatactgtgaaggaattaaaacacggtgagaagtatggtgggaagaattaatctagaacagatatctgagatgagaaggagccagccttgcaacaactgaagaaaacctaaacaaacagtgcaagtcctggagtggagtggggtgggggttgtgggtagaaagcttgactcacttccaggaacagaaaggaggccaatgagaccagtagggggtgggttgtagagatgtggggtacaagataaagatgctgaagtaggctgaggcaggaactttgaagtctgatagaaccttcagatttatgtatttatttatttacttttgagatggagtcttgctcctgccgcacaggctggagcggtgacgcgatctcagctcactgcaacctccacctcccgggttcaagcaattctccttcctcagcctccggagtagctggcattacaggtgtgcgccaccacaaccggctaatttttgtatttttagtagagacggggtttcgccatgttggccatgctggtctcgaactgctgacttcaggtgatccaccctcctcagcctcccaaagtgctaggattacaggtgtgaggcactgcgcccggccagatttttttttttttttttttttttttgagtctgtgtctcactctgtcacccaggctgcagtgtagtggtgcgatcttggctcactgcaacctctgcctcccgggttcaagcgattgtcgtgcctcaccctcctgagaagctgggattacaggcgcccgccaccacgcccggctcatttttgtattttcagtaggaatggggtttcaccatgttggccaggctggtctccaactactgacctcaagtgatccgcccgcctcagcctcccaaagtgttgggattacaggcgtgagccacgacgcctggccaactttcagatttttgtgatttggggaaaattacatactccctcaatatctctgtaaaatgatcataataattgcacttatctaatggggttgtcatgagtattaaataggataatgtgcctaaacacaacatctgccacatggcatgtactcaatagtgttcttttgaatagatatttattttaagggtagtaatgactccaatttttgcattacaggtcctcattgctatacctcttgctatcattgttcctggggacaattaattgttgtccaaaaaacatgagtaaaattctccaaatagattccatttggtctcaccttatccaatggccatgaatgtttgagtttaaatatatacatcctaaatatacaaataaagtacaaatttttgtaaattaatgacccaaagtcacataaaggatgccttcaaatttattaggaacaattctcatgggtattgtgtgaatattccattctatttttcttttttttttttttttttttttttttttttgagttggagtcttgctctgtcgccaggctggagtgcagtggcgcgatctcggctcac

SEQ ID NO: 1241586 - DNA, 4001 bp, Homo sapiens
atggactagaaaagagcagggaagtggggcagcgctctcacctggacagccactccaaaattgttaccatcctcaatccgaggtatctgcagctgcaaccaggtggtgacctgggaagagggaatggcataatgccacatcagccctctacccaattcccagtttcatattctcccttgcttccctccccacactgggtggaggcgtgccgggtctatcctgagccccagggcctggacttctggtttcacttgctgtgccctctcttgctaaaacctggcaagtgccaggccctaaatggcagggaccaagaggacaatggtttgacttgaagcctgagagtttaagggggagggcttaccaggttgagctgctcaatgacatccttgatctcaggcttcaagcgctgcagaaggaccacgatcttttcattgcagttcactgggccacagggaggacctagagagtgagcaatgggtcagtcacatgattgagcctgtgtgaggggcgaaggggagactggaaagaaatccttaggaggagctcctgtgagtgggactcaagtctcttcccaccattgtggtttcaagtacctttgtcttcatcctcccccttcttcttttcatccttgtcttccttctgcagaaagagaggagctcatgagagtcaggactaaggttgattacccccatagttggatcccttctcccaggtcttcccagcttgcctcctgctgtttcttccgctcctctttctctttctccttgactggatcaggcactgggatgtccaatggggccttcagattgctcaagttggcttcattgagagctggctcctggtgtagggtgggaggagggctggaggtgagggagttcctctcacctcactctcacagcctccagactcttctcttggcctttactccctagctccctgcccagccgcggtacctttaaaaatgcatccagctcagaaatcttcttggggaaatagctcccgagcaggttctctgtctgtgtgtgaggtgggggtggaggaggatgggagtcagcatcaaatgcccgtcctaggtagtgaggcagggttgagcagtaggagttgggcaggggtggggccacgctgatggggcatgtcttaccttggtacagaggtcttcacgaaacacatccacctgtggggcacacgcatcccttcagaaacttggctttaaggccagttcatttgaggacagttcccttagggttatgtagggcctgacctggggaagggtggaggggatccctctaaggccagacctgaagaaagcgagatggatgcctgtagggtgggttggggtggtggagaaggtggatctctgcagacctggatctacggaaagtggagtgggtatccctggggctggatatgggggatgagaacattcctggcggtgaagggccagtgttcacgtgagaacagatctctggggtcgcctggcaggtgtgaggaggggtgctgagagtcctctgcaagtaggacagggatggggtgggccccgggaccctccctgagggaaaggccagaaggtagctggggcagtcccgcacccagtctgtgtgtggccccggccccaggccagcggagttcccctccacgccagctctccgcttcacctcaccccgcagaaccacggccgcctcgcctctccccgcaggcagcagtcgccgccctccccggggcgcaggtgctccgggcgcgccagctcggccgactgcccccgactcgcgtgggagcctggggggcgggtcggggatgcccccggccgctccagccacgcctccccagtgggccctttctagaccccgcggcgctcaccttggcttgggcctcgggctggaccctgagcatggccatgaccgggacggggggcctagcgccgcacaaggagtggagtgggcaccgcgaagggaaagcgaaagcggtagggcgctcgcacccagctccgccttcctgggtagtggggcggggagggctggaggaggcggggtcggatggaggaggcggggtcagccctgccatggaaggggcggtgccgcagaggagggcggcgggtgaggctccgcctagcgcgcacaggcgctcttcacccaccctccccgcgccgcctcgcgagggccagcttccaggctccccacctccgctggcccggtccccgcctcccgcctcccgccacctgccgcccgccgcctgaggacggcgggtccgggtcctcccatcgccaagcccaagccagtctctccgcgtcccaacctccacctcccgcctcccaactggctccccacctgctctcttcttcccctgctccgcctgggacagataagctttacttagggctcttccgtctttccctagagatggaataagacctggcctgtctttcctagccttgctagcgtgggcctctggctctgccgacatcctgcgcacctgtagcaacaccggcaccagagctggcagcatccctatccaagcccggaccaactctctcctggaccacggctgcagatgccattctataacccactctcacggagcagcgggttcatgcctctctctggcttaaaaccctttctcagctgcctgttgacctttgaatgaaatccaaaaggctgtcgcacctgtctcccctttaagtccactttctactgcttgccccttcattcattacacttgcaaatatttgggctatttgtttctcagatgtgtcatgttcatttctgcctcagggcctttgcccttgctaataatccctttgcctaaaacacccttaccctgggtgttgtcattcggttctcagtttagatgtcacctcttcagagagaactattttcatcatcctttataaggaacctccctccaaatctattacaaatcatcctgttttagtacattcatagcatttatctctctgatattagccaggtgtttttttttttttttccaggataatttactgatttaaaccaggttttggcaaacgtgtgtgtgtgtgtgtgtgtgtgtgtgtgtgttgggggacggagtctcgctctgtcgcccagggtggagtgcagtggcaccatctaggctcactgcaacctccacctccagggttcaagcgattctcctgcttcagcctacggagtagctaggactacaggcgcgtcccaccacgcccggctaattttttgtatttttagtagagacggggtttcaccatgttagccaggatggactcgatctcctgacctcgtgatccgcccgcctcggcctcccaaagtgctgggattgcaggcatgagccaccgcgtctggccaactttttctataaagggccagagagtaaatattttaggctttataggccttacagtgtctgtctactcaactctgccattgtagtaggaaagctgccatatgtaaatgaattagtttggtgagataacattttatagacactggaatttgaatttcatgtaactttctcctgtaataaaatattcttattcttttgctttttcaaccattaaaaaatgtaaaaatggccgggcacagtgactcacgcctctaatcccagcactttgggaggccaaggcaggcagatcacttgaggtcagaagttcgagaccagcctggccaacatggtgaaaccctgtgcctactaaaaatacaaacactagacgggtgtggtggtgggggcctgtaatcccagctactcgggaggctgagacaggagatcgcttgaacctgagaggtggaggttgcagtgagccagaattgcactccagcctgggcaacagagtgagactctgtctccaaaaaaataataaaaataaaataaaaataaaaatgtaaaaaatgttttaccttttaaaaaaaatttttatacagacagggtctcaccatcttgcccaggctggtctcaaactcctgggctcaagtgatcctcttgcctcagcctcccaaagtgctgggattaca

SEQ ID NO: 1241587 - DNA, 4001 bp, Homo sapiens
ccatttaacagatgaaaaaactgagtcacagaatgtctaagtgacttacttaaggctaccagctaggtaactgatagaatcacgatttgaacctaagcagtctctctctagggtccaatcttttaaaacaattcactcactatatcataccacctctactatgaacccaatacagcagtaggttctgaggttacagagtggatactgcacagtctctaattttgggggtaccgttgtgataagagaggtctaacagaacgaggagaacaaaggggatctaagcccaaggcacagaaggaagttttctttttcaggactaggtctctgtatgaaggacttgtatctacggaggagtccagggcctcaccttgtgtgtcttctctttctgcttcccccatttcccaggcttaccagaatgcatttctctttgagagtccagacttctggcttaaccagggcaagcagggacaggactttctcattcccagggagaaatccacacttatggactgtgagaaagaggggattcaggccctttctcatccagtagtcagtgtgccatcaccccttccctagtcacctcttatctctcttaccttctttcttctcctgcttatctgtttccatctaaggcaaaaaggggggaaagtagctttagaaaagtcacagaggttgaagggctatcttctccattgggtttatagtccaagtcctgcaccctgagtgcctcacctcatcatccttgggtggagggtctgggatggggatgtccagtggggcccggagggaagtcaagtcagccacattgagggagtcctcctgcacagagctcactgtcaagggctgcccaacctcttcccttcatcctaggtcacagccttccctccatacatcccacttgcactctgcctcccaacctaggctcatgcctcacgccatcctaatgttcctaatccactatttgaaactattctctgcatgctgaatccagttgttagctagagagggtgggcaaaggggatagaggacataggatggggcagaaggggcccacactactcacttgcaagagctgattcaggtatatgattttctgtggcaagaatctgtagaggaattcctcagcctgtgggttacattgcaagggaggggaatcacagaatatgctcaatgagatgtctgacaaatggaactggaagggcctttggaaatcactgggtccaagacttgcaaatgaggaaactgaagacctgaaaatgaaaggacttgcccaagctggtaaatggcagaacgaaggttaggactgtgatattcctgctttggaagccatggtttttttcctccacatcaaaagacgggagaagtgccagaagtcgggagagtcataagaaaggtcagattaaaggtagctatcaataattccggggttactttgggtgaaggcttggtaagggaagtagggttaagtctagggtgacttgggggggtcattctgagaggctgttatcctcaagtattggtccaagattctgggtcaaatcgctcaaatccagagacttacctcctggaaaagattctgtctgaagacctccacctacacagagagcagtacccggatgttggttaagggtctgggttgtcaaaagcttccacccacaacagggtgccctcgaactgtggctcaggcctttctcaccacaaactagctttccctggaagctcctgctcactgcagtcagaaggcaggaatctgggaatccccgagaagtgaaggcactagcgagattgggggagttctctggcactgcttggtcccctgaaccacccagcttggcctccacccaagagggttctatgaccccttcctggcctccgattccccattacctgtttgcgggcttccccgctcaggcgcaccccacacggcttggccatgctgcttcagtcgctagatctctggtctcccggctagtcgcccgggctttcgctttcactccccaggtccaggcccgcccccctcaaccccgccccctttcttctttccgcccccctcctcccgctggcaggccgcaagcagtaggtagcccctcagccattcccagccagttgccactaggagaggcggtgctggctgggtcacagtccaggggctgcccgagggaggggctagggtaagtgggaccgcggagactggagcgggggctgtccctcggagaggggcggggcttatagctagggccaactggaagtccagggttggggtaagagaggtgggagtatggcaaagggggtattcagtggcggggctcccccaagaaggctcgaccgcaagtagcggacggagagagatcagagcgagtgggaggggcagccagagggagcgcctggggtggagaaggactagcagctcttagaagagagcgggcaggggttgggtgagggtcttccctctgccttcaggacagaccggagatggggcgggactcgctcgagaggggttagggccggccagagtcggttcccctgcagggtgggacttcctcggtgaggcccggagcgtaccggactggtccagctagaaaaagaaaggttttgagctgaataggataaccccgcgcctgcggctatccggaaggggtggaaccagattgggggaaggcggggaagagcgcttgactgagggaagatgctggcgcgctctgagggaggagccaggagccatttgccttctcattggttgggacctggccctccctcttggccgcgccccctggtttcctgacaccgctccaaccttaaccttaagccccgcccgttcctccgaaattgggtcgcagtcccaccctctctcctagtacttcctgttctcggctaaccctggcgctgggccgggggctggagagtgaccgtggtctgagtgacctggggcggctgcgtgggccggggtgggcctcaaagccgggcaccagacgggaggggcggcgctcgggccgcgcgctgcccgcgccgggtcctggcgggcggcgaggctggggctgactcctgcctcaggatgccgggggaggaagaggagcgggccttcctggtggcccgcgaggagctggcgagcgccctgaggagggattccgggcaggcgttttccctggagcagctccggccgctactagccagctctctgccgctagccgcccgctacctgcagctggacgccgcacgccttgtccgctgcaacgctcatggggaggtgaggcccggccccgcttggaagggggacaccagggcctgaggcccaggccacgctcacacctctctgctctccttgctcccagccccgaaactacctcaacaccctgtccacggctctgaacatcctggagaaatacggccgcaaccttctcagccctcagcggcctcggtactggcgtggtgtcaagtttaataaccctgtctttcgcagcacggtggatgctgtgcaggtgaatcccctggccttatgggagagggggctggggtttggctagaaaaggcctgaggttgtgctgaatgggaaggggtccagccctactaggcaggaaacctcctgggtggtgactcgtttgaatgtgtggcaggggggccgagatgtgctgcgattatatggctacacagaggagcaaccagatgggttgagcttccccgaagggcaggaggagccagatgagcaccaggttgctacagtcacactggaagtactgctgcttcggacagagctcagcctgctattgcaggtgagatgctcctctagtcttgatggacttatgcaccagggctggggagcccagcctaactcaagtaagtttgaggacccccgtgctgctgaactatgggcatagttcagcattctgggagctccgggtactgattttccttctgtgaatgttaagggaccagggcttagagggagggctttgttctaggggtctagctggaaaccgtttttatctgtattattgcagaatact

SEQ ID NO: 1241588 - DNA, 4001 bp, Homo sapiens
aaaggaaaatcgctttgtatttccctttcattcaccattgaaagtaatatccaaaatggctacattctgagaagaaatttaacaactttcctattcacagaagtctcaggatttcgagaacgtgggattggcaatggaatttctgtaagtattgtttttgttgaacaggtaccttgggagaaaggagaggagcagcactgaaaatgtttcctcaagcctcacctactcccaggtgtcttggcggggactccaggaacaaatgccttcaaaatgaggagataatttcatttccatcgctatcctcattaccaaattgaaaccggagataatggctttcatgtcacctcacttgccaagatacactcaaaacccgtcaagtcaggttgtcaaaacgacaccagcagctaaaacatacaaagagcctcggcctccatcgccacaatccctggcggatgcagcaccagaaacagcagccgtggcgtctcaaagtttacgcacgcgtttttcaaaattaaaactatgcatctgcaaatcactctggctggcttaaacctctttttccctttctatgccaacaccggggagaagatcgtcccagacgccattcgcccatttctgataccactgaagtcatgagcaggtctaacaaaataaaacatcacccagccgtcgggaagtagaagactcctgttgccaaggagaaactaagttctgctcctcctaaggcgcaaaaatgacctcgagatctccccagaaggaagcagagaggagggagttctgccacatggagagggttttgctgggctagggagacaccgccgggctcagcctttcccttcctttctctaactttccctcatttcgctccgcaaactgagttatatctcggggctgtggaaggaatccaatttggggaactcagcagcaaaccttcctggcccagggcgcagctcgcctggcgccgcgtccatcccgatccgctccacccttcccgccccgcatccgcggccggacagtctcagtgccctgctgcctcggggcccggggactcacaattacgggcagagaacacatagtgaagagcacggtcatcagcgccagcagcaggaggtgatccagctcctccaggggctgaggggacgcttccctcccgtccgcgcgcggctcggcacagtccctggtgcaggagcgcgggtgccgctgcagccgccggtgcatcgcatagaggttgcgcatggcgccgaggttgcacagcacggtggcgaggaccagcagcgccatgaggctggagtagagcacagagtaccccagcaccgacagcgagccctcctcgtggaccatctggataaagcaccaggtgccggggcagtactgcacgaacttcccgaagcccatgaaaggtagcgcgcagaaagccagggagaaggcgctcaccaccggggccaccagtgcgcccaggcgcagggtgatgtgccgtcggtagaagaaagggtgccctagggagagccagcactccagtgccatggccaggagttgcagtgtcgaggagagcccaaagaaggacatgaagaaggcgaaggcttggcacaacgagttgtccaatgcgggcgcaagcacccgcagactccggttctgagcgtaggcagccagcaccaccgggcttaggaggcacttgcccagcaagtcggtgaccgtcaggccacacaccagcatgtagaagaccgagggcagcgggcgcagtggacgccgcgagcaccaccccagccccgagcgcgccagcagccccagggccagcaggttgcccaggaggccggtgctgaagagcaccccgcccatcaccgccgagttgcctttttccacagaggtggtgttctggcagcggtagaacggcgacttcatggcgtgcgggagcagagggctggagtgaaggctgcggaagggcgagggccccggcgcccgggtgctaaggagcccccggcagctccgcgcgcggctcgggcggagaagctgcgccacagaaaaagctccgagggcggcggggtgttccccacggcaggaacctcctatctaaactcgcgggtcacacccctctttgagaggcgggacgctctgcagggtgagcgcctggcgctggcattgaagagcgcggagcaggccagtgaagagctcggccctgacgcgctgcgttctcagtagagacagactctggtgccgagtcggaacggcaggaggaaaatagccagaattccaagcacccaacaccagtccttctagcgaggcaagagaagaactactaaagtggaggggaaattaagcagcagccacctgagaggagggcaatggtgctggtgtttgaactggggtggccaagaactcgaaagatgagcgaagaggggaggctgagaaagggcttctacctagttgtcttgaattagctagtcaaggaaaggtaaagataactcacgtctggaaagcccctgagccttagctcctcttctctactagatcagcgcaatttggggcattcacggtcatctccattgcataggcgaggaaactgaggccttggaaagttaagtgatctgcccgtggtgacagagctacagaagtagcagagccggacctctcacccgatcttctattttggagttcatctgtcctgttcccatgactcctcctcccaagaagttgtccagatttcagggaagtggtttgtgggaaagccaagagccggtgttggtcctgggtgccatgaatcacattgactgtagagagctggggggaagggcatggttagcagcactgttgctgtcatcagataggcctgggtttgagtccaggttctgctcctcactgtgtgtgtgaccttatgggacttgcttagcctctcaagcagtaacatctatctggcctgcttggctcttctgaggcatagaaataacacgtaaagagcaagtacatagaaagtgctcaattcatgcaatcaccatgattcttatttgatagaagggtgttttggtagctgatgtttaactgcagtttttagcatggattttgaaatcagaaaatggtagatttggcatagagctttctcactcctctgatttgtggctactagaaaaaatttattcctgtttgggctttgacttggctgcatcataaaggcaagggagttaattgtgataagcgtgattttatatctttaactagcattcgatgccctgtgagagaaattggctttgagtgtggaatctcagtgggatgactaaggttttgttatgtaagtgagtagatgatgcctgggcttgaaacggctcatttttaggcctcatgccagttctgatggacagactcagggaaagagcaagacccttgggatttagatgtgaaagcctgaagggtagacagagaggctgcctccagactgaaagtctggccagtaattcaggccacagggtggaaaagaagaatctaagcttggaattagatagttctgaactccaccactggctgtgtgaccctgggttagttgttcaacctaatggaatatgagacttatgctgaacttgtggggttgttgtgaggttgagaaaacttgaagtgctttggcatagtgtaataataataataagagctaatatttattggtcctgatgcaggttggacactctctaagcctttcacttatattgactcaatagaaggccttgtatagagttagttcccttgtcttctacctactctctctcattcccatctctagcccctagcacataagaatgggtttagaagagccccactcgacttaatgaagtgaaaggaagagcaggccccataaccaaaagacatgagaatttgatgaaagctgtggtctcctccatagacagacagacacacacacacacacaggcacacacacacagacacacacgcagacacacacacacacactttacatcaatctcaggctgttcaccatttcctgaagcccttctatggta

SEQ ID NO: 1241589 - DNA, 4001 bp, Homo sapiens
cccaaatcaaggcagcacgatgccaggacttggtctcttgtccttcagttccccaggtagccccactcttcccttcctgagagggaccagccattcctgcctgtggctttgtgctcatcaagtgcataactgtaagctgaaggacacctgtgtgtatttctgacagtgacattaagagcgtgttttgcaagatattacaaatgcttagcaagatgttcctccaagtatttcctctagttatcattatggttttataaactttcatggccacaaagagttacattcaaatatataaattgggaaacctataaactagatgtttgttggacttttaggacaaataacaaatgctctaaacttctgcttcagggacccttctcatctgggaccattttcaatggcagctggaatgctatgggttgggtactacattttgccctggcaggaacagaaggcaagcatggagaaccagcaccagtggatgagaggtacagggcagcaaactgcagctccaggtcgtcaggctggaacagtgacagccatcctaaggtggaaggggctgcctctttctcaattactaagccaagataggcaacagcgagaaagggacactgcccagggctaggatgaggagattggctagcttagctgaggcccaggactccctttcggacggtctgtattattgtataagaaactctagcctagcaacgcccataagccaggataaggaagtgggctaaagaggaggggaaactagtggggaaggctacagatctttacaaattaggacatatttttacaagttgcaaaaagtttgtagggcggtggaaagggtggaggcgtcaggggagagcatgagaaggctgagcagagccgggctgtggaaacgtagggagtgacttaccgtgaaaggcaaggagcagacggcgaaggtgatggtcatgatagccaggagaatgaggtggtccgtctcctccgccatggacaccctttcccctctcctgcgggccccggggccgccccggccactgcccagggaaggtccgcagcggcttctccggcttcggcggtgcatgcggatgaggttgagaatgacactgaagttgcaggcgagcaccgagacaatgagaagcagcagcagggtggcgtacagctgcaggtaagcggtccgcccgtgccggatgaagcaccaggtcccggggcagtactggacgtactgcccatagtccagcagcggcagcgagcagaagagcagggagactgcatagatgacaggcagcacggccaggcccccggagcgcgagacgcggcgctggtagaagtaggggtgcccgatcgagaggtagcgctccagggccatggcgaagagcatgagcatcgtggccaggctgaagaaggtcatggcgaaagcgaagtaggtgcacgcgcggctctcgggcgccagtgccaccagggtctggttccgcgcgtacgaagccagtaccactgggctgatgaggcaggtcccgagcaggtcggtgaacaccagctcggtcaccagcacgtggaacaaggagagggagctcctgcggccggcgctgcaccccacgtccccccgccagcggcgcgccagcagcgccagtgctatgaggttccccagcaccccggccgagaacatgacggagctgatggctgggctttcgcctgggggaagccactgtcgcgtctcgcagtcctcagactgggagtcattggaggcattgcccatggtggggtgcctggaaaagagatgcgccctcctctcccggcctttacctgggaggaagagggtctgagagccggagcgttccgagactcagaggaaaaaggggagggaccgaaatccagagcccccttcccgcacccagcgcgccgacggcggcttgccctgggtctcccgccgcgcgccgagtggcggctcggctgctgcatccgagcggcgctcgaggctcccgcgcctacccgcgccggccaaggccgggagccagagcctaggggagccgtcgtctccgcccccgcactgtcggggggcgggcccaagagtgctggccaggccttgcaagtgcgagtgtccgcgagctgcaggggaggcaggacgcgtcacactcgcgggggcgttccgagtccctggggcgcgccggcggggagggagagaaggagtctgagcacccgctgggcgcggcactgggcagaggcgcgcgtgttgccggtgtactgaagctgcccgcgaccggcgggagcggcgtttctcgcttcctcggggtccggtactcgaagcgcacggcagtctgacctcggctgggaagcgttaagccccagcagagggctgggagggagtgcaggagcacttgcggggtctgcgcagaatacacagaagatcggggcaacgagcaaagcaaagcaactcaccaaacaatgaagttaggagaacccaatcccgtgaaatgagcggaacaagggaataacagtgcaaaggcagcttgaagtaagaccagaatgttttgctttgtttttactattcccaggaagatacactaagaggttgggacaaaaattgggatgaagcgtaaagcaagtgtgtccatccaaggaaccaaaccacacaatgcgcaccaccgagcggcctgttgcactgccgctttgattcggttactagcatttcaccgtttcctatgtcaacagcataacggataaccacttgtttaagcaaccattaaaaaaagaggagtgtgtcttatacagaattgtgtttgtggatacaacatgaaaaccattgcacatcactgttctgtccttaagctgagccttgtaagaaaatgttgatattttgtttagccgtttatctttacatgttgttaaccacgtagtatccatccagaaagacttgttcctggcaaagtgtattggtaagtggccagtttcagactggagctgacagtaatggtttcctaccacatattgtcataattgcagagtcgtgaaaatgggctgatatttaacacaaaacaaaacaaaacaaaatccagtttggcagacaacataggtaattgtgttctgtaagaagtcacattcacttggggaagggaggccaactgggaagtgaagggtctgatctgcctagggaactggcaagaaagacagtcataacgtgggaggaagcaaagattgcctgctgaagagcctatcttgctacagcctgcttactctccatgaatattttttgccaactttgatgattctggcctggggattggaatgcggagttggggggggtggttcccactagaacaagcataatttactggatcgcttgcaaagtttacaggccggttttcacatgtcagcaggcactacttcaatccctaaacttctcatggcatggattcctaggaaagaggatcttaactcctacagtttttctttcaagctgtaaactctgcaggtcagtaacaacttattaccaatctttgccatccatctctgactattcccctactccaacattcccccatctcaccccaagcaatggggaaacatcaaacttaaatcagaagtatttcttaataggaaaacactatgatttatagcataattctgcactgcagttttactattaaataagggattttagattcactgaatttgcacagtgcttattttccgaatatttttatacctttttaattttcataaggcccctcacaacaaaaacctactatttaacctttcctatatatttgtctctagcttttctttggatgggtacctggtggcaggccggcccctggtttttgtgaatacgagagcaagagtgcagttgaagatcctcccccaggcccctgcccccttgtcttcctaacccctgactcagtcttgcaccacaaggagtcttgcacagaaatatgtggagagtatagttcaatatgtggacagtatagttcaatatgtggacactatagttgttgataaccaagctctct

SEQ ID NO: 1241590 - DNA, 4001 bp, Homo sapiens
taggaagaacagagtacttctcctagttctaaccaggtgggaacttggaaaaagtcccttctctcaacctgtttccttaatattcctaaatgccaggaactgagcacagactcattcactagcctgtttaaaccacctcccccaccctcaccccaaaaaaactgtgaggttggtaatatcatcctctcaattttatagatgagaaaaggggccgggtatggtggctcaggcctgtaatcccagcactttgggaagctgaggtgggcagatcacttgaggtcaggagtttgagaccagctccgacaaaacggcgaaaccccacctctactaaaaatacaaaaatcagcccggcgtggtggcgggcgcctgtaatcccagctactctggaggctgaggctggggaatcgctttaaaccgggaggtggaggttgcagtgagccgagatcacgccattgcactccagcatgggcgacaagagcgaaactccatctcaaaaaaaaagaaaaaagagaagaaaaaagaggtacagaaagagaataattcgcccagagtcgcccaacttgtaataacgctagaacccatactccaacacggcacctgctatttccatcacatgagcttcctaataccttttaatacccttatttcgtgcgattattctgccactagcaaccctgttgaccacgccttgttataaaacgtatctttctgggcccagagccgtggctcacacctgtaattccagcactttgggaggctgaggtgggaggctcacttgaggccaggaattcgagaccagtctggccaacatgggaaaaccccgctctactaaaaatacaaaaattaagcgtggtggtgggcgcctatagtcccagctacacaggaggctgaagctggagaactgcctgaacccaggagactgaggctgcagtgagccgagatccagccaggacactccagcctgggcaacagagcgagactttgtctcaaaaaacaaacaaacaaaccacgtgtctttctggatctctctgccagtcttctcctccccttccggttttctggtctcccccttcccctcccgaagtcttgcatgtggagattcctatcttgctcttccctttctcagtgacctccctgagccctgtggctcctcctaccaaccactttatatggaaattaataataatttgcgtctctagcccagaatttcaaactaactgcccagctcgtcagcgctaagaggataaggactcgtctgctttgttcaatgatgtgaatccaggccgggcgcgatggctcacgcctgtaatcccagcactctgagaggccgaggcaggcagatcacgaggtcaggagatcaagaccatcctggctaacacggtgaaatctcgtctctaccaaaaatacaaaaaattatccgggcgcagtagtaatcccagctactcgggaggctgaggcaggagaatcgcttgaacccgagagatggaggctgcagtgagccgagatcgcgccactgcactccaacctgggcgacagacagagcgagactccgtcacacacacaaaaaaatgtgagtccaatcccctatgcccggcgcatggtacgtgctcaacaaatctgtgttaaatgaaagtttcagaggcacctcaaacacaattacgtcaaaacctcaggttgctttcccccagtaattcaaaaaaaaccccaaaacctgcttctgtttctcgagcattccctatctcagtgttgcgggcaataacgccagtgtccccggtagctccgggaggacgcctagaagtcaccctggttgagagtcttcttcctcaccgctggggcccgaagcagcttcgggagccacagtcgcgggagccgctcgcgcgtcactgaccctgtggagcccgggtgaacgaaatctcgcgtgatttgccggaaagaggctgtactgcacgaccccagctcgcccccaggcctcggccctctgaccgcagtacgcaggcgcgcgactaggcccggctccgcgccccctcccctcccaggggcggggtttggaagcttagggattggaagtttaggattcctgggcgccccacgtttccgggagaagcaagggaaatgcggaacgtcaggggagagttactagtctgggcaaagtgcattaataacttaactgagattggttccttgtggccgcccctactgccttgacccaaagagcaaatcttgcagccttgaccagtgagttcacatttagcagtccgtgaagaagttttattagttttgtggatttctccctgaacctcgattgggaaattatagtgagacagggaccgtcaagcctactccttgttttatagatggggaaactgagtctcggagagctgatgtgattggaccacctacctttcagctggttaggggcagtgctgggataaaacccctctctccggaccctaatccagggcccctttgcgcctcttttatttcacgaagaataccaaattcctccaagattaccagtgtgggctgatttctcaatttcattcatcgttagtcgtctccttttgtgctggactgggttgagagaagtgtatacctaggacagcttcggatccccagggacttcaaaccctaagaaagatcatctgaattaggcaggtataagaattgcttgtattcatgtgggagctaatagctcagcacaagtcatgcatggagtagctgaaagatgactaggttggtgagcaagggaatagtgatcaaacaggttggagttcctggtagctttatgtctgaatatttttgcttctttgggaaagcttcaggaaggactaggagaattacactactttgcaaacattttcagacaggagctaatctcttttatctgtcatggacaggtagacagaccttcaatgccttttgtaatgacttaaaccaaatgatgaaaaataaaatgctcaaatagacaaaaagtagtagtataaaataaaggtaatctagaacttgatttaaaagaaacactttcaaaatagaaaagaagccctgcaatattaaattagttttggggctggacgcagtggctcacgcctgtaatctcagacctttgggaggcagaggcaggtggattgcttgagtcaggagttcgagaccagcctgggcaacgtggtgaaaccgcatttcttcaaaaaataaaaaataaaatgaaattagctaggtgtggtggtgcttgctggtagtctctcagctgctcagtaggctgcagcgagccttgatcacaccactgcactccagcctgggtgacagactgataccttgtctcaaaaattttaaatatatgtatgtgtattaattagttttagctctcttgattctagggtctgtgaactccttgtaacaagtgtgatttttctcgccaaaatgagttcccaaaaattcaagagatgagtagaggatttataggtacatttctatccagtttatcctcttcttctaaattttctctaacaccaaggattactatcatttacataatgcgtagtttgagttggataatgccttatatgattttttgcctacatgatttaattttcaaaacagccctattattattattaccattttacgaatgaggaaaccgaagttaagctagttaagttctaagtcaggttaagtaactaataagtaaaggagcaagttatcctgcctgagtccaagcacctgaccctttgttatatttgccataaatctggaattccctactcctccctctttgcagaactttgtactgcctccttctcatcgttcaagcaattcctgagaatcattttcttttttttcttttttcttttctttttttttttttttttttttgagacggagtctctctctgtcgcccaggctggagtgcagtggcacgatctcggcctactgcaacctctgcctcccgggttcaagcaattgagcctactgagtagctggaactacaggtgcatgccaccaca

SEQ ID NO: 1241591 - DNA, 4001 bp, Homo sapiens
aaggtcatttaagtaggaagaacagagtacttctcctagttctaaccaggtgggaacttggaaaaagtcccttctctcaacctgtttccttaatattcctaaatgccaggaactgagcacagactcattcactagcctgtttaaaccacctcccccaccctcaccccaaaaaaactgtgaggttggtaatatcatcctctcaattttatagatgagaaaaggggccgggtatggtggctcaggcctgtaatcccagcactttgggaagctgaggtgggcagatcacttgaggtcaggagtttgagaccagctccgacaaaacggcgaaaccccacctctactaaaaatacaaaaatcagcccggcgtggtggcgggcgcctgtaatcccagctactctggaggctgaggctggggaatcgctttaaaccgggaggtggaggttgcagtgagccgagatcacgccattgcactccagcatgggcgacaagagcgaaactccatctcaaaaaaaaagaaaaaagagaagaaaaaagaggtacagaaagagaataattcgcccagagtcgcccaacttgtaataacgctagaacccatactccaacacggcacctgctatttccatcacatgagcttcctaataccttttaatacccttatttcgtgcgattattctgccactagcaaccctgttgaccacgccttgttataaaacgtatctttctgggcccagagccgtggctcacacctgtaattccagcactttgggaggctgaggtgggaggctcacttgaggccaggaattcgagaccagtctggccaacatgggaaaaccccgctctactaaaaatacaaaaattaagcgtggtggtgggcgcctatagtcccagctacacaggaggctgaagctggagaactgcctgaacccaggagactgaggctgcagtgagccgagatccagccaggacactccagcctgggcaacagagcgagactttgtctcaaaaaacaaacaaacaaaccacgtgtctttctggatctctctgccagtcttctcctccccttccggttttctggtctcccccttcccctcccgaagtcttgcatgtggagattcctatcttgctcttccctttctcagtgacctccctgagccctgtggctcctcctaccaaccactttatatggaaattaataataatttgcgtctctagcccagaatttcaaactaactgcccagctcgtcagcgctaagaggataaggactcgtctgctttgttcaatgatgtgaatccaggccgggcgcgatggctcacgcctgtaatcccagcactctgagaggccgaggcaggcagatcacgaggtcaggagatcaagaccatcctggctaacacggtgaaatctcgtctctaccaaaaatacaaaaaattatccgggcgcagtagtaatcccagctactcgggaggctgaggcaggagaatcgcttgaacccgagagatggaggctgcagtgagccgagatcgcgccactgcactccaacctgggcgacagacagagcgagactccgtcacacacacaaaaaaatgtgagtccaatcccctatgcccggcgcatggtacgtgctcaacaaatctgtgttaaatgaaagtttcagaggcacctcaaacacaattacgtcaaaacctcaggttgctttcccccagtaattcaaaaaaaaccccaaaacctgcttctgtttctcgagcattccctatctcagtgttgcgggcaataacgccagtgtccccggtagctccgggaggacgcctagaagtcaccctggttgagagtcttcttcctcaccgctggggcccgaagcagcttcgggagccacagtcgcgggagccgctcgcgcgtcactgaccctgtggagcccgggtgaacgaaatctcgcgtgatttgccggaaagaggctgtactgcacgaccccagctcgcccccaggcctcggccctctgaccgcagtacgcaggcgcgcgactaggcccggctccgcgccccctcccctcccaggggcggggtttggaagcttagggattggaagtttaggattcctgggcgccccacgtttccgggagaagcaagggaaatgcggaacgtcaggggagagttactagtctgggcaaagtgcattaataacttaactgagattggttccttgtggccgcccctactgccttgacccaaagagcaaatcttgcagccttgaccagtgagttcacatttagcagtccgtgaagaagttttattagttttgtggatttctccctgaacctcgattgggaaattatagtgagacagggaccgtcaagcctactccttgttttatagatggggaaactgagtctcggagagctgatgtgattggaccacctacctttcagctggttaggggcagtgctgggataaaacccctctctccggaccctaatccagggcccctttgcgcctcttttatttcacgaagaataccaaattcctccaagattaccagtgtgggctgatttctcaatttcattcatcgttagtcgtctccttttgtgctggactgggttgagagaagtgtatacctaggacagcttcggatccccagggacttcaaaccctaagaaagatcatctgaattaggcaggtataagaattgcttgtattcatgtgggagctaatagctcagcacaagtcatgcatggagtagctgaaagatgactaggttggtgagcaagggaatagtgatcaaacaggttggagttcctggtagctttatgtctgaatatttttgcttctttgggaaagcttcaggaaggactaggagaattacactactttgcaaacattttcagacaggagctaatctcttttatctgtcatggacaggtagacagaccttcaatgccttttgtaatgacttaaaccaaatgatgaaaaataaaatgctcaaatagacaaaaagtagtagtataaaataaaggtaatctagaacttgatttaaaagaaacactttcaaaatagaaaagaagccctgcaatattaaattagttttggggctggacgcagtggctcacgcctgtaatctcagacctttgggaggcagaggcaggtggattgcttgagtcaggagttcgagaccagcctgggcaacgtggtgaaaccgcatttcttcaaaaaataaaaaataaaatgaaattagctaggtgtggtggtgcttgctggtagtctctcagctgctcagtaggctgcagcgagccttgatcacaccactgcactccagcctgggtgacagactgataccttgtctcaaaaattttaaatatatgtatgtgtattaattagttttagctctcttgattctagggtctgtgaactccttgtaacaagtgtgatttttctcgccaaaatgagttcccaaaaattcaagagatgagtagaggatttataggtacatttctatccagtttatcctcttcttctaaattttctctaacaccaaggattactatcatttacataatgcgtagtttgagttggataatgccttatatgattttttgcctacatgatttaattttcaaaacagccctattattattattaccattttacgaatgaggaaaccgaagttaagctagttaagttctaagtcaggttaagtaactaataagtaaaggagcaagttatcctgcctgagtccaagcacctgaccctttgttatatttgccataaatctggaattccctactcctccctctttgcagaactttgtactgcctccttctcatcgttcaagcaattcctgagaatcattttcttttttttcttttttcttttctttttttttttttttttttttgagacggagtctctctctgtcgcccaggctggagtgcagtggcacgatctcggcctactgcaacctctgcctcccgggttcaagcaattgagcctactgagtagctggaactacaggt

SEQ ID NO: 1241592 - DNA, 4001 bp, Homo sapiens
taataacagacgaatttgctccgatgtgatgatagagtgtgttgagtgtttaccttgcagcctggtaaaagggaaaggtcatttaagtaggaagaacagagtacttctcctagttctaaccaggtgggaacttggaaaaagtcccttctctcaacctgtttccttaatattcctaaatgccaggaactgagcacagactcattcactagcctgtttaaaccacctcccccaccctcaccccaaaaaaactgtgaggttggtaatatcatcctctcaattttatagatgagaaaaggggccgggtatggtggctcaggcctgtaatcccagcactttgggaagctgaggtgggcagatcacttgaggtcaggagtttgagaccagctccgacaaaacggcgaaaccccacctctactaaaaatacaaaaatcagcccggcgtggtggcgggcgcctgtaatcccagctactctggaggctgaggctggggaatcgctttaaaccgggaggtggaggttgcagtgagccgagatcacgccattgcactccagcatgggcgacaagagcgaaactccatctcaaaaaaaaagaaaaaagagaagaaaaaagaggtacagaaagagaataattcgcccagagtcgcccaacttgtaataacgctagaacccatactccaacacggcacctgctatttccatcacatgagcttcctaataccttttaatacccttatttcgtgcgattattctgccactagcaaccctgttgaccacgccttgttataaaacgtatctttctgggcccagagccgtggctcacacctgtaattccagcactttgggaggctgaggtgggaggctcacttgaggccaggaattcgagaccagtctggccaacatgggaaaaccccgctctactaaaaatacaaaaattaagcgtggtggtgggcgcctatagtcccagctacacaggaggctgaagctggagaactgcctgaacccaggagactgaggctgcagtgagccgagatccagccaggacactccagcctgggcaacagagcgagactttgtctcaaaaaacaaacaaacaaaccacgtgtctttctggatctctctgccagtcttctcctccccttccggttttctggtctcccccttcccctcccgaagtcttgcatgtggagattcctatcttgctcttccctttctcagtgacctccctgagccctgtggctcctcctaccaaccactttatatggaaattaataataatttgcgtctctagcccagaatttcaaactaactgcccagctcgtcagcgctaagaggataaggactcgtctgctttgttcaatgatgtgaatccaggccgggcgcgatggctcacgcctgtaatcccagcactctgagaggccgaggcaggcagatcacgaggtcaggagatcaagaccatcctggctaacacggtgaaatctcgtctctaccaaaaatacaaaaaattatccgggcgcagtagtaatcccagctactcgggaggctgaggcaggagaatcgcttgaacccgagagatggaggctgcagtgagccgagatcgcgccactgcactccaacctgggcgacagacagagcgagactccgtcacacacacaaaaaaatgtgagtccaatcccctatgcccggcgcatggtacgtgctcaacaaatctgtgttaaatgaaagtttcagaggcacctcaaacacaattacgtcaaaacctcaggttgctttcccccagtaattcaaaaaaaaccccaaaacctgcttctgtttctcgagcattccctatctcagtgttgcgggcaataacgccagtgtccccggtagctccgggaggacgcctagaagtcaccctggttgagagtcttcttcctcaccgctggggcccgaagcagcttcgggagccacagtcgcgggagccgctcgcgcgtcactgaccctgtggagcccgggtgaacgaaatctcgcgtgatttgccggaaagaggctgtactgcacgaccccagctcgcccccaggcctcggccctctgaccgcagtacgcaggcgcgcgactaggcccggctccgcgccccctcccctcccaggggcggggtttggaagcttagggattggaagtttaggattcctgggcgccccacgtttccgggagaagcaagggaaatgcggaacgtcaggggagagttactagtctgggcaaagtgcattaataacttaactgagattggttccttgtggccgcccctactgccttgacccaaagagcaaatcttgcagccttgaccagtgagttcacatttagcagtccgtgaagaagttttattagttttgtggatttctccctgaacctcgattgggaaattatagtgagacagggaccgtcaagcctactccttgttttatagatggggaaactgagtctcggagagctgatgtgattggaccacctacctttcagctggttaggggcagtgctgggataaaacccctctctccggaccctaatccagggcccctttgcgcctcttttatttcacgaagaataccaaattcctccaagattaccagtgtgggctgatttctcaatttcattcatcgttagtcgtctccttttgtgctggactgggttgagagaagtgtatacctaggacagcttcggatccccagggacttcaaaccctaagaaagatcatctgaattaggcaggtataagaattgcttgtattcatgtgggagctaatagctcagcacaagtcatgcatggagtagctgaaagatgactaggttggtgagcaagggaatagtgatcaaacaggttggagttcctggtagctttatgtctgaatatttttgcttctttgggaaagcttcaggaaggactaggagaattacactactttgcaaacattttcagacaggagctaatctcttttatctgtcatggacaggtagacagaccttcaatgccttttgtaatgacttaaaccaaatgatgaaaaataaaatgctcaaatagacaaaaagtagtagtataaaataaaggtaatctagaacttgatttaaaagaaacactttcaaaatagaaaagaagccctgcaatattaaattagttttggggctggacgcagtggctcacgcctgtaatctcagacctttgggaggcagaggcaggtggattgcttgagtcaggagttcgagaccagcctgggcaacgtggtgaaaccgcatttcttcaaaaaataaaaaataaaatgaaattagctaggtgtggtggtgcttgctggtagtctctcagctgctcagtaggctgcagcgagccttgatcacaccactgcactccagcctgggtgacagactgataccttgtctcaaaaattttaaatatatgtatgtgtattaattagttttagctctcttgattctagggtctgtgaactccttgtaacaagtgtgatttttctcgccaaaatgagttcccaaaaattcaagagatgagtagaggatttataggtacatttctatccagtttatcctcttcttctaaattttctctaacaccaaggattactatcatttacataatgcgtagtttgagttggataatgccttatatgattttttgcctacatgatttaattttcaaaacagccctattattattattaccattttacgaatgaggaaaccgaagttaagctagttaagttctaagtcaggttaagtaactaataagtaaaggagcaagttatcctgcctgagtccaagcacctgaccctttgttatatttgccataaatctggaattccctactcctccctctttgcagaactttgtactgcctccttctcatcgttcaagcaattcctgagaatcattttcttttttttcttttttcttttctttttttttttttttttttttgagacggagtctctctctgtcgcccaggctggagtgcagtggca

SEQ ID NO: 1241593 - DNA, 4001 bp, Homo sapiens
aaataagtaaagcaagatggaaaaaaattagcaaatgacaactttaaataataagcttttaactagaaaattgataaaccaagagtaaatatttaaggattataaatatgcatactaaacaccctttcatgagatcagatggtgggtttcaattttacataaaaattatggtaactggaaaccgggcggattaagtagtgtagatgaacagacaagatattgcatatgtgtagaggaaagataaatatttgtattaggtgccattcaaatatggtagtcttttcactacatagaactatgccttgaaagcaatagatactacactgtataacttaattattaacttaagctctgattaagcaaactcagtaaaactttcaattgtccctcagacttgaaatgtattactgcatcagggataaaggaaaagtcaaaattatctcttattttggtagatgaaattgaaaaagttgcagtgtgtgtgtacatggtgcatccccccaagatctatccataagaatggcttgctttttgcttatttatataaaacccactatgttaaaacaatgattttgtttaataatttacaaatttatcaatgatttatacatcttaattttcagtaatatgcagtatttgttgccaaatggtgtaatacaattatgaatgtctgaagataataaaaccaagatgagtagaaatttaagagttctttggggaggtctgtttcaggtataaaataatatgcaataatatgaaagtgattgggtctggaattataatttactaaagtaaacataatttataaatagctattaaaggaaaactaggatataattttttctctacaaaatctttccgttttgtggtaagtaaacagatacatactagattctgcttcagtacaagtttacaaaaggcagtctgaactatttgtgaattcattttaattttccctctctacaaccctttccaaaagttcctcaaatacactttacctctcaatcttacagcgtttcccctttcctattaaggtccttaccacatgtaattttgccaaagttgctttaaaataaaataagcactaaaaggagagagtatgtgacatttttagagtaatatctatagctatagcattaaacccatgtttctcacggagaaaacatctgtgcgtagatgctccagaataaaatgccctagaaacgaaacggactatattcagagtaaaattactgtcgtgtcccaaacttaaaaaaataaataaactgtcagcaactattaggcatacagcagttgtcacttggagcacacgaatgttctgaatgtgtttgtgagcatacgctattagtataaggctttctcagcaaaaaagaaaataggacgagcatgccaagagcggccaatctaatcaggatttgcagaaatcacaagtcggaatttgcagatccaagaattcttgtttccagagtaaatactctactccaaaaacaaacccaggcgttaccaaacagtccttccctgcgccccttctcgccaaagttatctggcgaatttcacgtttatatattctgagaggcacaaatatgcctaacacatttaaaaccctgatccagaattaacccgcaacaatcggccagggcgttcggaatagaagttcaagactccttttagaaattactcaagtatatgagagcgaacctgaaaaacaagacttttctctttgttacgctcccgctacgggtctggccgccgcgccccattctccgggattccggggccgcgggcgcgctccggggtccgggcgagtggacacaccccaccgctcgggccagccgcccgcccctcccgccggccggggaccgcgccctcacctgctcccgctcccgctcccgcatcctcggggccgcgcgccccgctcagcgacccgcctcccggggccccgccgcgcggccgccgcagccgcacccgcacgccagcccgggccgcggcgcgctcatggggctcgcacgcctcacttcctgtctccaaaaacccggctcgcagaccattcccctgggcagagtccggcggtggcgacggcgaggggcgaggcctggaggtgggaccggccggcgaggagcgccgcacaaagaagccccgtgggggcggggggtggcaggaggacggacagaccgtcggaccgacgcgggacgcgcggccggagcagcggggcggccgggcccaggcgtccctccccctgagccgggcgggcggatccggggaggcggcggcggcccgtgacctcagagagttggaatgcgggcagccgcgcgggggaggcgcggacagctgcgcccggccgccggggagggggcgcgccgctgctttttttaatcgtatgaccacttattttaagagtttccaaataaagcaaggcttttaataaaatgagtggagggggtattatttaggttccagataaagggttttattcctgtgttattaggtaggctgtaaaatgctgttattgatggttattcgtttactctggtatatttctgaacactattggaatacatttcttcttttcctgcttgctcctaaggttatgccccatataactagacacttccagtactgggtgggaaagcccccccaccaaaaatggttcatatgcctcaaataacctgtcagtccccaaaagggagctgtctgcttatgcaatatagagcagaactgttaaggatggagacttgacaaagttgtcaaatcccagctccaacatttactagctggatgaccttgtgcaagtttcttaacttctctttacctgtttcctctcctataaaagagggatattaatatctttgcacagcaggggtgggggaaataaatactaagcaatatccaataacttgtgtaaagtatatatgaagtgtttcgtttaaggtttattatacagtattcttgtactgcattattactgtattgcagcacttaagctgaggaataaaactgtgtgaccctaccactattacaatagtgtaagatcttttcttggcatgtggaacacagaaccttttaatttatgtaaattttaatttcagtgattttgttttaatgctgttgtttctggaaagctttttaaagtattgtttcatgtaaatctcattttcttaaacaattaacaaaaacttttgaatacttaactctgcatgagacgtggtccctgcacaacacggacttttggtttagtgggtgataaacgcacctgcacaccacacacgcagtacaaggccaaagtggggagcattgtcatagaggtatgagtgctatccaagagcaaagcccagcaaggtgcatcttgggtcgtttagctaaaggcaaataagattacctgtgtttctaagggaaaaaaaatagatcaattctgtttgtaattgatatttcaactgaactctatgagggggtcaatttgtgtgtgagcaaagaaaagagatctaaaaagaagtcactttgctggcttcccaaggtagaaaaactggaatcatgtgtgacttctcccattatcatctccagcctgtcatcaagacctggtatttcctcctttgaaatgtctcatgaattctttgtttcctttctgttccccctggaacattctaaatccaaaccctcatcattttacatccggattattgcaacaagggtggtctcctggcatctggtttctcagttctctcttatttccttgctaataccaggcttccttctcttatcactcttaatggactcccaaggttaagttcttctgcctgacctatagggactttccaaacgggcctctctgaccacctatatcgctttctgcccctgtcaagctttgcccctggccagcagcccctcctgccctctttccacttgtctaagccttctgcttctctgcaagtaagactctgcttccaggatgactttctagccacaccattccacagtgatctccacacttggcaagaactgtaaaa

SEQ ID NO: 1241594 - DNA, 4001 bp, Homo sapiens
aaagatagtggccgagtgtggtggctcacacctgtaatcccagcactttgggaggccaaggaaggaggatcatttgaggccaggagtttgagagcagcctggccaacatggtgaaaccttgtctctactaaaaatacaaacttagccaggtgtagtggtaggagcctgtagtcccagctactcgagagtctgaggcaggagaatcgcttcaaccctggaggcgaaggatgcagtgagccaagatggcgccgctgcacttcattcagcctgggcgagagtgagactctgtctcaaacaaaacaaaacaaaacaaaacaaaacaaaacaacaaaacagtaaatatatgtatacataaagtgttttctaaggtgcatttaaatttttaaggatacattttagcagttgctaccttggtggaggcctaggtctttggggtgaagaagagttactttccatttgaaaactgttacagttgcaatttcttactatgagaatttacattcatttcctttcttaaaaattcctatggggtttcttgggcactgggattatagaccatttttttttcttcacacctttacataattaaaaagttctaataaatgtttatatatatttcccactgcccctgggatgtatcccaatcttttattctttccaatatgtctctacctggcttctccagtttcctctcccaatacagactcacacccgccctcactccagcctgcacacaatccctctccctgccatgtcctccccagtccttccccactgcctctcgccctcttcgcaaactgtcaggcagagatattgtccctctgtaggtccaaaatcaccctaaggaggtctctgctcccgcccccacgccgtggatggaggtggtccctgaccagccttcctcagcagctctgggggcaggcctcgggtgtggaagggctaagggtcgggggagtgtgtgtcttcggggaggacgagtccagggcattgcctggccctgggccgcctttgcgaaagactcacggaattccaggagctacacccactcaggagaatgggtgggcggcgctctacgcttggagcgggaccctgcccctcctctgcaccacacttagccactcccagaggcctgagacttacgaccttttcccagctcggcgtttgtctcccctcccaaaataccaagctccagcaaggcaagatttttgtcccttttgtttagggctgagtgtccagggcagagaatagtgtccggcatacaggacaagaggcccccgtcacctcttgattaaatgctgagagtcaaagttccaaaaaagtttgtgaagtggacaggcgagaggggcctgggcttttgcccacctggcggtttccaggggcggacggcacagtggtttgggcgggacactggcgggtggcacctcggagacatgagttcggcgtctgttgggaggcctaatctgtcccccaggctgcccgcccacagcctagacacgtctcctctggacttcggggcaaggaccgggtgcaagggaccactctgaggggttctccacctcgtcccgcccggccgcggccggagactccgactccgggctggaccccggcccgccgtcccgcccccggttaccttggggcacttgtcgtagtagtgctgctgcgtgcggatccagcgccccaccaggtggtcgcgcaccgtgtgcgccagcgcgaagtagtagtcgcgggtggtggccacgttgcggtccttgaccagcgtgaagtgcaggtgccggttgaaactcttcttcagctctgccacgttctccacgcccacgatgccgcggatgctgatctgccgccgcttctcctggtccgtcaggggcttcgccatggctggggcggcgggctgcgcggcgggctgcgcagagagctggaagtgcggccggaggcgctgggctgccgggcaggggtggagtccgccccgccgcgccagcagctttcaacgcgcacgaaagtttggggcccgccccctcgggcggtgccgtccccgctgcactcccaccgcgtcccggcccctgccccaggccggagggcagaggaagtgcccggcccctcccgaggctctggggccgcagtgggctcgggggtgggagacgaggtccaagcgccggcgagacccctgccagcccgggacctgggctcggaggctcccttccggatttccaaaatctgcggaggcagcatttgttccgcctctcccctctagagtgtggagacaggaggacgtctgtgtagggaagcacgtcgttggcagactgctgttttgccgatgtttatttgttatgccattatgactgttaggatttctcacctggagtggcttccgccataagcgccgggatctggaaggacggcacgtttgacttctgttgtcccaacctcacttgccagcccttggcaccgccccagcttggatcctcagggcgcctctgttattttcattcattttttttgaggactccagggttcaggtttcttaactcctggaccaaagttcgccccgctcgtagcaccctgtctctcatccttagaggtaggttactaagaatcagagtaggtgaggtgaagctctagggtcattatgcggcaggggcttttaccttaggcttcttcgaattacgttttaactgcagtggagggtgtggggggaggagagggagaaaacagaagggtatgtgtgtggaaaatgaagggattactcactggactagttgccttctttacaaaaaacaacccagtctgtgttactgtgcggtacaggctgatctttgcacctccactttgggtggtatttgaatatgcgtgtttatgtgtgcttaaaccttggtaaaggcaaacacttggcattttaggatgtcagaggttttttcttcctcattaagtagtattaatatattattttagaaacagtccattgccagaattaagttttctttttcctttttcttttctttttctttcttcttcttcttttttttttttttttgagacggagtctcactctgttgcccaggctggagtgcagtggcgcgatctcggctcactgcaagctccgcctcccgggttcacgccattctcctgcttcagcctcctgaatagctgggactacaggcgcccgccacctcgcattttttattttttatttttttatttttagtagagacagggtttcaccatgttagccaggatggtctctatctcctgacctcgtgatctgcccgcctcggcctcccaaagggctgggattacaggcgtgagccaccgcgcccggccaatagtcacatatattcttctaagtttatttgtttgttgttttttgagacagggtctcactctgttacccaggcagagtgcagtggcgcgatctgggctcactgcaagctccgcctcccgggttcacgccattctcccgcctcagcctcccgagtagctgggactacaggcgcccgccaccacgcccggctaattttttgtatttttagtacagatggggtttcaccgtgttagccaggatggtctcgatctcctgaccttgtgatccgccctcctcggtctcccaaagtgctgggattacaggcgtgagccaccgcgcccggccaagttttctagaaaaatcttagtatacttatattaatatattttgttttttataataaacccaagttgattattttgaattcacacatggtggtggtgggggggggggggggggcgggtaatggattaattgattcagaccaaatgtgaccctcaccataaaagtgaaagttcaaagctcatagttctgacaaaatttcctgaatccttgtcctcccagattctgaagtttggacttgagcttttggggcagagactgaattgggccttatgcaactcttgcaataccgatgacctgcaaaggacagtatggaagagatgagcattagagtttggatccggatggggccagaaataccctg

SEQ ID NO: 1241595 - DNA, 4001 bp, Homo sapiens
cagcccacagctctctggagatagctcagtagttccaagcaccaggcctctcccaaaaatagccactcctagtttccttaagggataacccaccgccctttgtccctgagcccacaacctgtcctcatacaccatctggttcctctgccacttcctccatcacgcccatgcctttctcctgcacctgcctcttccccaagtcctcccggcaggcacaaagccttagtgtctataggctccccttctttctgcaatgtctctcatccaaaccatggctcagcccaagctcctgggtttcctaagagttggccttacagctcctctgagaaagacggacaagttctgttccctgaccctaagtcctgttgtttcacccttcaagttggtgaaacaaagagaggagaccctaaaagctcaatgataatggcaatagcagtaagaacaatcagcatttatcgagcttcaccatgtgtctggctgtgctaagcacttaacaatcgttatctcatttaatcttgacaacaacttggcaggtaggtgcaattattatacccgttctacagatgagaaactaaataaagctcagaagtttaggcaatattcaaggttgctttgccccacagtgaggtctcaggtctcttggacaataaagctggcttcttaaccagaaggttctgttcctcctggctgtatctatctgctcctacttctctctcagcaaggaatgtgtgttggggggaggggggatggtgtggacatgaatcctcaagaggaagctgagagctggtgcccatccctgatggcagcagggacttctaggagagcattccaaatggatgaccagccagccagcaggtgtttccaggggcctgggcaatgcagaggctactccagggctgacccgggtagcagctgaggatgaaattccctctactcagacttctcagggagggggcccctcacagcctagaagcgggagactgactgtctcagaggggaggccatggacccattcctagaataagtgaccccatcatagtgctgtctgggatgccaccgggtcttgtccctctaaccacaggctccagcactgccagatgagagatgccctcaggcgggtcctgcctgccttctgaccccttggtctgggcaggtattcctgacactcctccatcctctttagcctccctcagaacagatgtctcctcttcccaggcgcaggggctcctcaccctatctgtgtcctcccccaggtgtcccaccttgcggcttaccttcccaactctgccctggaaactcgatccctgtggcccctccgtacgtcctctcttccccccctcgccccccgccggctccaccttgggtcaccacagaaccaagggcgcctcagtgactccggtctccaccctgacccccttttccgtagcagaagctttacttcccctccccctgggggtgtggggatgttattccagcggctacgattcttgctaccccagctcggggtacccaggcctacaccagctcccctcacccccggtttctcggtttgatgggacggaaggcttcccggcaagaggcgggagaccccacccctggtccggacggcaggcagcagggacaccctcacctgccaaaacctatgctcaccccgagatttatcccggactccggcctccggcgccaccgcctccagccggaggggctggcaattcctccccagctggggacgggggcggcggggaaaggggccgcgggcggggagggaggggcgccccgggccaccgccccttaccgatggtggagatgtgcgaggagtggaactcgttgtcggtgaagcggcacagcaggcaggtcttgcccaccccggagtccccgatcagcagcagccggaacagcacatcgtactgcttcgccatgactggggccagcggggccgggaactgcgggcgggcagcgggctcagccctgctccgccgctgccatcgcggcccgcgcccgcccggggacgctgcgggcggcgaggaggacgccgggcccggcccccgcggctgcctcgcccgcccgcctgcccactcgctcgctgggtgccgggaagcgcggctgcggcgggagcccggcgcggcgcccgctcggctcggctcggctcggctgggctggcgcgaggcggtgggaggagaaaccggcggcggcccctgcccgccccttcccctgcgccgccgccgccgccccggagagagggggcggggagcgcgcgcaggagagcgggaccccatcgagcaggcgacgctggggcggggcgccagccccccctcccaaccccttcctgcccggggcgggggaacgttttcgtttttccgcggacgctccgaatgggggagttgaggtgagcccccacccagcccacttctaccgtgctccgctttccgggctcaccacttctccccatatcccaccccaagtctggcgccggtaattccgcccgccgtggcaccctgcatctgcaggatctggccgggctccccagtggctggtacctcagctgggctcacccgaggtaggaaggccttgagcaggatctggattcgaacacccgtctccatgagtccccgagagtgtgggtggaattccccctccctgccatctggctgccccttacctgtgtgactgtgtcacggccctcccccgtccccattttttctttaaatggggaaaatgcctattcacggcctccaccagggtgaaaagatagatggccataagaacatctccaagtgcaaaatcctttagaggtgtgcgggcaagtctccgttttccctctaaggtgcttaggataggtgcccaggtgaccaatgtattgtttcagacccctaaatttctctgtggtatagccagtggcaccaaagaatgaatggcccttgttcaagatccagtttcctaccactgaatgtgttagcaccggagagaggcaaatgaatgctctccggagttgagaaaattgcctatccctaccaacgagtattgagggagagcaaagtctagcctattaggtctttaaaaagcaatgaaaggctaggcgcgttggctcatgcctgtaatcccagtactttgggaggctgaggcgggcagatcactttgaggtcaggagctggagaccagcctggccaatgtagtgaaacccagtctctactaaaaataaaaaaaaattagctgggcacggtggctcgcctgtaatcccaggcttgagaggctgaggtgggaggattgcttgaacccattaggggaaggctgcagtgagccgagatcatgacactgcactccagcctgcgcaacagagggagaccttgtctcaaaaaaaaaaaaaaaaaagcaatgaaaagtatatatgtacatacctgttttcaggctgaatattggatggagaatgtatttttcaatagtaggtcaaggaaagtggtaagcccatttacttcatttgaaaaggtatatttcaggttaagtgtctgaattataataagaggggaaaagttcaagaccagcctggccaacatggtgaaaccccatctctactaaaaatataaaaaaattagctgggcgtggtggccggtgcctgtaatcccagctactcgggaggctgaggcaggagaattgcttgaacctgagaggcgaaggttgcggtgagccgagattgcgccattgcactccagcctgggcaacaagagcaaaactctgtctcaaaaaaaaaaaaaaaaaaaagccggggggcgaaatcccgagcctgctagctactctgattacacagaaagctaaaggaactgatgtagtggattccattatttcgaggtgcgcgtctccacagtgggcttacatggggtttcaggtgcatgccaagggctctggagtaaggcacacttgggttccagtcccagtgtcaccactcaccagctgtgcaatcttgagcacattactgaacccccctgtgactcagtttcctcatctca

SEQ ID NO: 1241596 - DNA, 4001 bp, Homo sapiens
atcgtttacaacacaaagatacagcatccagaatttgtaactgtaacagaatcaaaaacttctctctttgatttcacctttcccctactttatccccaccattagttccaccctcatcgcccctttcctttgcatcagcttttcttgttatacttggatattggtcagagactaaattattttgtactctcaccgtatcccagatttgcagtttgatttgttttccatcaatgttgaccatacgagctccaaactccacacctgtcggtaaagaccgagagaaagaatgtgattctcacgaacagcagccacgtggagtgggaggttcctgcctttcctcaatgtgttataaccatcctttgtctgaactcaatgccactaattccattattgctgcctatttgctccaattaattttgtgtttcttaaggttcttcatttcccttctagaattaaaaaattgtgctcaatgacctcaggaatgtaaccaaaaagcagatatgggaaaataaaaccaattaagaagtcaaatttaaaaaggtgaatacttttttagcaatgttaggttaatgcttaaatttggttaggtaacatttagttttgtaacttttccaaaaaactaaaaattttggaaatatttcctgacactttctcagtcactctttagtctctacttaaaacaatatttatttttttgcaattccagatgtttttctttaagaaaagagcctaagaaataggttctcagaaacaatacttttttttttttttttttgagatggagtctcgctccgtcacccaggctggagtgcagtggtgcgatctcagctcactgcagcctccacctcctgagttcaagtgattctcctgcctcagcctcccaagtaagtaccttacaggcacacgccacaacgcccacctaatttttttaacaatacattttacatttccaataattgccagaggcacaattaagcattgttgccttgttaagcattgtatcattagcccctatcgcaaagtgagaattcgctcaatattccctttaaaataccttttagttgatactgccaaatccttttctaaccccatcaattatttgactctaaataaatccgttaggaacagtggtagcttcaggtttccatacaggtgggacttggaagtagcaatatggtaagaatggggatgtaggggtttatttagaaactgcatttgcatggcaagaaagctagtttcatatatgttgtttatttggactggggttacggagataacgaagagggggtagttaaaagcctcttcaggccatgccttatcacaaacgtgtgggaaaggttaatattttccaggatcgccagtgcgtttgaggaactgttaacacactctttcatttaaaaggaaagtttttagttttatttgcctattaattctaaggcagggatgactcctcaatttgcttcttcaccaatataaaaaatgtccatgtattggtgtttactttttaaaagtaaggctggtattaatttacctcaaagcacagatgagttcataaataagcagttatgctttcgtgggattttccataaacatacaaattgtatttgaaaaaaaattatatgacgagtctatacctcacactctaaaaagttacctttcaattatatactctcccttacactactccccacatatcaacgtttcattggtcacttcattaacataagtttggactagtttaaagtagtgaggggtaactttttacttcgaacactgaaggctgctaactttccactttagcaatttagctagtcaggttttatcatctgttctggaacaagtagatgcacttacctattgtgaggtcgtggacaggctggaaccgcttatctgtaaactgcaggaggagacatgacttccccacacctgaaagagaaagcacactcccggaatcacgcagccctggaacaccttccagagtatggacttcccggaccagagaaggggggctcccgagccccgcccccggccgccccgaaccgccccgcccgtctcgaatcgcccagcccacaaagtgagccccgcccccgccacccaatttgggagcttcgaatgcccgcccgagccttgaaggcgaaccacctgagggttacctgtgtctccgatgatgatatacttgaagagataagcataagtcatggtgtcgcgtcctctgggttccgggtccgcccgacttctatagccacttacctccgacctctctagccactcaatctaccgatcttcttcttctcccccttccccccgctcccccgcccctccggctcctctagcccagatcacgtctctattgcactccccggaatcatccttaggtcgggagtaccctacgccacctccagggacgcttctagcacttctacatgcccttatccctccaaactccagggggcgatagcccagcgcctgactctctgcagccccacggcgctccttccaatcagcagagagaacacacgtccttgcggaagtgacggcagttccgagtccagtgggggcggtgggagcgatgagggtctgagacggtgggagcggttgtgtgaagatggaggtaggaacctgatagctaagaaggctggcgagagaacgcggccgaccgggttgaagcagggacgggaagccgggcggagaggcgactgacgggagaggagagagagcggggtttggggagtgttgtcagaatgtcagggtcaaaagccatcgctccaagctgactccctgctccccctaacttatccccgcgactttcttttggtttccagtttcccggaggaaatgacaattacctgacgatcacagggccttcgcaccccttcctgtcaggggccgaggtgagccagagctgccgacgccgcgggggtagggcctgaggcagcggtggggtagggtagtggggaggagagcacggactccggggacgggggctgggaaccaagggccgcaattggtgtttagagaaaagtggcggttgcttctagagcctgtggggactatctggggaagtcttgggaagttgctgtcatcagaaagcaaggtattggaaagagataacctgtttaaagagaaaagggattctggattagaagacagagtggaattgtctcctttctctggggagaaatagctacagtaatcttaggggatcgcagtggaaagaaaatgtttcagcagctgaagaaattggggttgaggggaggagcttattggttttcttttgttttgagacagagtctcgctttatcgcccaggttgaagtgcagtggtgcgatctcggctcactgcaacctctgtctcctgggttcaagcgattctcctgcctcagcctcccgagtagctgggattacaggcgtgcgccaccacgctcggctaatttttgtatatttagtagagatggcagtttcaccatattggccaggctggtttcgaactcctgacctcaggtgatccacccacctcggcctcccggagtgctgggattacaggcctgagccattgcgcccggcctaaatttcctactttgataaaaaatttgtggttacctttacctacatggtgtcagcttgttttgctaatgtcaggaggaaaggaaatagctgctagagaatataaaagagttgagtaggacatgtgtttcaatttgccagtgactcagacgttgggcacattacttcatctttgtatgtcacagtttccccagctgtcaaacagctgtaattatagtttcttatgctgttttaaagtagaagtaaaggttatgatgaaaccctgaagtgttcgttaaaaaagtttggttgaaatattgtcataatatagatatgtatcacttgtttgggagaggcaaaagagaatggtggaacagacaaaaatttctgtctttgagaaactgaagtcttgaaccatctgccattttttgaggacttttatatttattttcaaaagtg

SEQ ID NO: 1241597 - DNA, 4001 bp, Homo sapiens
aacagcagccacgtggagtgggaggttcctgcctttcctcaatgtgttataaccatcctttgtctgaactcaatgccactaattccattattgctgcctatttgctccaattaattttgtgtttcttaaggttcttcatttcccttctagaattaaaaaattgtgctcaatgacctcaggaatgtaaccaaaaagcagatatgggaaaataaaaccaattaagaagtcaaatttaaaaaggtgaatacttttttagcaatgttaggttaatgcttaaatttggttaggtaacatttagttttgtaacttttccaaaaaactaaaaattttggaaatatttcctgacactttctcagtcactctttagtctctacttaaaacaatatttatttttttgcaattccagatgtttttctttaagaaaagagcctaagaaataggttctcagaaacaatacttttttttttttttttttgagatggagtctcgctccgtcacccaggctggagtgcagtggtgcgatctcagctcactgcagcctccacctcctgagttcaagtgattctcctgcctcagcctcccaagtaagtaccttacaggcacacgccacaacgcccacctaatttttttaacaatacattttacatttccaataattgccagaggcacaattaagcattgttgccttgttaagcattgtatcattagcccctatcgcaaagtgagaattcgctcaatattccctttaaaataccttttagttgatactgccaaatccttttctaaccccatcaattatttgactctaaataaatccgttaggaacagtggtagcttcaggtttccatacaggtgggacttggaagtagcaatatggtaagaatggggatgtaggggtttatttagaaactgcatttgcatggcaagaaagctagtttcatatatgttgtttatttggactggggttacggagataacgaagagggggtagttaaaagcctcttcaggccatgccttatcacaaacgtgtgggaaaggttaatattttccaggatcgccagtgcgtttgaggaactgttaacacactctttcatttaaaaggaaagtttttagttttatttgcctattaattctaaggcagggatgactcctcaatttgcttcttcaccaatataaaaaatgtccatgtattggtgtttactttttaaaagtaaggctggtattaatttacctcaaagcacagatgagttcataaataagcagttatgctttcgtgggattttccataaacatacaaattgtatttgaaaaaaaattatatgacgagtctatacctcacactctaaaaagttacctttcaattatatactctcccttacactactccccacatatcaacgtttcattggtcacttcattaacataagtttggactagtttaaagtagtgaggggtaactttttacttcgaacactgaaggctgctaactttccactttagcaatttagctagtcaggttttatcatctgttctggaacaagtagatgcacttacctattgtgaggtcgtggacaggctggaaccgcttatctgtaaactgcaggaggagacatgacttccccacacctgaaagagaaagcacactcccggaatcacgcagccctggaacaccttccagagtatggacttcccggaccagagaaggggggctcccgagccccgcccccggccgccccgaaccgccccgcccgtctcgaatcgcccagcccacaaagtgagccccgcccccgccacccaatttgggagcttcgaatgcccgcccgagccttgaaggcgaaccacctgagggttacctgtgtctccgatgatgatatacttgaagagataagcataagtcatggtgtcgcgtcctctgggttccgggtccgcccgacttctatagccacttacctccgacctctctagccactcaatctaccgatcttcttcttctcccccttccccccgctcccccgcccctccggctcctctagcccagatcacgtctctattgcactccccggaatcatccttaggtcgggagtaccctacgccacctccagggacgcttctagcacttctacatgcccttatccctccaaactccagggggcgatagcccagcgcctgactctctgcagccccacggcgctccttccaatcagcagagagaacacacgtccttgcggaagtgacggcagttccgagtccagtgggggcggtgggagcgatgagggtctgagacggtgggagcggttgtgtgaagatggaggtaggaacctgatagctaagaaggctggcgagagaacgcggccgaccgggttgaagcagggacgggaagccgggcggagaggcgactgacgggagaggagagagagcggggtttggggagtgttgtcagaatgtcagggtcaaaagccatcgctccaagctgactccctgctccccctaacttatccccgcgactttcttttggtttccagtttcccggaggaaatgacaattacctgacgatcacagggccttcgcaccccttcctgtcaggggccgaggtgagccagagctgccgacgccgcgggggtagggcctgaggcagcggtggggtagggtagtggggaggagagcacggactccggggacgggggctgggaaccaagggccgcaattggtgtttagagaaaagtggcggttgcttctagagcctgtggggactatctggggaagtcttgggaagttgctgtcatcagaaagcaaggtattggaaagagataacctgtttaaagagaaaagggattctggattagaagacagagtggaattgtctcctttctctggggagaaatagctacagtaatcttaggggatcgcagtggaaagaaaatgtttcagcagctgaagaaattggggttgaggggaggagcttattggttttcttttgttttgagacagagtctcgctttatcgcccaggttgaagtgcagtggtgcgatctcggctcactgcaacctctgtctcctgggttcaagcgattctcctgcctcagcctcccgagtagctgggattacaggcgtgcgccaccacgctcggctaatttttgtatatttagtagagatggcagtttcaccatattggccaggctggtttcgaactcctgacctcaggtgatccacccacctcggcctcccggagtgctgggattacaggcctgagccattgcgcccggcctaaatttcctactttgataaaaaatttgtggttacctttacctacatggtgtcagcttgttttgctaatgtcaggaggaaaggaaatagctgctagagaatataaaagagttgagtaggacatgtgtttcaatttgccagtgactcagacgttgggcacattacttcatctttgtatgtcacagtttccccagctgtcaaacagctgtaattatagtttcttatgctgttttaaagtagaagtaaaggttatgatgaaaccctgaagtgttcgttaaaaaagtttggttgaaatattgtcataatatagatatgtatcacttgtttgggagaggcaaaagagaatggtggaacagacaaaaatttctgtctttgagaaactgaagtcttgaaccatctgccattttttgaggacttttatatttattttcaaaagtggtgtggaccatttgcatcagttttttttaccaagaattgtcagtggctgttgcatgggcttatcctataatcctaacgttttcatggatgaaaatggggttgacaagggccagttgctagtttaactttttttttctttctttttttttttgagacagtctccctgtagcccaggctggagtgcagtagcacgatcttggctcactgcagcctccacctcctgggctcaagtgattctcctgcctcaacctcccaagtagctgggaatacaggtgtgcgccaccacacccagctaatttt

SEQ ID NO: 1241598 - DNA, 4001 bp, Homo sapiens
gctagctcttctgcagggggcacggctgcctgtgtggccacaaaccgccgatagtcccagcagtgaactggaggggagaggtgacagcatatcttagaggcagggcaagaggagctacctggctgggacccctagagtcccctcaggaacccctagaaacacctcagtgcactccacggaggatgcatttggctccaacatccctttcagcaccagctcagtggacccatcctggatatccctccccattctgggccttactgaggccccagtaccagaatgtgggcaggtgagggctgtggggacagaatctgcagccacgtacagttccgctcatccacctccaggaaacgggcacagagctccagctctcgggtccagttgggctcaggcaggcggcctagcagccagcatcggtggtgccaggtaccataagacttggggttcacccgcaggcagctctccaggaagcccagttctgccttcaccagagcagccaactcttcaggagacctgtacccagaagggaaggggggggtcagggctctcctacagtcaacctcagctcacccctcactttctgcacccagccccctactatcctccatctatgccactggctgccccatttctcctccacccctagacccaggcagtgcaggcgcagggccagggcagtcttctgagatcctgaatccctacgcacttctgagtctccagctgctggagcacctctcgtcggcagttccagagggtggcaaaatcagggttggctcccagaatctggcttgtcagttccagcacggactcatccagctcaccagcctggcgctaagaagataggtggcagggttagagatcatataattttcccactacaggactaaataacgtaaacttaaaaccatccaatattctgtgaatcccacattatacaacaggtactatgaaccatgctttatggccttacaggtattctctcatttaatcttcacaacagccttatgcagtaggtgcaattattagccccattttacagatgagcaaactgaggcccaaagagattcagcaacttgcccaaagtcatacagttataagtgagataacccagaattggatctaggcagtctgactctagggaccagctcttggcctctgcactatactaagggagctacttggggtcggggctacctctgagggccccaccttctggaatacggcctgggtggctgactggtatagcttcagcttctgctctcgctctagccttttggcctccgcctgctcttctgacgtcttcaccttcaggcgtccgtgctacaaggatgaacgggttggaagagtgcaggttgccttgcagaagctgacctgcaaaaaccccacactgtggagccctaggttcatacggggcaaccatggcactgccactgggggtgagggcgcgggcctgcggaggtgaagggctgggctcagggttctcaccatggtgccggctcagggttcaagacaggggaagggtccagtggtagcccttgaagtctgaggagagaagtgtcaatcacgtagccccgcccctactagctccgcccacagctgtgtccggaagcagcaagcgtgcctgggcagagacccccagagtgtaaagaggtcctgggacaggctttgcacgttccacaagaggtgagcacccggactaggacttccatccgtgtggcccttcctatagcccgattcgcccgggccagagcgcgagccggggcacctgggcgttggggaccactctgctccccaaaggttgccgctacccgcccgtcccacggctcccgggcacccccgccccccgcgggcggacccacctgcgctgggaggaggcgcgggggacgcggagctgcggcgcccgccacagagcccaggcgctggctagagcggcgccacgtcccggctcatcgaaacgcagcgcactctgcaggcttggggagggacttgcggcggaagaggccggctcggaggcgcgtgcgcgggggctctgcgctcgctgtccggaaacgcctcgtacctgttagccacctggtgtgtacgagtgcgcacgggcgactgtagcgtgcgtgtgaaatggggggaggaccatgccagttggtaactcagagtgcaatgtagttagtggaagaggtttctccaacagccggaaacccgcaccttcactactccactgacctcaccctggccacaccgacagccttctagatgtcaaatctaacagggggagtttcctgtcattttctctaacctctgaagcatttgacgctacccatttctttatacttgacacccccattctggcttctcctcctgcacctctgcctctctcttctcatctgttcacctccacccctaaatgttggtgatctccagggccctttcctcacccctttttcacttcacccactgttcctgggagaatgtttaaatgtaagccttcaactgcttcgagttggagctcctcagagctgttttggcccacaaatctggcattacactttctctgggtgagttcatccacactcattgttttaattactacctgtaaattgatgacacccaaatttatatctccagcccagatgtcttgcaagcttaaataacaataaataatatacatgcacatacatattcaaacacctgttggatatcacctggtgtcccagagacacctcaaactccaaaagccaaaaggtataaattatctttcatccatcctgtctaaacattggcctttatgttttctattgtagtgaatggcactatttcctcctcacttcttaaactcgcttaaatactctttctcttcccactgccactaggagttcaaactccgaatttcttctccagattgttgaaagtcttttcagtgttctccacctcatcccttgttatcagtccatcctctgtgctactgaatccatttttctaaaatgcagatttgacgtcatatctgtgcctaaaagtgctgagtggctccttttcaggatagaattgtaatctctcagctcagcacatcagacctattggcatttgggctctgcctactctctggctgtatatcctgcctgaccctgccaaaaactcttcatgacagcctacagaaatacttgcagtttcctaaatatgttagcctgttccctcttgactctcctttctccacactcctcctttgccacagtaattcctgtttatctttaagatttaactttttgaactccacagtacaaagaaaaaaaaatgtaactcaagtggcacctcgaggaagttctctaaaatgccccagtctgatttgatagaccttcatatgtacttttaaagactgtgatttttttccctgtgcctactgcaaagaaggttttctggtggagcctttatgaggttcagggtggctagtgagtgtgtgtgtaccacacgtacacgtgtgtgatgtctttgcgaatagtgtgtccatgtggcatgtgtgtgtttataactcacacctgggtaagaaggtagtgctttaaattttttttttttttttttttgagacagggtctcactctgttgcccaggcaggagtgcagtggcacgatctctgcttactgcaacctctgcctcctgggttcaagcgattctcctgcctcagcctctggagtagctgggactacaggcatgcaccaccacacccgactgatttttgtagttttagaagagacggggtttcaccatgttggccaggctggtctcaaactcctgacttcaggtgatctgcccaccttggcctcccagagtgctgggattacaggtgtgagccaccatgccccgccagtgctttaaatctttatatatccttcacacctctctcagcccctggaaatgtatgtaaagtgtccattatatacttgtcctttcctagatcctataacaaattctcgaaaagagacatttttcctatccctgtgtatttgtagtcccag

SEQ ID NO: 1241599 - DNA, 4001 bp, Homo sapiens
agaaagaaaagaaccataggccacacaaggtagctcacgcctacaatcccagcactttgggaggctaaggcaggcaaattgcttgagcccaggagtttgagaccagcctgggcaacatagagagaacctgtctccacaaaaaaatacaaaaattagctgggcattgtgccgcacacctgtagtagtcctagctacccaggaggctgagatgagaggatcacctgagcccaggaggtcgagcctgcagtgagctgtggtcatgccactgcactctagcctggggaacagactgagaccctatcaaaaacaaaaaacaaacaaacaaaaaactataaattctaaactacaaggactttaacaacaaccaattctgccatttctgccttaatagggccactcccatcacttgcctggactattgcatattgtttctggccactccattcatttgttccttaatttactccttccacaggcatttaaatacacaccctgctgaggtctggggtacaagaatcatttaagcatattccctcccctttgaatactcatagttgagatgaaaagagaggtacacacaaataactacagccatgcagtaagcattacaattgctatttaaaagtgctatggaagcagacaggaagaagccccaaattcgcctgcaaaagtcagatcagtgtcacaatcctgccttgagtagcttcctaaaaagtcacgattatcctttaacacttcccatgggactggtagaccacaggataaattccaaacttcttagggtcgcagagaaaaacatcaaaaattggtccctcacttccttctcactcatacatcacattgcaacgttcagttcctatccttcctggcagttacttcacctctcagtgtcttaatttccttaaaacccttgttttacagtcatatgaatttactacttcatatgactgtagtggaggttaaaggactcggggagtgcgtggcacatagtacttaaggtcagcaatcatcatttaatgactctcacatgatctgccctccagccacatggtatgtgtattggtaggtcacgcatcctgtctccctgacttccctccacaaaaccttccccagagtcaagtcttttcctctccaatgttctcatcaacttcgcacatatctattcgataatcttatcaaaatactattatggcttgcaagtttgtttgcccccaccggagcacgtaaattcctgcggtgtatgtgtgcgcgaaagcacgtatgtgtattgcacatgaggggagacggtcaaccctggagaatgaaccctgtcctccttaccaccaagaaaagaaaattcttcatgttagatgttcaacaactgtttaggaacaatattagctaatatttattgagcccttattacgtgccacactgttccaaaggcttcggatattttacctcactttacagataaggatactgaggtaactagttgagaaacttgggcaaagttaaacagctgacaattggtgtgaagctcgcattcgaatccagggaccggactccagattccacgctctccaacaccacctgaagtgggagagtccctcaacttcccctaatgacaggctgcccgaagcgggaaggggctggggaggaagatgggcagcaacaggcggaaacatcacccagaatcccctaaaaagagctttttccaacaatgagcagcttccaagcattccccaccaaaagaaggcccgaagctcccccaattcacagcggggttcttagtgacgatcccgagtcttaagggggcgtgaccagcacccaagagaaaatctccgctcccccaatatcgaaacccacgagcctagggaaggagcaggaaataatgagcgaaccccacttccccacaacggcaccccacatgaaactttccagtaccgggtctgcagcatccaactttcaagtttccccaccctttacacagtttccccgcggaaaacgccgcaaagcaacaaccgaagcactgattgagtcgtcattctggctactgtatccaatcagaggccggcagaggcccaggttggctccgcggcttgctgggaattgtagttaatactatgatcagcctaacagatcgaatctgaagcagtttctcaatatagtgattatcaaaatctgttgcaggaccatcaccaaagagaatgtgaaacaagggaacaccctgtttggaaatttttcttttttctttctttttttttttttttgagacggggtctcgctctgtcgcccaggctggagtgcagtggcgcgatctcggctcactgcaagctccgcctcctgggttcacgccattctcctgcctcaacctccctagtagctgggactacaggctcccaccaccacgcccggctaatttttttgtatttttagtagagacggggtttcaccgtgttagccaggatggtctcgatttcctgacctcgtgatccgcccgcttcggcctcccaaagcgctgggattacaggcgtgatccaccgctctcggccctggaaatcttttttttcgtgtatcatcacttttcacaatggcttaaaggggccagacgcagtggctcacgcccgtaatttcagcactttgggagaccgaggcgggaggatcacttgagcctgggagttcgagactagccttggcaacatagtgagacaccctcccccacccctccgcctctacaaaaaaatacaaaaaataggctgggcgcggtggctcatgcctgtaatcccagcacttttgaaactgcccgatgggttcaccttaccagctgcctagacagaaccgatttatcaggacaggggaattgcaatgcagaaagagtaattcacgcagagccagctgtgcggaagactgaagttttattgttacttaaatcagttgtcccgagcatttgcggatcggagtttttaccaataatttggctggtaggggcttaggaagtggggagtgctgattggtcaggttggagatggaatcataaggggtcgaagtgaggttttcttaatgtcttctgttcctgggtgtgatggcaaaactggttgcgccaaattactggtctgagtggtgtcagctgatccatggagtgcagggtctacaaaatatctcaagcactgatcttagggcttgcaatagtgatgtcacccccgggagcaatttggggaggttcagactcttggagccagaggctgcatgacctctaaactgtaatttctaaacttgtagctaatttgttagtcctgcaaaggcagactggtccccaggcaagaagtgggtcttttcggaaagggctgttatcaattttgtttcagagtcaaaccatgaactgaattcctccccaaagttagttcagcctacgcccaggaatgaacaaggacagcttaacggttagaagcaagatagagtcggttaggtctgatttctttcactgtcataatttcctcagttataattttgcaaaggcggtttcacttcggaatgctgaggcaggcagatcacttgagctcaggatttcgaaaccagcctggccaacatggcgaaaccccgcctctactaaacatacaaaaattagccagacatggtggcaggcacctgtgatcccagctacttgggaggctgaggtgagaggagccagacattgcctcaaaaaaaaaaaaaaccttaatgggccagaaagccatgttacttttctcaggaatcgaggacaatccaccaatcacagaagagtttttggaagaaaacgttttgtttgttttaacttgctcttttcaccaccctttggtgattaaatagtttgggaaatgctgaatgaaattactaaacctgaaacacacatagtgaggaaagctgagagtctgtgattaaagcacaccagggaaaccaaacaaaaggcttggtgtaaggcagctgtggtgagcaaacctagtaagccgttacttcaagagttggtttcaggctgggaacgg

SEQ ID NO: 1241600 - DNA, 4001 bp, Homo sapiens
cattacctgtgaatccctcgcctgcattcacacattaacttactgtgtcctattctcggctaaatctttatttcaatggcttaactctcaagaagaatgaaaacaaaaagatcacaatctccactatatttagaagctttacattttcttgaaaactgagctttttatagcgctaaactggattaactgctttcttactactccactggaataaatacaatttacttgtgacaaagattagctgtcataaatgtagaaagagtaaaaaaacaaactagagacacaaaatctgggttccaattctgactcagcctcctggtagctggctgactactcgatgttcccaaacttcagcttttttgttggtaaaaaatggagaataatatcatctacctatagagttattgcaaggattatcataatttacgtgaaatcactgtaaacagtaaagcatcatagaaatgttgggtaatattggtggtatcctggtggtatgagtaaacaatagactagagaaacatgtacctcaaataagggacttacttttttcactaaataaacatcactttccaaaacaaatacgcatcaggaggacagctcgagataaactctgaactaggattcaggcatctggatgaatgcatcttcttcagccagttccaccattaactctaagtatcaacacaggcgaaataattttccttttcatctcaaatgtcttcatctaaaaaatccaactactggaccagatgttccataagtattattacagcctttatcagcctaccaaatgactaagtattcaaaagagtcgattaacattatattcaaaacttagagcactgtttggtctaccagcaaaacagaacttaagggcagacgataaaaaaaatatttttaattaaaaatagaattatatacaattctcgagaagcaaaggatgagttaaactacctataatagttctccctctaaatgactagtgatgaacaaggtgcattaacaaaagggcggggctccttcccacagctttttgggaaccgcccacttcccaaagaggtgtaactgctacctccttgtcttcatctgccaagaaacttgaaagattaaggtttatattgtctgagagaggattttatttttctttttacttgggtggggttggcagtagtcatctggcaaacatatcctataaacaccattatccacaacgccaggtctccccacaaagtcttaaagatctaagtttttagagtaataccaattttaaaaaataagttcagactattaactcaaaattagattactgtgttaacagtaatcagtgctgccaactgccaagttttcgcttctccgaattattcaccctcccgcgtctccgcagaggctacgatttgccctctcctgcaccgcgccaggtcccgagagagagtccgcaggggctcccaggagagggaaggccgggcaacccaggcctcggcgctgccacccctcgctcctcaccgatgacgatgcgcaggtgcttgaggcgagtcagtgcgtccttcttggtgtctagcaccttctgggtggacttcttcacgtccccgtgcggcttcttggagaacatcctgtcgctgccactgccactgccactgccacagccggctcccagccgggtcccggcggcagaaagtggagggagtggacggggaggagactagccagagaggctcattagctccccagccttgcgggccagggcagagccgactccttcccgatccaggccagggccgccacctccacccgcctcgcgccgcggctccaaggcaccttcggccccagctccaatatggcggatccctctcccggccctgcacggagcgaggcagacccgggctggccgcctgccgccgccgctcgtctccagcggccgccgctcgccgccacaggccggggccccggacccagagccacgaaggtggagctctcggcggcaggagcacaactctctccctgaggcccccttaaggttgaagcttctttagcagcttacaccctgcagaggccgaaacggagacgagtgtggtagtgatggggtttcacgactctgccgtcggtggcgaacggtgtccgtggcaaccgccttctgacgtcaagagttcttgacgtcatgccagcatgagatcacccgtggcactccccgccttggtttcctgtgtaagcagccaaaggagaatctcaagaaaggcaaggaaggtagttactgcgtgctccattgtaagccaaatgatagtaataagcaaagagaagtaatctttattaaatatgtccatgatttatctttgaaaatgtgcataagttgttgtggccaccagatcctctagcagaaagataaacgaagttacagttgggcaatttattctgtcctaaatctattactaataatatttcctgcactatgtatgtgatttctttcatattttttctatttgcaatatccctgttttttgctgcaaacaacttgacaacagaaaggcttaagcagaggtatctaggttttttaaataaaagtaatcttgctttccttttctattgtgcttttaaaaatcttttccccatctgcaccccacataaagatgaatatattgtcagtttttcctctgcaaagaagaattcaaggttcttattacattgatggagtcatctgaagaatctgcaatagctgaaaaaaatccgtgaaattctgaatgacataaattgaaatttttattggaaccctttttttttttttcctttttccttttctttccagacagggtctctgtgtcccaggcagaagtgcagtggtgtgatctcagctcactgaagcctcgaactcccaggctcaggtgatgctcccacctcagcctaccgagtagctgggaccacaggtgcgcgccaccacatccagctaatttttgtgttttttgtagagacggggtttcgccattttgcccaaactggtctaaaactcctagactcaagtgatccgcccgcctcagcctaccaaactgctgggattacaggcgtgaggccactgcgcctggccaggaacatttcctccacaaaataatttgataaagagtgagtttgcttgtttgaactgtttccttctatgttctcacccatagcaatagacttgtccaatgaaatatgtgattaacatagaaaaataacaaaatcagcaaagaagagagatgtaagacatttgccaaaattatgttaaaatatagtgctttgcttaatggtagtttgtttcaacaacaatcctatattttttaaagtacaaaaaatttattcagtttctacatgtagggtttgtttgtatcatcaaacttacaagccatacatgttttgaggaagcttataacataatagaaaaataaggggattgttcaagagattttagttctagttcctctcagcatcagttttcttattaataaaatcaaaataaggtctgtccctcacagtttcgtgaaatttaggcaataatacaatgttttcaagcatgatctttagaattacatagacctaaattagacattctgtttttcacttgcaaggacttacttgctctcgggcccttggcatgtagttcagtctcagcctgattttcctcatttgtaaactacatcagtgattgtgataattaggtgagaaaagtattgaaagttacatctataatgacacatctcataacattcctttccttcatagaatttaaatacagtaatttgtgtaactgtttacagattctctctttcatgagactgtaaactccctgaggacagagactgtatagattgtctaaagttgtatcccagtcttcttgcaaagtgctctttgcaagataggctcaataaatctgtgtcgaatagaagaacgaatgtcactgtcccttcctttctcttgcgcaagtactcagtaaatgtttggcaaatgagtgacataattttagagaataaaaatgtaac

SEQ ID NO: 1241601 - DNA, 4001 bp, Homo sapiens
actcaagctgtttcagtcatttttgctgccaagtctacacaaattttctgttatgaactattttttacaatctgctttttcccctccaaatgaaatgcttgatttcaagaactgctcattgttgagtgctaatgcggggtaagaacaacttaacacacacactaaaacttacacttaagtttacaagcctctacaaataaacctctacgtaaaaagttttcactcagaaacaaatatatccgtttaagcaaagccatatacaacacaatattttgaaacttgcaatctcactgggtttagtgtctttctagatgtgctaaaagcaataaggtagcaaacactatgcattttcaggctggtagttttttcttttttcttcttttttgttttttttttgtatttttagtagagacggggtttcgccgtgttagccaggatggtcgcgatctcctgacctcgtgatccgcccgcctcggccacccaaagtgctgggattacaggcgtgagccactgcacccggcccaggttggtagttttcaaacgctctcttcatgtcccaacttatgggtcaaggtccactcaatctcatccacatagagtatgttttcttccatcctgctccaaaaacagtattagagacccacaatcacgtcagttcctagacctcgtcatagcacaagccaacagatagaccccactgctaaaggagcagagagaaccactgtcagaccaattcgggaagaattcacgaaaagctggagccccaggggtgatggtagcgccatccccagggtctgatcacttagctgggcacaaacacctacaaactgaaggcagcttaacaaaagaggaacaatgagaacgataaaagctacttgaaggaccaccctccccatgttgtgtagctttaaaaaatggtcctataggccgggcgcggtggctcacgcctgtaatcccagcactttgggaggccgaggcgggtggatcacctgaggtcaggagttcgaggtcagcctggctaacatggcaaaaccccatctctattaaaaatacaaaaattagccgggcgttgtggcaggcgcctgtaatcccagctactcgggaggctgaggcaggggaatcgctagaacccgggagacaggatgcagtgagccgagatcgcgccactccactccagcctgggtgacaaagcgacactccgccttaaaaaaataaaaaaaaagaggtcctataggcaaccaactggcacaatctctgcgggagccagtgtcccagggctcaatcttcatatgtggcatcataatacgcctactggaatgagtgcttgaaaaagttaaatgggaaaagcccataaaggtcaacatagtgaacatgaatcttcgacagactagagattgaggaagaaagctcaattcccttctctctctctgaatggtggtgcgagtggctgaaactgatgatgcgtgtcctctcaggccgcggagggtcgatgctccctctccagtgtgggcgaccctaagtgtcacggctgcagagacccggaaagaaaaatcacaggattctagaaaccgcatctttatcggtgcaagatacagccacgagggtgcccaactctaaaatcgtggcagtgggctacatttaagtagctaacacttccaggtcaaaacaaacaaaggtttttttaatgttaaaagttcgcctgaatctcttcgtgacgccattttctgcccgtgacgtcaggggggaggcgccgtgcagcaacgtcacgcattggtgacgtctggtggggaccgggttttggggtttctcaccagttccgggtccccgcaggggggtcccggttctctccgttcctttgagtatgttgtggggagtggagctcggatagttcctagagtctaggcaagaaaagcagcactgcaggtacagagcctcctcttcccgcaaaatggcggcagctctgccgtcttccagaaccttccccaatctgcgcatgcgccaagactccccggctttggaaataacctcactggtttcgcggcaaccgtccaaagtacaggttctcattggctaaagtcctaagtatgggtggagcaaactcaaatgcgtcttagcaaccaccgagttcccattgattggctaacctcagagactccagaaaatggaagcgtcctttggtagccgcccatcactctctcattggttaaatgacttgcggagggcggggaaaacgggactgaaaacgggagtgaagaagccaccaaccccactcctggtgctcgcgtagactagaccagtgcgatgggcggagccaacgaggaggcacaatttacatccttggccgtccctactcggatttgctgaaggagtcacgtcggtcgttaaggttaagctttgtagagaacagcggcgtttgtttaacgtccggggatgctgaactcgaaatccccgttctgagccggctacctaaacaaccttcccgaccacctctcctgacctcggtgcttgggaccagggaaaagcagatcttgccacagacttgtcttggcccacactctgccctatcgtcatggcctgctcccacaggtcataacttccgttcaaatcagtacccccacatttcccactgcaagggtaaatttgaaagtttctcaggtgactccttggatgtagcagtactgagtcctctaaccggaaagaaggaactgatgtccaccctcactttccaggggcctccaggagcccctagacacttctgtggtctactgtagctaccaaaaatgtagctggttataacatggggagagccagagtcggaggacctgacttccaattctgacttggatactaatatcacatcattgtacccatttcaaactccccctctgtaaaatggaaaattggactagatgatctcttaggacttcaaactgtaaccctgtggttttattcaaaaaaaacaggtagcttcttgctggagattcctggatggattccagtcttcccaagaggtaacaaaggagaggtaaccagttgcccgtgcagtagctcaagaatacagaagagaaactggcttcactcactattccatctttttccaaggtggcaaactctatgcctcctccccagagaaaagcctaactgtaggttctaatggacaagagctcactgtagctggtcagaaaggcctatatccaggactacaatagtcattgctcagcttcctaagtagggaatacaactaggcccctttgggtcttggataggctaagaggacagatctgaacatgcctgggtctaagtgaggtgtgggaaaatagtggcagggggcagcatggtcgtgcagtaaagggctataactttatttgtatttcctcttacacaaaaccatcaaaacaagaacagaaaaaggctgaaaatccgttcaaaccccatgttctcagggatattccagggagttcttgaggctgagtgcgtagcttcaaatccagcactaattcctcaccccctggcctgaggtcttcatagattggtggcttgagccctgcaattaattataatcccttgcccaccttgatgtaaggcaggaaagcagattgaaatgctcctctctgatgggcaaggggaatcacagcccatagatgtactgcaccttctgtactacaggagcagaacctgaagctgcttccaaggctctggacacttggcacgcagggctagaggccaatggtatatgagcggcctgtggggttatgaatagcagaacagactggtgctgtcacagcccactcataccacaccttcttggaattgctgcatcgccagaaacgcacacagatggtttggccttcacgtaccgttatgggctgctgtaagaagaaagacaggaaggttcagggtgaagctatgaattatacatggcaatgtattaaggtaggtgtggagataaaatgataaacatgacaagactgtcccaaccctcatgaaagttatttgaagcc

SEQ ID NO: 1241602 - DNA, 4001 bp, Homo sapiens
ttgcttccaaagctataaaataatgtaaattttcactaaatcatgtgtaaataagaaaagtaaactgctaatttgtctgtggacaaaaacataacttgaaaattccaaattcctgttaggtctgaagtagttacccaatgttaacatggactagttttactttaaaaatacattcagaaggccgggcacggtggctcacgcctgtaatcccagcgctttggggcctaggcgggcggatcacgaggtcaggaaatcgagaccattctggccaacatagtgaaacctcgcctctattaaaactacaaaaattagccgggcgtggtggcgcgcgcctgtagtcccagctactcaggaggctgaggcaggcgaatcgcttgaacctgggaggcggaggttgcagtggccaagatcgcgccaccgcactccagcctgggcaacacagcaagactccgtcttaaaaaaaacaacaacacaaaacaaaaaaaaaaattacagagtcagggttggactcttacatttcattgaaaatccttaaataacaaattatgtcaatatagatttaaatgcttatgtgtgttacctggatactgcacgaaggattttacatacgtttttctcaatccccaaccccaataacgtatagatactactataaattcattttacagaggaacaaaaaccaaagcttaaaagaaaaaagaaaaagaaaaaccaaggctttaagttaaatgaattagaatactataagattcacttgaatcatgagtaacttatgaccaacttaatccctttcaagtcctctgaatgtttttggaaatagcctttaaaaaaattaaaagctccaaagactatacaaaaattatttatacattactgcccacggcctaatacacagagtacttcacactaatacagcagtagggtgcaacagaggtccaatctcttcccttctcttggctccactctgcccagtatcaaaatggcatttccatggcaatacaaatccatattacataacctccgaaaaatcttcatagtcctacgtctattccggaaaaccgtatttaaaagcaggattgacgaccaaagaaaaatgagaaagtaacattttaatgtggagcttagtaatcgcctagaatgaatggcgatatacagtttactgcaccctccaatgcgcaaaagaggcaggatggcaaaattcatgactatcttaagcaagccaggagactgctaaaaaggtaggtattagctcaattccaagggggtggggcccagttcacttggtggcgggctctagatggccaaagaggaagggaaagatatccgttggtggccagcacctcgctaaaaagggtgggtagaggctaacttcaaggcaacggctggggcgagagtgtcccaggcccgaaaacctactgtggggctccggtaagtaagggggctcagggaagggctcccctggggcagatcgatcgttttgtatctaacgtggagcccagggggggcagagacgattcactccgcggcggaacgtggaagggaaagggaaagtgggcgacaatgcaagacggaaagctcaagccgtaggtctggcctccaccagctacggctgggcccacagcttttccaggccttagagaagagaagaaaccaagcctcgtgccgacccctcccccacccccgcctccgcgctcccccttacctctaccccaccctggcgctttcgcagccaccccggcttttcctcctccaccagctgaggcacccggtctcccggtttccacacgcgttcagagacacaaactcacccgccgctgaggaaacggtactgccttcgcgaccttctgggatccaggttacgagtgcgctccactggttcgagatttctgcccgtcgctcgccagggagactgagtgcccaagcgcctactcgcacaggccgcaaatacagccgcgctgcgcggcgagctgatggaggtcttcctcttgcccggcgtgcactgcggccgggggcggggagcgcggaaccatagagaagaacgtatatagatcgtctccgctgttggctctgactcaccaagccgagacgaataaccatagagaagcagcgtctagcggttactagaaaggcccgaactgtaaattatgacccaccatgtttgattggagccgactgaatcttacgactacgggacgccatcttgaggtcaaggttccggctgggcacggcgcgaggagtgttagaggctttctcacttttcgtagtttttcggggggtggaaccttgctttgtgattccttgaggttcgaggaactgataactgggcgcgatctgcaaccttagtgttaaaccccaagtgctgttataacaactactcgagatcaacaaataattggcaaaggctgtggaggttttttgaaaagcaaaagcttatgcgtagttgtagggccaaagaggtggctagaagatgtttggaaaaacgtgaaaagtcctgtaatactagttaacacagctttcgttctgtaatctaaacgtgctaaaagaacttagcttaagttaatggaaatgaataaaattaatcataaatgattacgttattccaattgtggaccttataggcaatatctagttacacgcctttctcaactgcttgcctctaggaaggcataaaacggattcagtataaagttattgcctccctgagttcctggtgctgtgttaagtgctggaagtatgaaggcaaatggaagtgagatttgttcctgtcctgcaagaactgtgagccaggtgaaatagatgacaaaccatgaccagcctaatataaaattgaaacatactacacacttcctgcctgcctcccctacttaattttactctaaagcactcataaccatctatcataacatacatttttcttgctgattttatggtccgtcactacccccactagaatgtgaatgtaagcaatgcatggattgcctgttttgtgcaagaacaggtcctggtacatagcaagcgctcaataaatatttgttgagtgacagaaatgattaccggccgggcgcggtggctcacgcctgtaaccccagcactttgggaggccgaggcgggtggatcacctgaggttaggagttcgaggccaccctggccaacatggcaaaaccccgtctctactgaaaatacaaaaataaactaggcgtggtggcaggcgcctgtaatcccagctactcgggaggctgaggcaggagaatcgcttgaaccctggaggcggaggttgcagtgagccgagatggcaccactgcactccagcctgggcaacaaagtgagacattgtctcaaaaaaaaagaaaagaaaagaaaagaaatgattaacatatgatgagtaccaatagaacacaaaatttagtgggagcacaaatgagaaagtagcactaattactaccatctgcaaaatttacatccttctatacttctgcttgctaggtttccttaccattaactaaagttaataatacctttggccgtgcgtgatgacgagtgcttgtagtcccagttacttgggagacgaaattaacttatgtatgtttgtactttgttcagtaaagtgctattcaaatttatagtttttatagtgctactctataatgctatttattgtttgtaaataaaatgagtttctttttttgttttgttttgtttttgttttttgaggaggtgtctctgtttcccaggctagagtgcagtgacgtgatcttggctcactgcaatctctgcctcccagttcaagcgattcttgtgcctcagcctccccagtagctgggattataggcgtgggtcaccatacctggctaacttttgtatttttagtagagatggggtttcaccatgttggccaggttgatctccaactcctgacctcaggtaatccgcccacctggacctcccaaagtgctgggatcaaagctgtgagccaccatggccgcccaagagtttgtgcctat

SEQ ID NO: 1241603 - DNA, 4001 bp, Homo sapiens
ttggggagaagaggaaactatcaaaaacactaacatggacttaaaagaaacacaaacgcgagtattagacaaataaatttaacagatttacgtcaacaaatcaaaatttagaaggccaatttaggaagtcatttatttccagagtgtccaagagctcacctaggacctctatgtattttcacttcaaagtgcagtttagtaccttaataacagcttgagagcaatcgcctttttcaaggactagatcattgcaattttctgcagtcttgtttccaaggaaaaaacatgtatgcgtttatcttttcaaataaactagtggtataacccacatacagaaccccagctctaaagccctccaaccatggaggattgttaactccagctttacaagatgctcttttgaattttatttctgaaataaatcctacgttctttcaaacattttccataccaacaacctttaaagacagtctcatacagacactggctagaatctcatgcattaaaatctgacgaattcctttgtctgatcggattttttttcttgtaccactttaaatttgcttctacacagaatagcagccagggaactaagtgttccattctagggtgtagggctttcttgtaggtgaaaagcatttgttaggctaaagcttctgatgcttctcaatttcacaatctcttcctccaaaaaaaaggaaatacacacatttacaaataggtcctaaaatccaactgccacacgcgagactctcttccccaggcaggcgccctctggaaaacacacttcttttattgactggttttggggggtcgttcttctactcgccttctggatgggagggcagtcaggagccagcaagagcccagaggctgagaggaggagcaaaggcgtggggagcagcctttgggaagggttccgagaaaggggtctctggggacctcctaagtccggggcgctcgcaggacactaactctccggcactgccacccttacccctggccgaggcgcagctcacctggacgcagggacccccagcgcccccaggccaggtgtggccacctccgacgccacccgcagtcctcggaggcgcaagggggcagcggcgccggccctgctgggggcgacctggcctcccccgggtgcagaggcacgtttgcagaacactcgtgtgcgtgtgcgcctcctcgtcctcgccctgctgttctccccacggacggcagggcgaacgcacaaaaagaaagttgtcggcgggctcccgccccctcgggctcgccggggacccggggctcccgctcatccccgccgccggccggccggggccgctactcaccggggtcgaagtcgggcaccaccgcctggtactggggtccgaccctcatgccaccgccacctgcgggggaagcagaatacggcggtcagcgcggcgcggggcgcggggcccggggccgcgggggcggctgccacctaccgtgctcctcgtcgctggacgagcccgagctgccttcctcccaggagttgctgctgctgttgccattgggcgccgccgccgccaaacttttattctggccattattgggggcggcggcggctgaggcggcggcggccgaggctgaggaggcggcggcgcccgaggcggcagtggcggctggcgaggcgcaggcggccgaggcggcggcggaggcggcggcggcggaggcggaggcggccgcgttgttcctccctctccgcttccctgagacctcggggcccttctccaccatggccggcatcggcgggggccggggccgtgcgaaagtggcggggacccgcggctcctgaggagggggcgccgagacgggggagggggcgcggggccggcgcggggccgggcgggcgcggcgggagcccacgggcgcgagtccgagtcgggggaggcccaaacgggcagagcgcggagccgcttcaagcccccagcgacgagccgagcgcaactttcgctctcatcgccgccctcacttcactggcaccaactactccgggagcagcgagcggagaggggaggaggcaggggcggggcctgcaggggcgccgggggaggggggcgcgcagcccaactgacgcgagatggctccgccccccctcgcgctcccattggctctggtgggatttggacagccagcggcagcggggttggctccgcgcgcccgtccgtccggggcggcggggcgggggagcggggaggggcggctccgggcttccgttggcgaggttcggttgacgcgtatcgcccgccgtacgtggtttgaggtttgccatctccctacgccccatgatccatctctccaggcagcggcgaggagttcgcggccctccccgccccctacccttggccgcggcccctgcccttgctgcccgcgcacgcctcccgcagcctctggccccccatctgaaggaccccgctgagagtcccgtcgacttctcaaagtaaaatgtgtctggcgctgggaagccgcggagcgcccggccgggactactttccgctgcgcggaggagtacgggcgcgctaagactccatacaaagaggaaactaattgggggaaactcgctgcgcccccgcctttcccaggggacgcggggctggcgggggcgggggccgcggcgcgggggacgggcttcccaggcggccgcctcccctggcgcgagctgcgtggggactcgggtctgcggtgctgcccgctaattgggtgggggaggccggggcccccggggtggcttgggtgcggggtgcgccgcggcttcagaggcccaagggagggtccccgtgggtccccggggcacagagtcccggcgtggggacgcccaagccgcctgggtggccgctgaaagatgaatgaaggggcccagtcgtcctggggcgggggtccaggaagggtaaagaggaagaagctattttcatcccaagctctcggcacgggaggagggtcaacttctttcggggcgagggcagccacttttccggacctgccgcccgccccgcctccctactccccccggcacccccacgagggagaacacggggtgcgggcgggtggggtaggctgaggctagcctgagagccgctgccttggagagggaccaccgggcagccgtacagctgttaggaggctgaggagtgtaactgccttggaggtcccggtgccctacccccagccaaccctgaaactacgcgcccttcgtaattagaccagtggaggtctatacggaaaatctttttaaagcagggaaggctatttttcttttaagttacttcaaacctgagcttaatttggggactagctctggatataaatagctacagggagaatttgggagttttatggttttaaagcctgagtaaataagcagggttttgtcttgaacattttctgcagcatgaaccattattaactttattgaagagaccacgttcacttctgcctaaatggcctttaagaaacagggctgggagccctcctggtatagaagcccttcccccaccaagttcaggtgggggacttagacttttagactctcctcaaaagtacgtccctctccttggagtgccctggatgctgcaggtgtgtgccccaatacaccctgtcagctggcctgggcagggtacagaaccggggtggcattcccggggctgggccaccggctaaggcctctgactcatccggaggtgagccctgtgtgaggaatgaggtccagaacacgctgccccgctcgcttggtgtctacaaagttctgccacgagactagaaggatcaacctacaagggcacaaaggtgatactgggtcattaaggcaatagggatagcagagcacacaaggccgccctctccacccaccagcccccaaggctgaggccaggctgggctaccagtaggggcgcagcagtggacttgacaagcattcttttttttttttttccaacgaatattaacacttaatatgtgccgggccctgttctattttg

SEQ ID NO: 1241604 - DNA, 4001 bp, Homo sapiens
ttcatttttaaactgcatgatattttttccctcaccgcccttctccccatcccctgctgagaatgatcgtataatgggatgttgacttctcatttctgttatgttgtaaagataggattcgtattaataatttatttaattctatatgtagcttcattgtagaataaaagtcaaggttaatatctaagttttgtacagaatttgtcagacttcatactaaagttgctttagttcctgtgaggtgggtttgaggtataagaaaatactgcaaacattttttcaaaatacttaggaaacattttagttaaaagcatactattcaatgaaaacatagcatgtttagagtggttaaaaaaagaacactatttaaaacataggctacatccacaggatactgaccttgtaacaaagaaaaacttgaagtcacatcactttttcttattcttaatattaggagttctaaggtgttcataaaaacccctctagttgtaagtaacttaactagatgggtgataatatggtaggttccatattctgtgtgagaacactgggaacctgtcctttgtgtttttgtctacgtaactggaaatggtgggtatttcatctttgtctgccctcttggagctgtcaccttggatcacagaaggagcagagcagtccatgctccctgagtcctccaggtcctcttgctcactccctctgtcagagctgcttaggaagtctttcagaacttgcttgaagatgtagactatttcccatggcagtacatcattttctgccaaaacttctcgaaatctagaggggaaatggtaatgaatattcagtttagaacattttttgttatatctctttatctccaaaatacagcttgaataatgtatacaagttacccaccttttgagtattttgcatgttgttttaaaattatgcttctagtaaagaaattttaaatgtaatttaaaacaattgctcaccagacatctacacagttaaagaatttacatgatagaatacagtttctagtcaaaatatatgaggaacttggacttagcagtagcaggaatcataagagaacatagtatttttacctgctgagaatagttccagtttggcaaggttgaacttgtgagcaaagaacttcaagttgtctttgttcagtcactgggatagttgtgtggggattctggtagtttctgagccagttgtaatccacacctgtttttttcactttttgttcattttcgatttcttgtattaatctctctcgctcctttaggtgccattttaattcccgaagcagagtctttgtcactatgtctgagccaggatagtgtgtgggtttgtaggaatcgtttttgggccatttcatccagccaaaaagtggcatttttagcctatggaaatattttcacttgtttatttgctcaaaatgttatgttcttctgagcaaatatttgtttctttacaataaatttgcccgaaaagtgcacgattttttttcacatttagctatgcaggtcaaaataagattagaacatggattaacgtcttaatttttaactaggtcagtggcagaaaccaagctttgaaaatgcttttatgtagcttagcagaaattagatatacaaagtcagagataacatatagactgaatgatatccgaaaataacactaacacttgctgtgaaaagttcttaagagacttaaaatattaatgtcggggcaagtgctgcctacagatacttttgatttatgttttggacagaaaaggtttaaagcttacctgttaagttgatgggctgatgtgatgttgccaaagagttgactgaagttggtgacgaagctgtgtttcactgggacgtatcttgctctcctaggtgtgtcctctgtagaaggaatgcgccaccttatttacccaccgaaactgtatttgaaataaataactttctgtgttaggaatgaggctgtgatgtcttcatttggagagaatgctcattaattcaccttgtaagtaagctagaagaaatgacaaaaataactgactatttaatcttcacaagttatataatggtctgccttttcaatgtagctcagtctatttgaaaaaaatgccagcagctatagatgctggtcctaaatgcattccgacatgtctttggtagtgaaacgaagaatggtcgtctaaagcaccatagatgcgctccgagctagagtgaagactgtcgcgtgatgtgatgctttgctgtgcatagctgtaggtcacagtttagtgctgtatttttatgcctgtagagctctaaaaatagccacgttgcttttattcttcagcttaactttcaggccatttggaagccgggtcactgtcccctctagtgaaaacaggaaaaatagattagacttgactatttgcaaaacatacattctgagaaaactcattgtaattgagtgaaataggtaaagaatgctgatgtgaattataattgtgaaatatttagcaaatgttacattttgtattcattttggttttttcaaaatagttaaatttgtatatttaagcaagttgaaatgctaggggacataataaacagctagataactttaaaatatactttataatctctgaaaatatggtaataaggcagtaattggttgtcagggaaaaatagaggcataagaacatacaaaattctaaacaaaatcttataattcatcgtagaaaaatcattttcgtgttttttttttggagctgaggatgaaaaacttatatttactatttaggtgcatattggtttgtaatggtcattattgtgctatttcttttttctttctttcttttttttgagacagagtcacgttgtgtcacccaggctgtagtgcagtggcatgatcacggctcactgtagcctcgacctcctgggctcaagtgatcctcccacctcagccccctgaatagccaggaccataggtgcatgccaccacaggtgcatgctacggcatgcctggctagtttaaaaaaatatatacacacgcacatatgtacatacatatatgttttatatatgtacatatgtgtatgtattttatatatgtacatatatgtatatatacacataagtatatatacgcatatgtatatgtattatatatgtatatataaatatacacacatatataatacacacatatatacacacacacatacatttcttttttttttttttttgtagaaataaggtctccctgtgttgcccaggctggtccgtaaactgggctcaagtaatccacctgcctcagcctcccaaagtgctgggattacaggcatgagccactgcgctggcctgtgctaatttcctatgcaagtgtttgtcttttgctaaagagtagatagtataaaaggtcttttactccccagttctctgtgaaacgactgcatagtggttttcccttttatagtatttgtttcttctgttgcttttcctttcaagtgagccatgaagagtagacgttgtttacatcagacttgcatgtcatgcatgacccagagtgacgtgtgtggccaccctacagctcctgttgcttagatgttagaaaaagccagatgtcaggactgattattgtcaactggaaggttttcacatgacattgcatatactgttaggagaaggaaaggagtaaagtttatgatgacagaagtgtcctaccaaattttatactaaaattacagcgaatcttgccgcatactcctttgaataacctccttgttactgcataaatttttttcctctgaaatggtaacaaaaatatcagaacatattggatatggaacttaagccaaatttctgttcaaggccctctgcagtctcacattatccctccttcaaggccctctacagtcttacgttatccctccttacctggcttgctttcttgctcgaccctagagcacaccttttgtttcagccaggccacgttgccccctgacgcttgccatgcttacttct

SEQ ID NO: 1241605 - DNA, 4001 bp, Homo sapiens
ccatgcgccaccacgcccagctaatttttgtatttttagtagagacagggtttcaccacgctggccaggatggtctcgaactcctgacctcaggtgatccgcccacctcagcctcccaaagtgctgggattacaggtgtgagtcaccaagcccagcctagagtgcttgtttctaagtactatactatattgccttttccaaatgaatgaatgcacaaacacagattggtggttctcagactggcctattctcttcttggcaatgttgggactctggttaaaacaatctgttgaccaggagatgcattcttaaagagcatttcagcctttttcattgaacttggaattgcaaggtacatactcttagccattgaagctacctgcatagtgcgaaaatgctgacagggaggcagattaactcatggtccccacaaaccatcacctccctcctcagaaaacaagcctctaggctgtttcccacatccccttactgtatgtagctccaggagtgacaacttagtaggacctgtacttagttctttcttctccttaaccagcaggaatgaaagagacaactataaaagtccagctctggcccgactcccataaccctgctgagttgggaatacagctcctggaatatatatatatatatatatacacacacacacacatatatatatatacacacacacacatatatatatatatatacacacatatattttttttttttccagaaaaatccctctggggtatgagcactattttcagttctggttcaacttttcattgagattctatgtggataagaggatcttgtagtgaaaaaaagataaaaagcagtgttttcatctgagtgtgagaaaccatgtgtgcctagaggtgggagaactgagtgttcagaaggcagaaaaaatataactggaagaggggcaccagagaaggaagagaaaataaaaataaaagaaggaaagtaggtgactgtggtaagaaatgactgtgatctggcctggcttcaagttctattgggactaagaccgcccacctggggaaggagtgtgtctgtctattcagtcactggtccgtcaccactggtgatttacttagaaccaataagcaggctgccggttttacagcccgctgctgattcactggggcacttggccagccttgggctgattgatctatcacctggtcaataccttcccaccattctcccagccctcaccgccccagtaccctagctcctaactcagatcccccgtgctcctgctcgcaaggcaggatagagctcataaccaaacactcttccttttcacttttctcctttacaacatccgcccacagaacaagcgattgtaacagcaacgagagagcaaggatggggccgcagatgttacgattgctatcagtttcagagggcgaaatgtggaatcgctcctttgtacctcgaaggctggtttaaggcgtggggaataaggggaaaacagcgtcgggccatatcccattgaagagtccgaaactcaagcgtttgaggtagccttaccctcgggattccctggagccagaatcagggggtgcttagacaaaagaaaaacaggccagggaaaagcagtgtgccccggactgccgccctttctcaccgcctggggtctcgggtgtcctcctggcacccaggacagctggacctcgcctccaacccaccgaactctgggctccgccatcttggagcccccccaggggagttttccaagaaagctttggtggggattctatgtttccctcccgccccgcaacaagaattctcaagagaaggcaatacatttgcacagacctgatttggggcgcagccatatacagaaggaagggcagaaggaggagcaacagcgggaacatgagctcaaccatctctgccggctgcagcggcaccagagcgggatgctccagcgttgctcgccgactatggcttctctttctagacacgccccaattcaaattgcgacagcccggggagcagaccttctgggaaatgtagtccagagcttgacagcctcaggctggctacgtgggagcgctgccgccaacgctggcagaagttgaattatacatcgctaatccccaaccatctagggcttagggcctgtgggatcattcacccagctctcagttattttttctgccttctgaatactcagttctcccacctctaggcacacatggtttctcacactcagatgaaaacactgctttttatctttttttcactacaagatcctcttatccacatagaatctcaatgaaaagttgaaccagaactgaaaatagtgctcataccccagagggatttttctggaaaaaaaaaagtatacactataggaatagtacacttattcctatagtgtactaggcaccgcggtgtttgtgaaatctctgcagtcctctatctccccagacccaagtccagtgcctggttcagttttccccaatcctggttaggcagttaccgcactgtttctcctggagatcagatgttggcgtctgggaaatgaaaggcggattagacaggagaggagcggtccgaagtctgacagttgggaaggtgggggaatgtaaacccttcctcctcgaggattcctttttccagagaagaggaagcaataagtccttgaagacattctcaggagaatcactttattgtgtctatcttgaattatggtggcaactatcatgatttttctagtgtttgagtgttcattgataatagaatatcgtcttcctgatggcttgggtcacatacattaactcccagggtagcaatgaatatctcagattggcacagttggttttgccaactcgtgaaagtatttaatcctgtcttgaattaaggccatgaatatgttctctgtgaataaataggttccctgttcaatagtttctttcatctgaggcctatttcctgggggtgaaagtggagggtgttttaaccaatcaatatctgtctgtgattccttaattgtacccagtaatattttctggtccttttgcataatttccatttggttaaaagacacgggttccaatgaactaatatattttatagcaaattggagaagagagggtttccttcacacaatactaattcctaccaatttaacattagattacctagcaatcatcacattttgtcacattctcattattgtgttacctaatatttgtattgggttttataactttataaaagcctttcatttgttttgttccttattcagtcattcacgcatttgacaaacatttatggcattcctatagtgtactaggcactgtgctgatgtccagcaggaagccaggaacacataatctctgctcgcccggagttcatggactgtcagagaagaccttaaataagtaatcactgtaaataaatcatggtgaaggttatgaggaggattagagaaagctctgggagcttttacaagggagaggagttctagatcaggagaggcttatttgaggaaataacatttgagcggaggccagagggaagttagtaggcaagcaacatagacaagagtgtgctgagcagaggaaagaccccacctgagggttcacagtcagagaaagcagggtgcactagagcaacagaaaaccgtctagggagaagggagagtgccagaaatggcaataatagccagtgcttaaatactgcttaattatggccaggccctgtcccaatgatttatatatatatattaactcttaattcccataacaactctaagaggtaggtactataattttccctattttacagacaagaaaactgaggcaccgtgtaagctagcctaggtcaaagaggcagagctgggattcaaactgaagcaggtggtgttccatgagagggccctatatgcaaagtggcccccaaatgccagaggagccaagacaccaaaggttgaggcagacaaatccagtttcttggtaagggtgttttactgt

SEQ ID NO: 1241606 - DNA, 4001 bp, Homo sapiens
gggcaacatggcaaaaccccatctctacccaaaaaatgcaaaaattagccaggcacggtggtatgcacctgtagtcccagctattagggaggctgaagttgggggatcacttgagaccaggagagagaggttgcaatgagctgtgatcatgccactgcactccagcctgggcaacagagtgaaactctgtctcggaaaaataaaaaaagacatactgggttttctgagactccagctagatacatattatggcccattgttgtgcacatcttaaaataatagacagattagaactcaagtggtccacccagaactacagagttaacatgtaggatcgtctaagttctctgtctacctctatatattttttctgcctactttgaaactactgacttttctacttgtgttgagataaagctcactgtttatagtattactaacttaagaagacttagaaattttgtttttcttatacgattcagccagttcaagctaaaatgttaacattaaaaacctaactctaaactcatttgaaactgaataaaaggataaaagatttttaaaataaaactgccatcgaactaccttacccaaaaattttggctcacagccttcattagattacctattgggacaaataaaatttagccatgtgaactaacaggtcccaattttttccaaaaataatttagatccaactatcttttataaactggtgagtttgtattactatctcatgactaaaattctaaaatgaaaactataagggccagatgaggtgactcatgccagcagtcccagcactttgggaggccaaggtaggaggatcatttgcgcccaggagctcaagaccagccctggcaacatagtgagactctgactctacaaaaaaaaaacttttttaagttagctgggcatggcggcacgcacctgtagtcccaggtactcaggaggctgaggtgggagaatcacttgagcctgggaggtccaggctgcagtgagccatggtcataccactgctctctaccctgggcaacagagtgaggccctgtttcaaaagacaaatcaaaaaataaaggtataagatctctatttgtgcatatatatgtgtgtttagatgtgtttacatatatacatgtaatatgttatatgttgtatctacatgatacccaattgacttatagataaatgagcactcataaattagtaagcccaaaggttttccaagttcacatgacttaagtaattctttaataaataaactggctttaaaattattagtaaaataaatattaaaatgtcttcaaaattgtcaacatacatatttgcctagatttatggtcagatttatacttgtcttattaaatattttacagggtcaggatttggcacaaaggtaaaaaactatgaacccagccaaaaccaaaataatctttgtgtgattttttttataagtaagactaatttaatattgttggtttaagaaatacagctaaaccttctgagttatcaacaaaatacccatgtatttaactttaaatttcttgcttaggtaaatatctgacattcacaggctataaaaatggttaatagaaaaaaacttaaaaaactgagcacaggccaggcatggtggctcatgtgtgtaatcctagcactttgggaccctaaggtgggagaatcacttgagctcaggagtttgagaccagcctgggcaacataatgagatctcatctccatttaaaaaatatatatatattaaatttttaaaaaagctgggcacagtggttcatgactgttatcctaatgctttaggaggccaaggcaggtggatcatttgagatcaggagttcaagacaagcctaagcaacatagtgagacactgtctctacaacacagtgagatactgtctctacaaaaattttgaaaattagtctggcatggtggcacttacctgtagtcctggccactcaggaagctgagaagggaggattgcttgtgcccaggagttgaggttacgatgagctgatcatgccactgcatgataataatttattacatggtaaattattttcctaaagcaaaatgacaggttaattataaaagagaaagggtagggcaaaacaaaagttcaaacatgtcataaatagtctacagaaatcataataggcctggcgtggtgactcatgcctgtaatcccagcactttgggaggctgaagtgggcggatcacaaggtcaggagttcgagaccagcacagccaaaatggtgaaacctcatctctactaaaaatacaaaaagtagccaggtatggtggcgcatgcctgtagtcccagctactcgggaggctgaggcgggagaatcacttgaacctggaatgcggagtttgcagtgagccaagatagtgacactgtactccagcctgggcaacagactccatctcaaaaaaaaaaaaaaaaaaaaaagaaattataataaagttctttaaaatttttttaaatgtatatgtgattaagttggctataatcaaaaaaaagttataagtgtttctaaagattgagattttggtcctctatgttaaaataacattgtcttaaagtataaatttgctcttagtgaattacaagagcttttgattttaaattctacaatctatttcttttctaaaacttctcaaatttatatctcaaaaaattctacttgtgctatacctcgctgcacatgattcccaagtcatgaatcgttgttgttcgttctttatacccttaaaaagatacatgtttttcttggttgaaatgataatcctctccttcaacctttttgtcaacttctgtaatctttgacttttttttttttttttttttttgagatgaaattttgctcttgtcacccaggctggagtgcagtggcaagatctccgcttactgcaacctccgcctcccaggttcaagtgattctcctgcctcagcctccgagtagctgggattagaggcattcgccgccgtgcccagctaatttttgtatttttagtagagacagagtttcatcattctagccagcctggtcttaaactcctgacctcagctgatccacccgcctcggcctcccgaagtgctgggattgcaggcatgagtcaccatgcccagccaacttctgtaatttttttttttttttttgagatggagtcttgctgtgtcacccaggctggagtgcagtgccgcgatctaggctcactgcaagctccgcctcccaggttcacgccattctcctgcctcagcctcccgagtagctgggactacaggcgcccgccaccacgcccggctaattttttgtatttttagtagagacggggtttcatcgtgttagccaggatggtctcgatctcctgacctcgtgatctgcccacctcggcctcccaaagtgctgggattacaggcgtgagctactgtgcccggccttctgtaatctttttctctggttctaactctggtgtggcctgatgctaaaatgtttatcttaaagctctggaacaaaaccattttcctccaatataacttgattctgtagtcttggcttttctcgatatagctaaattatttcctataaccagggcacttttgatgctgttactgagacatatttattgtcctgcttaagatacaagtttccttgtttactttcctcaaaaatatagtgtacactcataactctggacacactcttcctgtattttaattaaatccaagtatcctttttttttttctcgctctgtctccaggctgcagtacagtggcatcatctcagctcactgcaacctccgcctcccaggttcaagcgattctcctgcctccatctcccaaggagctgggactacaggtgcgcaccaccacgcccagctgatttttgtatttttagtagagacggggtttcaccatgttggccaggatggtctcgatgtcttgacctcatgatccgcccacctcggcctcccaaagtgctggaagt

SEQ ID NO: 1241607 - DNA, 4001 bp, Homo sapiens
ggcatggtggcaaatgcctgtagtcccagctactcgggaggctgaggcaggagaattgcttgaaccggggaggcagaggttgcagtaagctgagatcgtgccactgcactccagcctgggccacagagcaagatcctgtctcaaaaataataataataatagtaataaaataaaaaaagaaataaatggggcatggagagccccaaatgctagtaatctgtttgcagcaggagccactgttcaaatggggaaccaaggaagggggtgacattaagctgtaggagtattgggaatagatggaggaggacaggggtaagaaagcccagtgcagagagatgagagcctggattagggccttggcagtgaaaacagtgtggagacaagtggggacaagagctgcctccagtggggaaaccgtctgatcagattggccctgagtaggtaagtacagggggcttcgcctggatgggtccaccttggcagtccccctgcaccatctcctgtgggagagagctgtggtaagcttccttccccaaccccaatgtcagagtgacacagggacagcactccccttctgcattgccaattcacgagtcttggggaatgagccctacctgagggatatcgaaaggactaggaagtctgggatccacagacatcatcccaaaaaagggatctggagcatcttctagggtctccatcatggccaggtggttaggaagcagcaggctgggtctgggagagaatgtaggccgtgaaggactgaggctgagccaggctgaggccaagctagcaggtgttccatcaaaggcccagggcacactcacagctcagtctccatatctattcggatctgcagctgggcacggtggaggcgctccaagatgtgctggatgtcctctgtgggcagggaggacgaggtagacagccagcttagcagacagctgctcagcccgccccacctttgagggttcccagccttacccacgaggtactggcattgttgagaatagacgcggatcacaccgatctgaagttgggctgagagatagagggagaagcggggccgcggcaggccgggctgcgggggttgcactcgtaccagcacgtaattgaggatttcctcgctggggaacaatgcgccctgattaccgctgcgtccaggagtgggcccacagtcttggccaccccatcccctaactcaccccccgcaccaggccctccttcccttttctgggccttaccaggttttcaccacattcaccctcaggtattcgcgcttcaccaaccggctgccgcgagtcgccgccagcctgaagtgggtggggaaggtgggagaatggggatggagggggagctgtcaggctgggatcccgggcagcgtccgccatcgcgcgccaacgggccccgcccttaccagatggtggcaaagcagccggtgtggcgctgaagcacgttgggatagtagaacattgtccctctggtctttcaccctcgattccaccagatccccgttcggatctgagtcggaattctttagggcacagaattcccaacaccttggagagaagtcaggatttggacttctctggtggcaaggtgggtgcacctagaaagccaagttaatgaggcaacgaacaatgggcagatacacaattaccaggataactgagacgcaggagatgggcgcccctctctgtggaccctcagtggatccgcacgccacgtgatgcgtcaaacttgagacttctgggttgggttccaggttggagatgcagagctccaaggggacgtccgggccggaatccagagcaggtcccgagggagcacggtgtcctccacagcaggcctcggtcctcgagcgctgggagcgatgtcaggcccctgggccttgcactggcttgggcggccgcggtgtggccccgggccgcctactgcaggactagatcgcaccgcgggaagcgagcgcttcggggcaccgcacctcgctcctcattagatggcggcttttgccctgacagccaatggggaacgggggtcgggtcgggaacgccaagtatcctggcaacagggtctcccgaggcagccagcaaaccaatcataaggattttgcgcgccgctggggtccattgtgaggtgttccgaccaatgggctccggttctcgcctctagtaacaggcgccccttccttgaccaatgagcgcatccccgtcgctcccccgccgctcccccgccgcaagcctggcaacaagggcgcctcaattggtaggggaggtcgggtcacctcgggggcaactgtactgggcctcttccgggtgccaagatgtaccttgcacggcgcctgacctgaggttagaccccgcccttcccccaatccacaaactccgactttgtttccaactagggcgtgtcgtgtgctgcagaggaagaaagatgtgagatgaggccgggcgcagtggctcacgcctgtaatcctagcactttgggaggccgaggcgggcggatcatgaggttaggagttcgagtccagcctgaccaatatggtgaaaccccgtctctattaaaaatgcaaaagttagctgggcgtggtggcacgcgcctgtaatcccagctactcaggaggctgaggcaggagaatgcttgaacctgggaggcggaggttgcagtgagccgagatcatgcagctccactccaacctgggcaagggagcaagactccgtctcaaaaaaaaaaaaaaaaaaaaaggctgtgagatgatggccttggagccaccacaggtcaatgaggaagaagtccattttttttttttttgatggccttggagccaccacaggtcaatgaggaagaagtccattttttttttttttttttgagatggaggctctcactgttgcccaggctggaatgcagtggcgctatctcggcaatctcggctcactgcatcctctgccccccatcccctcaggttcaagcgattctcgtgtcttggcctcctgagtagctgggattacaggcgccctccatcacacccaactaatttttgcatttttagaagagacgggatttcactatgttggccaggctggtttcttttttttttgagatggagtttcactctgtcacccaggctggagtgcagtggcgcagtctcagctcattgcagcctccgcctccccggtgcaggggattctcctgcctcaggctcccgagtagctgggattacaggcgcccaccaccacacctggctaaattttgtattttttagtagagacaggggtttcaccatgttggccaggctggtctcgaactcctgacctcaggtgatccgcccgccttggcctcccaaagtgctgggattacaggcgtgagccactgcccccagctgaagaagtcaatcttacacgaaactccgaaaggacttactggggtcacttcctaaatctgaacaacttaggttatgggcacgccacgtgtggtcctttcccagctgtcagtgttctcccggctgaaatagactttagcatttttggatgcagcacaacttcctagcctggaaaagccatattctcaacaattattgtgtaaatttaagaggtacagttgtaataataacccttgtccctatgcctcctacctttgcacagccatttctttggcctagaatgtccttctctgccttgactccagagcatgcttcttcctgagacttatatcttactgcagctgagctgaccctatcttcttacagtccccttcaatttgagagttttttttttttttttttttttttttttctgagatggaattttgcttgtcgcccaggctggagtgcaatggaccatcttggctcagtgcaacctccgcctcctgggttcaagcaattctcctacctaagcctcctgagtagctgggactacaggcatgtgccactatgcctggctaatttttttgtatttttagtagagacagggtttcaaccatgttggccaggctggtctcaa

SEQ ID NO: 1241608 - DNA, 4001 bp, Homo sapiens
ttcccaacatttgtgagacctggtaaccagggacacctcagatctcagcaccagggaaccctgcccctcttcagggaggctgccacagaaagcattggaaaagcttctgttaagctctgtccttcaggggctgctcaggtcacgagcacttccttccctgaccagggccccagagccccctcaacccctggagggcttccccaaatacctgggttctccggttcgtgagcactgtctccctggagaccaccaaaagtgcctgctagggtgctcttgcccacgccgctctcccccactagcatgaccttgaagatgccatccttttgagcaggggctgcctcccctgagcccaaggagtcagacgagccagaggatgaggcctgaggtggccagtcaagttcatctacagcctgggcccgccggagctggtgcttgtaggggacaggcatactgcctcttcgtctgggggccccaggggcagagggtaacccgctccggtccaactctgccaacagtttctctgacttctttagtagcgtggcatctgcttctaaaataaaatgggagggcaaagaaaaggaagctatgagtgggatatgctcaaccatatgcagaaggctcaatccaggctgttccagtatcagaggcccagctacacccacttgatgaccattacccagaaggaactgagaatgtctggcctgacctcttacactaaagtctccagaagcctgaactggagttgacatgatagcttctccaatgcggtcccaaccccaacctattcaaaacgtgccccatgcagggaagggacctgaatgcaggctcacatacccactcacactttacactgatacacaggcaaacccccagactaggcctctggccctgtacggtggagttgggggaggtttggggaagctgcctctttttccatcaagaggcccttcctcctcctgtttccagcactggtaatccccaaactgaggagcagagaggatgacaagctgaaactgctgcccagtgtctggggagtaggtatagcagagtaaaaaactttgtagtgagcttcttcctaggaaagggcctttgctttttgagatgatgtgcgtgctgggtctctgtgggttctctgtgtgtgtgtgtgagagagagagaggggctgctgcttcccgtggccctgtaggtgagcatccctcattgcgtggttggatgtgagaatcctgcatccctgtctgtccctgtgagtgggagagaatattgtgttcatagagcagtagaagtagagagagagagatagtgtgtgtgtgtgtgtgtgtgtgtgagcgaaagggagagtgacaatgcgtgggtcagggtaactggaggaggaacaacagacacaacaaagggggctagagggaggctggaaatagcccaggatcaatacttggccagcagccagggcctccagcagccagaagaacccttacaatagttccccggggtagcccctgcctgtgattcccaggcttgtgggctgcccctttcctctccccttccttcttgcctgttccagcctcgggaatgaggctgagctaggggccatgtaccagtttctcaagcaaagccctgggagtgctgggggagggggcatttaggcagctcttcccctccaccctagcccagccccaatcccttgtgtgagcaggggtcttctccactttctcaattgctcttctcctcttgctgactgagctcaagctccctcaacccctagttctgacctccccaccaaagcttcagctcccacccccatggtttcagccggaacctgcccaggttagccctcacctggtgtgggcgtccctggaggggaggcccggcggctgccagaggggcagagtgctgtggtttctgtgtccatgtccatgtctgtgtccaggtccgtgtgcatcagtgtgcgtgtgcgtgtgcgtgtgcgtgtgcagcccagcagctcgcagcaccctctccctcactcagcagcactgtcagcttttccctttaaataccacccccccccccgacacacacacatgccctcccccctagacacctggggaaattgtcccaccccctgatgaggtcacacatgctaatgagcagtgatgtcagcgggattccctcctttctgccccccctcccttttctttgtgtcgcttctctctgggagcacacacactgcagagcttggttgagttatgacagaacagtcaaggggcagaacagacaagggttgcagggggtgtcagtgggtaagggagctcagggtgacagaaggcagggacctggggaggtgaaggtctttctccagcagccaggactacgcatcatttgtctttgtatttccagacccctagcccagtgtctagcccagagagcgtgctcagtggctgcacaggggcaagaggcagaaagattaaaagctggtctgaaagacaaagagatgcaggccaaaagaggtgtggggactgagggtcagccaccctgccaccttttccttctccaccctgcctcttctgggctaagagccacgaaagtactcatttcccagcccctaggcagatgcgggctctgaggaaggaaattcagctgcttcatttgggcagcttcattttgccactaagttcaggtaggggcaaaccactgtggagactcttccaccttctctccctgccaggcccaccaagctaacgataatcagagcaggaaaaaagggtgagacaaagctagctatctcaaacacgaggttcccaatcttaagtgggtggggaagggggagtgccagctaccccccaactcccctacccactgttaatgtttttttggtgcagctgccaggccttctgggctatgcaaggcaggtacgcaatgggtgatgtctgcctgtttgtaggaagcccagatagcacatctcttttaccgttctttttctgcccagttccctttcccttcaggttccttctcctgcccctttccttcttgtcctccttcctgacacccttaagctcccagacacacgttccgatttcctttccttgccccgtttttgccagatgctgtgctaagtactttcttgcattatctcctttcatcttcttgagcccaaggcccacagtggtaggtgggtgccccgtccctaaagcaatcttgcagctggaaaatgggaacaccaggaatcccacccacatctttccagtgccaaggatttttcatttctacattgtgcagctttccttctcttaaatattccaactgtctcctattattgggaacagtctatattgctatcctcagtggactcttccaatggaagaggcaaagaataatcttgggaacaatgtgcagtgacacttcacttatttggaggtcagctatagggcaacagtgcagggtttgagggagcagaaaggacccctcagctgctaaaatactcctgtgctttactcactgggtagattctccagtcctcagtcatggcctacttacttttactttttacttacttttattcacaattttaacgtgtccatgtgtgttcctgtactagtagattagaaacacatttagagtagcaagtgaccccttgtagtcagggaggcaacaccacacacacacaaaataacatttaaagcactcatatgcattttataagtggtctaaggtcatttagcataaaagcaaatagctccccgtgcccctactgttacaacttcagaagacactgctggagaaaagccattggtttctgtgaatgatcctcagttatgcagaaaattattatattgcagatatgctgaagacaagtgtaacattttagaatgacttccttccaaaatgagtatttttatttttttcagagggagggtctcaccctattgctcgggctggactgcagtggtgcgatcatggctcactgtaacctcaacctcccgggttgtgcacttgcccgtatccaggctccctcaggaatgggaggt

SEQ ID NO: 1241609 - DNA, 4001 bp, Homo sapiens
agctggaaactgaaaatgaagaggttaaatgcattcctaggttcagagcaataccaattaagacaagctaactgcaaagctaaaggaaaaattaatcccggtattgagatctctgacagcatccttttgaaaaatgtttatgtgacacacagctccttattccatcccctgatatttaacccctggcacgaaacagaatgttcagcaattcctggcaaagtcttaggagttcaggggataaaatgcatgggagaagatgagagacataagaaatggaatgattctactttcacacaaaattatgtccctgtagacaaagagacatccaaaattactggcaaattgtccacagtaacctaaatttatttttctttctcaagaaacgtctacttacttcaaaaacatctatgttgcagatcttattctgcaagtcaaaaataaataaataattaaaatggactcatttaaataaacatttctgccacaaaagcattgtcataatgtttcacttgataagatgaatttattgcttcaaagaaaatctagtcttgttttactgaaactctcagcaatataaattcagtgaatgttaactgaaattccttaaagaaaatcagaagtaaagttaagatctgccagaataaatatataaaaggaaacactggtggcctctctccttcatcacaatacctcccaacagctgacatttatagaacttgcagactctttcaggaaaggatgagttattgggaatagactctctctacatatatatagtttatggtgcatgagatcatatttacaggacaatttagcttaagagtggtacaatatcaaagaacttagaatttatcatctatagcatgcgagatttggcttgcaaaggtttctctctcaagagtctcaccaaatgtccctcagccctctactttccttcacagagtagtcccacccattgaaaaagtgataaattaagaataaagaatatacatcttacagaaagtttcccaccatagtcccagttcccactctatgtaattacctatttgcctatgaaaattgatatgtaagagccgtgttgtcaacacatttaactaaacctaacagtttcctttcagtcttaacactttttgacagaccatacacacacaaacttgtagctcattctctaactccattttgatacttacaagcccagttcttccatctctcaccctccctggaaagaaagtccagtggaagttttacctaaacttgattatttttgcgtttttctttggggttgttaaaggtattgatcagaactcacctcccaagcattgataatcccaagccgacgagaccccaaatatcttcagtttgtaacatagaaatgctactggtctcaatgacagagaaggaaaataacgttcctactccgtcaaattaagaaacaaaaatgaaatacagcagctttcattctgaacaaaactaaattttctgggtcactttccctgtctcactgggccacttctttacgcagcctgctggtgactgtaaacacggtctcttcactcctcacgcaaccagttcatttgtcatcctctccaagcgaatagccaccgcttcctttgctagcgcagttcccaaacaacaaacctccccacccgcccctgccctccacacctcaccgcggagactcgctttcttttcttccaaaccacaaatgggcgagcttgttcagggaaaaagttaatgaacgcctgattagaggcaaagctgccctacctgcgatcacaacatcggaagactggaagtatctaaaagcgccatcctctgcgctctcgtccccgtcggtgtgcgcttcacacccagaaacccaggaacatgatttatatgcagacctgcacccatcccacacaagtccacacgccagcttgcctaaccacttatgtaagctcgtgcttccacagtcccaaactgcagacacacacacacgggcacctgtcacgcatctgaaatggacaagcacccacacccaggagatgaaatcaacacatattaatggggtggggagggaggatactgttttaaaccatgtttttcccccatttgtttcttgcccattttttatcacaactacaattaccttagcaaccaaagaattgccttgactctccctctggctccagaatttttcctaaagccaaccttgcgccaggttcatgataaagctggagaagcccagggaaccggggaccggcagcctcttgggggcggaggggaagtctagtccgtctccgcgccgctccccacagcctcgcctcctctttccgagtttccgtggtggcgagcgcaggggctcagcgagcgaagagcgaagccccgggcccgcgaggacgcgcggcgggtcgcatggtgccgggactcggggcgcacagggtgtccccggcgcgctccgggctggcctggctctccgcgctcccaggcgttcgccgcttgcccgcctctgcccgccccggtcggcaagggtgcgcggaggtctgtccgttccctcggcgcctggcggctccggcggctgtaggaacgcggcgcccaggcggagctctcgccgccgagcagggccgagcgcgaggagctgccccaactcgcgaagccgttcagctccgcggcccgcgagctgctgcagcggcgcccgctgtcggatgccgagcggagctgcagccccgtgccccgcgcacctgggcgccggcacctgggccccggcacctgggcccggaccgcgtgctgcagggaggggccggcgggcggggaccggcacctgagcgcgtcccgcgggcgccgccgcacggctcacctgttcccagagccgcggaaggcgcagaccgtgatttgctcgaggaggagaaaacctagaaatgcctcatcctcaagaagccgccgagaaaaccgagagactggctcgaccgggcggaggctgctttcgtcaattccaaactggcccggtccggaaacttcagcggcgtcaaggttctcttagggattcccggcccggggtgaggtgcccggcggcttctgaatctccctcactgacgtgttgctggcgccctctaaattaaaacgggacaccgcgaccgtcagcgatattgttcctaacctcgtcatttttatgtattcaacatgcacaccacacgctgcatttggaatattacaggatgattcctatctggaacactacaaaagaactttcgagaaaagtaactctcagatattcttgggggaagcagaaaaaagtcgaagacagaaaatgagaaagtaacttgaactgatgcctttctttaacgtgggagttttgaaatgcgatgtgtacttagattcaaaaagctgcaggtggaaataggacaagatcactagtgctggacggtaaccgtgggatttgtgtgcaatatcaatgctatcaatatcaagaataaatttgagatttagtcctgaattgtagtatgtcaccagaaaaggggaaaaatacttgaaataaaatacctaaatgcctttaacgatggatgacctggactcctcattcacatgggtccagaagttaaagagtaaagtctccttcccaaattgtgtcttttcccgccattctacattgattaatggatgtattcattctttccttcaatagacaaatagcacctgctctgtgttagaccctcttctaacattagaaatggataataaaggaagcagtctctgccctgaagccttcacgtcgaatgggataacacacaagcagacatgtgtgttatggtaggcttagtacacagaaaggcggggggtggggggaaacctgcaaccaagagaaaccatacccagcctagtgaggaaaatagaattgtaacagatgtcccagttgtttattaaagctgaaatataaaatctttctttcctcaggctcaatacttggctcaagccggttgtggagctggctgtggccgtttgtcacagttaaagaataggctgta

SEQ ID NO: 1241610 - DNA, 4001 bp, Homo sapiens
aattaagaataaagaatatacatcttacagaaagtttcccaccatagtcccagttcccactctatgtaattacctatttgcctatgaaaattgatatgtaagagccgtgttgtcaacacatttaactaaacctaacagtttcctttcagtcttaacactttttgacagaccatacacacacaaacttgtagctcattctctaactccattttgatacttacaagcccagttcttccatctctcaccctccctggaaagaaagtccagtggaagttttacctaaacttgattatttttgcgtttttctttggggttgttaaaggtattgatcagaactcacctcccaagcattgataatcccaagccgacgagaccccaaatatcttcagtttgtaacatagaaatgctactggtctcaatgacagagaaggaaaataacgttcctactccgtcaaattaagaaacaaaaatgaaatacagcagctttcattctgaacaaaactaaattttctgggtcactttccctgtctcactgggccacttctttacgcagcctgctggtgactgtaaacacggtctcttcactcctcacgcaaccagttcatttgtcatcctctccaagcgaatagccaccgcttcctttgctagcgcagttcccaaacaacaaacctccccacccgcccctgccctccacacctcaccgcggagactcgctttcttttcttccaaaccacaaatgggcgagcttgttcagggaaaaagttaatgaacgcctgattagaggcaaagctgccctacctgcgatcacaacatcggaagactggaagtatctaaaagcgccatcctctgcgctctcgtccccgtcggtgtgcgcttcacacccagaaacccaggaacatgatttatatgcagacctgcacccatcccacacaagtccacacgccagcttgcctaaccacttatgtaagctcgtgcttccacagtcccaaactgcagacacacacacacgggcacctgtcacgcatctgaaatggacaagcacccacacccaggagatgaaatcaacacatattaatggggtggggagggaggatactgttttaaaccatgtttttcccccatttgtttcttgcccattttttatcacaactacaattaccttagcaaccaaagaattgccttgactctccctctggctccagaatttttcctaaagccaaccttgcgccaggttcatgataaagctggagaagcccagggaaccggggaccggcagcctcttgggggcggaggggaagtctagtccgtctccgcgccgctccccacagcctcgcctcctctttccgagtttccgtggtggcgagcgcaggggctcagcgagcgaagagcgaagccccgggcccgcgaggacgcgcggcgggtcgcatggtgccgggactcggggcgcacagggtgtccccggcgcgctccgggctggcctggctctccgcgctcccaggcgttcgccgcttgcccgcctctgcccgccccggtcggcaagggtgcgcggaggtctgtccgttccctcggcgcctggcggctccggcggctgtaggaacgcggcgcccaggcggagctctcgccgccgagcagggccgagcgcgaggagctgccccaactcgcgaagccgttcagctccgcggcccgcgagctgctgcagcggcgcccgctgtcggatgccgagcggagctgcagccccgtgccccgcgcacctgggcgccggcacctgggccccggcacctgggcccggaccgcgtgctgcagggaggggccggcgggcggggaccggcacctgagcgcgtcccgcgggcgccgccgcacggctcacctgttcccagagccgcggaaggcgcagaccgtgatttgctcgaggaggagaaaacctagaaatgcctcatcctcaagaagccgccgagaaaaccgagagactggctcgaccgggcggaggctgctttcgtcaattccaaactggcccggtccggaaacttcagcggcgtcaaggttctcttagggattcccggcccggggtgaggtgcccggcggcttctgaatctccctcactgacgtgttgctggcgccctctaaattaaaacgggacaccgcgaccgtcagcgatattgttcctaacctcgtcatttttatgtattcaacatgcacaccacacgctgcatttggaatattacaggatgattcctatctggaacactacaaaagaactttcgagaaaagtaactctcagatattcttgggggaagcagaaaaaagtcgaagacagaaaatgagaaagtaacttgaactgatgcctttctttaacgtgggagttttgaaatgcgatgtgtacttagattcaaaaagctgcaggtggaaataggacaagatcactagtgctggacggtaaccgtgggatttgtgtgcaatatcaatgctatcaatatcaagaataaatttgagatttagtcctgaattgtagtatgtcaccagaaaaggggaaaaatacttgaaataaaatacctaaatgcctttaacgatggatgacctggactcctcattcacatgggtccagaagttaaagagtaaagtctccttcccaaattgtgtcttttcccgccattctacattgattaatggatgtattcattctttccttcaatagacaaatagcacctgctctgtgttagaccctcttctaacattagaaatggataataaaggaagcagtctctgccctgaagccttcacgtcgaatgggataacacacaagcagacatgtgtgttatggtaggcttagtacacagaaaggcggggggtggggggaaacctgcaaccaagagaaaccatacccagcctagtgaggaaaatagaattgtaacagatgtcccagttgtttattaaagctgaaatataaaatctttctttcctcaggctcaatacttggctcaagccggttgtggagctggctgtggccgtttgtcacagttaaagaataggctgtacatggagcgaaaggtagcaactagggaaacttccgctttgaggagctctgcttttttttttttttttttttttttttttttttttttttttgagacgtagtttccttcttgttgcccaggctggagtgtggtggtgcaatcttcgctcactgcaacctccgcctcccaggttcaagcgattctcctgcctcagcctcccaagtagctgggattacaggtgcctgccagctaattttttgtgtgttttcagtagagatggggtttcaccatgttggccaagctggtctcaaattcctgacctcagatgatccacccgccttggccacccaaagtgctgggattacagacttgagccaccacacccagtgggaactctgcatttctgaggctagcagctccttgagggccaagtacagcatgaaggaataatactgtggaagtataaacagcaggctccaggctcatcagaagaaagccttactgtgtacttctctttaaaaaaaaatatgtgaaatcagatatttataggaattagatatgtattttcatattgatacattttgtgtattatatgggattcctgatatatctatgtagtatggtttcttatacataaaatatctgatttcatatgtatgtgtatgtatgtggggggtattttatatatatatgtatgtaatagagacaggacacattttttgctgacatggccaagagattggtttatgtgctagggaattgagcaaagaagtaaatacattaagaaaattggagccagtcatctcactgctggagaagggaattaccaatacagaaaggcaagagatctagctatgtgccttgaagttggagatgaaggtgtaaaatgattttggatccaaagagattatagatagatagacagaaaaatataagtgtatatgtgtgtgtatatggtgatatatttcctaggtttgtcgactgagaagg

SEQ ID NO: 1241611 - DNA, 4001 bp, Homo sapiens
atctgccagaataaatatataaaaggaaacactggtggcctctctccttcatcacaatacctcccaacagctgacatttatagaacttgcagactctttcaggaaaggatgagttattgggaatagactctctctacatatatatagtttatggtgcatgagatcatatttacaggacaatttagcttaagagtggtacaatatcaaagaacttagaatttatcatctatagcatgcgagatttggcttgcaaaggtttctctctcaagagtctcaccaaatgtccctcagccctctactttccttcacagagtagtcccacccattgaaaaagtgataaattaagaataaagaatatacatcttacagaaagtttcccaccatagtcccagttcccactctatgtaattacctatttgcctatgaaaattgatatgtaagagccgtgttgtcaacacatttaactaaacctaacagtttcctttcagtcttaacactttttgacagaccatacacacacaaacttgtagctcattctctaactccattttgatacttacaagcccagttcttccatctctcaccctccctggaaagaaagtccagtggaagttttacctaaacttgattatttttgcgtttttctttggggttgttaaaggtattgatcagaactcacctcccaagcattgataatcccaagccgacgagaccccaaatatcttcagtttgtaacatagaaatgctactggtctcaatgacagagaaggaaaataacgttcctactccgtcaaattaagaaacaaaaatgaaatacagcagctttcattctgaacaaaactaaattttctgggtcactttccctgtctcactgggccacttctttacgcagcctgctggtgactgtaaacacggtctcttcactcctcacgcaaccagttcatttgtcatcctctccaagcgaatagccaccgcttcctttgctagcgcagttcccaaacaacaaacctccccacccgcccctgccctccacacctcaccgcggagactcgctttcttttcttccaaaccacaaatgggcgagcttgttcagggaaaaagttaatgaacgcctgattagaggcaaagctgccctacctgcgatcacaacatcggaagactggaagtatctaaaagcgccatcctctgcgctctcgtccccgtcggtgtgcgcttcacacccagaaacccaggaacatgatttatatgcagacctgcacccatcccacacaagtccacacgccagcttgcctaaccacttatgtaagctcgtgcttccacagtcccaaactgcagacacacacacacgggcacctgtcacgcatctgaaatggacaagcacccacacccaggagatgaaatcaacacatattaatggggtggggagggaggatactgttttaaaccatgtttttcccccatttgtttcttgcccattttttatcacaactacaattaccttagcaaccaaagaattgccttgactctccctctggctccagaatttttcctaaagccaaccttgcgccaggttcatgataaagctggagaagcccagggaaccggggaccggcagcctcttgggggcggaggggaagtctagtccgtctccgcgccgctccccacagcctcgcctcctctttccgagtttccgtggtggcgagcgcaggggctcagcgagcgaagagcgaagccccgggcccgcgaggacgcgcggcgggtcgcatggtgccgggactcggggcgcacagggtgtccccggcgcgctccgggctggcctggctctccgcgctcccaggcgttcgccgcttgcccgcctctgcccgccccggtcggcaagggtgcgcggaggtctgtccgttccctcggcgcctggcggctccggcggctgtaggaacgcggcgcccaggcggagctctcgccgccgagcagggccgagcgcgaggagctgccccaactcgcgaagccgttcagctccgcggcccgcgagctgctgcagcggcgcccgctgtcggatgccgagcggagctgcagccccgtgccccgcgcacctgggcgccggcacctgggccccggcacctgggcccggaccgcgtgctgcagggaggggccggcgggcggggaccggcacctgagcgcgtcccgcgggcgccgccgcacggctcacctgttcccagagccgcggaaggcgcagaccgtgatttgctcgaggaggagaaaacctagaaatgcctcatcctcaagaagccgccgagaaaaccgagagactggctcgaccgggcggaggctgctttcgtcaattccaaactggcccggtccggaaacttcagcggcgtcaaggttctcttagggattcccggcccggggtgaggtgcccggcggcttctgaatctccctcactgacgtgttgctggcgccctctaaattaaaacgggacaccgcgaccgtcagcgatattgttcctaacctcgtcatttttatgtattcaacatgcacaccacacgctgcatttggaatattacaggatgattcctatctggaacactacaaaagaactttcgagaaaagtaactctcagatattcttgggggaagcagaaaaaagtcgaagacagaaaatgagaaagtaacttgaactgatgcctttctttaacgtgggagttttgaaatgcgatgtgtacttagattcaaaaagctgcaggtggaaataggacaagatcactagtgctggacggtaaccgtgggatttgtgtgcaatatcaatgctatcaatatcaagaataaatttgagatttagtcctgaattgtagtatgtcaccagaaaaggggaaaaatacttgaaataaaatacctaaatgcctttaacgatggatgacctggactcctcattcacatgggtccagaagttaaagagtaaagtctccttcccaaattgtgtcttttcccgccattctacattgattaatggatgtattcattctttccttcaatagacaaatagcacctgctctgtgttagaccctcttctaacattagaaatggataataaaggaagcagtctctgccctgaagccttcacgtcgaatgggataacacacaagcagacatgtgtgttatggtaggcttagtacacagaaaggcggggggtggggggaaacctgcaaccaagagaaaccatacccagcctagtgaggaaaatagaattgtaacagatgtcccagttgtttattaaagctgaaatataaaatctttctttcctcaggctcaatacttggctcaagccggttgtggagctggctgtggccgtttgtcacagttaaagaataggctgtacatggagcgaaaggtagcaactagggaaacttccgctttgaggagctctgcttttttttttttttttttttttttttttttttttttttttgagacgtagtttccttcttgttgcccaggctggagtgtggtggtgcaatcttcgctcactgcaacctccgcctcccaggttcaagcgattctcctgcctcagcctcccaagtagctgggattacaggtgcctgccagctaattttttgtgtgttttcagtagagatggggtttcaccatgttggccaagctggtctcaaattcctgacctcagatgatccacccgccttggccacccaaagtgctgggattacagacttgagccaccacacccagtgggaactctgcatttctgaggctagcagctccttgagggccaagtacagcatgaaggaataatactgtggaagtataaacagcaggctccaggctcatcagaagaaagccttactgtgtacttctctttaaaaaaaaatatgtgaaatcagatatttataggaattagatatgtattttcatattgatacattttgtgtattatatgggattcctgatatatctatgtagtatggtttcttatacataaaatatctgatttca

SEQ ID NO: 1241612 - DNA, 4001 bp, Homo sapiens
cctgttcttctctttattctgttctcattaaaatgttcttctctgggcatagtcattatattttcagaaaggcttaagtgagccagcattaaaatttgctcttaatttctacaaatatagaaaaacctgctgggaaatggatactgtattcactgtggttctctccctgtctgctgtgtaacattttcatacatcatgtaagtgtagggggaagcagtgacttaggtgatggcttagttctggaaaagaagctactttctatagaaggaggatttcaaatggccacattgccaagcagacactcatgctggtttcctgtgggccatttcccctttgttgaacctgacccaaagccaaaatgaaggaggagaaattttccattcacaaggtctcagatctctgataaagatcactatgataaaaaagttataaaatgtaggctaccataagcttgaagaatttcattaacttgcttttgataaacttaataaaatttgttttggaaattaacagaaaaagaaagaatcaaaatggaagaatttagataatgctatcacccagacaagtacacctacaaactttagaacactcgcaaaacaaaaggtcccctgtaagttgtgactacaatgtcttaactgccatgctttaaaatattttatgtgcattttgtcctctcaggacatactttaaagtgattcagattttatttgtatttttccttttaaaaacatgttaattaaatatttttcttttaagatacagattgcctaatagatatttaaaaccttttaaaaactctcccccaatctacaacctcaggaaaacaaaactatagtattatagcaccaattgttatagaaaaaatgagtgttttattaatcttagcattttcatttataaatggcatgaggtgaatacgcaaagagcggcaagaacaatcctttcaccatttgtgtgtctagtggtgattctttttttttggcagaaaagaattgtgatgcaattccactgcatttaaaaatgttcacagtaaaactttaatgaatgttgaggcaaatgttgagtaaaagctctggcccccaaatctagagggcacgtcagagtattttcctggcgttgccattcgttttacgggggaaaagtgttaccatacacattgatgcacaaattgttctaccaacagtcaagtcctgggttgtatgctacgctaagctccctggttactgccaggcccgcacccaatactgacattagaaatgagccaggcccctctgaacttagggtctcgccccctgcatcgtttgtctggatgcagagagtttcccactttttcttacctgcatagtggtcaaacacagtgggcacgtattcctctgggaaggcgtcgttggcgtagctcatcagcaggcaggttttccccacggcaccgtcccccaccaccacacacttcaacatcttcttctcgtcgttgcccctgcagccgcagctgctgtcagttccctctttgcagttcattcttgcggctccagctgctggggactcctgctgctattgcttctcctgctttttccaaagcacatgaagcggcagaaagccagtgccaggcttgagtttactctgtctgactttgggtaccttggatcatacagacatgtccgaggctgggatatgtcctgttgcttaccatgctggtaaagaaaggtaacacacacttgagggagttatgaaaagggtctgcccctttccgctctcagtgtgagttaagaaaccctcattttcacagaattcgaggggcttcctaacagcctagaaatttcagcagcctgagggttttactctgctctccctgtctctagcctggcaaaagatacggtggaattttgctaaatctttctcattttccaagtcacatctaacatggaggaaagctgggctttttaatggagtttttttccctttgcttcctccagcttgccgagtgtcaggaaatcatgggtttcctgctgaattccatattaggatcagtgggctgaggaaggctgcaacaatgggagctctgtgtgtgtgtgtttgtacttctggggaacgatgccaggacatggagtgggaaaacactaggggtcccactgcagactcaagctgtcagacttcctgtttcatccgctgcttgcgagcctgttcgcttgtggctggctgggaagaagctgactagaggatggaaagcggggattactgcctgccacagaagcagggggaatggttagagcgagcagagagaaccacaccggcagtcctgggataacatatgacatcactcttcactgagtcactagttaaaagctctgcaaactaaaaacgagcagttctttacttaaatgagaaactttaagcgattcttcccagaaataaagaagaaaaccttccagagtcacatcatttcaaagagaaaaagttttgtaagttgtaggtataatatgtatgatcaggtttataaactgccacatgtctggaatatgtattccagacacaaactttttttatgatggtagcacataagaaatcaatcacatgtgggatgtttgcattctcttattagtagataaacacacatgtgcttggctcatacttaacacccttggacaggagagggtataggatggctttttggtttgtttaaggccctcgatgctgtttttacttggatgttttgctttttgatttagtcttctccccttgggtcagacgggtcctcttcaattacaaaggagccatgggcagctaatttatttgtctgtttggtcactcaaaatgaagtccctttgaagctctgtatttgattaatgtgcttggtcttagaaaagaagtggaactctgcaaatgatttttgacaaatgggtcaaaatgacggaactctgtttttttcactttcattttttgaacattgattttgaagagttcagattatccaaatgtttgagaattttttttttttgatgaggggtgagatgggagaaaagtctgtaatagatatacccacatatcatctatatgctgccatataataggtatagtctctagtttcttctgttttggattatagtaacatttatcacagtgcttagtgtccaagcctttctttcctataaagggatggtgtttcagtcaagttatggtgtatcagtcaggttctgttgcagtaagaaacaatccctgaagctaaatgagtatatttattgctcacattgtatctctattgtatattgttatcatctttattcagggatctaggccgatagagcagtcatattgagaatattgatgatcatcatggtagaggaagaaatgaatatgacgaagaggtactacccccgtgccaaattgaatatttatggagaaaaaattttgagacatcctattgactcttaaggcttcctcctggaagtgacacttgtgcttatatttgttggtcaaagcaaatgacatgctgggttcaacaggggggtcagaagtataatcctaccatgtatcagaaaggagaggaccaaatattggtgaacagcctgtgtggcaaccacagatcatttagctgaggttttatttgcaatatggaagttgaattgtttatgtttagtgccattctgaagcatttgaagacacctatgacttcatgtgatttatataattttattctcatttagcctaccttgaacacctagaatatgtgataacaaaattactatgtgaaaacttatattttgcttctagaaaagaggcttgagtatgaaggtggcagccaaacaaatctgtgcagataaaagagtgattggcagtgacaagacttcatcctgaagatgagcacaatcacgctgagcctaatgagcacagtgatgatatgtatttggcagaatgttgagaaggttcttcctttgactttgtccctgagattgggcagtgaatgtggcatggtactccattcatggagttataaaacatgcccgtct

SEQ ID NO: 1241613 - DNA, 4001 bp, Homo sapiens
ggatgtttcccctaagctgcctgggggcagctacttagctatgaactcagccaatccacgaaacaattctatgtggtgtgtgttgctagcacccccagtttacaggtgaggcaggggccgggtcatttgtctaaggttacacatttggcaaatggagggatcatacccaacaaatgataataatggtgataattatgattaagggtttaccatatagtctaatgtattcaactctgtgtatttagtcctcaaaacaactctaaggggtagttactattatttatcattttattgataagtgaactgagatacagagagtttaaataaccgacccagtaatgaacaaaaaaagacaagaggaagtggatcacactaggtcatctctggggaaaatgagaagccggtgaggccagcgccctggcccctcacctccccttcctccctgagaaactcctctccggcttcaccctgccatcttgggtgtggcagatacttgcaagtgggtgtgagggttggggggctcttccccaacggattcccagttcttcccaccggatggtatttgtctttgcagaggtcgctttcgagagaaagaaaccagcatccagaatttccgggctggcaggatggagggagaagaagggaagggagacgttcagatctagatgagcttaaggccccctcccagtccctcccagctgagtgagagccagtcacctccagctgtcccccagttcaggactgcacaagatgggcccaactctcctgtttcacagagcagagaactgagggcctgggagatgaggtcccactgccaagccagggagcggcagggtgtccatcagagaagtaggcccgggacttttaaaccaaaaagctgggaatggcctccccagacgcgctcctgggtacccagaaataggctttccccgggaatccgcctccgaccgggcgtctctacaacacctgaagcttctcaggacgccctctgagctgggcaaggcgagaggactttctcccagagcccagccccgagcaatgcccgagctcgcgaggtggggctgggggcgacaaggaggcggagcggggacttagccaccggggactcctctccaagtcagttcccaaaccattcggcgtcatgcatccacagcccgcgcgcagcccgtgcgccctggaccctacccaagcactaggctcgaccagggccggtccgaaggtcaccgtctacggccagggcagaggggcggcgggaaaagggcccagtggaccctcggtccaggagggccggtcagctgttgggccgcgggcacccaaagttgcgggggtccgggtctccgaccccacgcccagcggggctctagtacccgagggcgcgcgctgcgactcgcagagcagcgggtgcagcaggctggcggggctgggaccgcgagttttgtttgcaaagttcaggcggggcagacgccagggagggggccgcgtccacgcgggcagccccggcgctgacaggtagcgacgcactccctcgtaatccgtccaccagcagcctaaagtgtgcactgggttcccagtgaaatgcctggccttgaaagtttagccaacatcgggtccagcggagtcaccagggccgccccctgccccgcagaaccaggttctggcctcggccacggtgggggtcccgtatcagcccgacaaccccgaggtcacgcgcccgaaggactctctgggacaagaagtggagtggggcggccaggacgcgggccgtggggatcgcgagggaggagggggcggccgcccggacttaccccgtggggtccccgcgcgcgggcgccccggcgtgtcggatcatgccgccggcagctccgggacggggaacggaggcgctcaggcgccgggccgcgcggaacgcggagtcccgggcgcccgcatgtccctggctctggccctctggaagggccaggccgccgctgccgccgcgctctggggctctcgctcccttctacttcctgtatcggagcgagcggggctttcaggaagaggctggccttggtggtcaagggtttttttgtcaaaagccattcggcagcggctcgcggcccggagccccctggggcacacggaggcccgggcggccgcgcccccggggccgggcctcggggcggggggtgctggggccaaggcgccgcacgggcgcccaacctcggggtgccgcctccacaggctgtggctggggctggggcgcgggaggcccgcggggcttcggagagggaaacttagagaaaagtcttccacttggcttggggccgcaggggaaggaagacgccctccgcctgtgccggcgccgaccgcgggccggcaggtggggaggcccagagctggcggggagttcgtcccactcggagccacagccttgcccgagggagcctcgaaatcgttcaagggcaacctcagaccagagccagggcgcctcctccacattcctgacagatgtgcacgccgcctcctcttggatgcttcccgtgacaaggagctcactcctcaacaaggcggactgctcgtccatcaagcctggcatctaattcacctgtgccgggtaccgcagatggagaacgccagacagctgacacaaatgcaagacccacagcaaccccaggtgggaccgtgaggcctcttctaagtgcctgggtgttcaaaaatgcctcccgagcccagtgttttcccagagcatttcccagagtgactgagcaggactggaccctattaggtcacctcagtctcatgcaggatttctttacctggccgctactgccatttggggccggctaatgctttgttattggggctaatgctttgttattggggccagctaatgctttgttattaaacctccttcaaaactgcaggaggtttaacggtatccatggcctctccatgattcataaaatacccatagcatcagcctctctctgtaacgaccagaaatgtctctagatatcacaagtgtcctccgggggcaaaatcgtcgaggtctaataccatcattttagagataaggaaactgaggcctagagagtggaggtgacttgctcaaggccatatggcaagtgaggaccagacaggactgagcccagggctctggtgaaaggatccccaggcctctctgccctgctgctctctcctcacaccctcctcctccatcttccctggatttccaccaaatcagcctgccttctagaagttagaaagaaaagaattcacatctgagcatacacgaaaagtccagccttccccctgggatgtaaaatggtgcagccactttggaaaagagtctagcagttcctcaaaaagttaaacgtcaagttaagcatatggcccagtaattgcattcctagttatgtagccaagaaaaatgaaaacatgttcatgcaaaaacttatacatgagtgttcatgtataagtttataatagtatatactatatatatagtatataatactactataaagagtagtattgttcatactagccaaaaggtggaaacaatctaatgtcatcagttgacaaatggataaacacaatgtgatacatccatacagtggaatattattaggccatgaaaaggaatgaagtactggcacatgctacaccatgcataaacctcaaaagcattatgctcagtgaaagaagctagtcacgaaggaccacattccatttatatgaagtgtccagtataggcaagtccagagagacagaaaatactctagtgattgtcagaatcctggggaagagaagaaaatgaggaatgactgctaagagttatggggtgatgaaaatgttctaaaattcattgtagtgatggttgcacaactctggctacagtaaaaaccattgaattgtatgctgtaagtgggtgaattgtacagtatacaaattatacctcaataaagctgttatttttttttaagggggggaaaaagtacagcctccaggaggccaccctg

SEQ ID NO: 1241614 - DNA, 4001 bp, Homo sapiens
ggcactggagtaggggaggagggtgagaagagaaggcattcagggtaaaagggaattatctgcttcatcatggaaagaggcagggagtgtaatgtgggggcacgaggagggaggagggcagtctaagtaggtgagcgggaaggggaagccttggggctttcaagagaagggcacctggggttaaggatcccagaatcctcctagagtcttacactcaacttctcttccagcaagcactgcccacattaggatcccgaagctgcaggagacacaaagctgaggatcggtccaatcactggcaagactcctttcctatacatcatcccctgggagggcccagagaagtgtaggaatcctggctgtgtgtttgggccgggatccttacctgtagacgtcactggctgtggaggccttccggtttacgttaacaaacagttctggggccaagtagcccagggtgccccctggctccccggaccctgtccctgactgtgagcctccctgaaatgtggacaggccaaaatctgccagctgcaaaggaaggaaagaagtgggaggtagggaagacaagggggccagagagcctccaggaacccccctgcccccagaaggtgcaggttcagctttgtaaagggagtgtggaggtcaagggaagaggttcccttggatggtagatctaggtgccttgtggtagggctaggtcaaggtctgagtctccagggctgggtcagccatgactctttggaggggctggtggggcagctggtggaaatgactcgtgtggctcagggcctctatcacctggtaggcaggagctaaaactcctggctgggctttgtcccctggcagccctgtgtccagagagagaggctacgcctattcaatagacagggctctggaggtctagtgtccggcgggcctggctggagcagctctggggccttgtcttgaggctgagaggggtgtagaccagctgaccttgacgtgcagctctgggtccagcaggacgttggatggcttgaggtcccggtgcaggagcaccgggttctggtcgtgcaggtaaaacatcccaagcaccacttctttcagcaggcggcaaaggagcggccagggccgagggcactgggactgcagcagccccgacaaggagccgttctccatgaatttagtcaccagagccggcttgggatcttggtcccagttcaccttctcgataaccccttctaggcgcagcacgaattcgttatccagacttgccatggccttgacctccctggatatcgccttcctacactccaggagagagctggagtcgcaccggggtcgtgggaaaatccctcccttcgccattcaggccccagagcacagtggctccacctttttggccagattgcggctggggtcaaccggggtcactcacgagtttacgatcttgaccgccacatcgtagccccacttcctatgttgcgcccggaacactgtgccgaacccgcctttgccgacgagctcctggttctccagttcctcgatggacaccaagggggcgggggcaccgctgggcctgagagaggggtgtcgcccactagccggccgtgccgtgcctcagcgctgctccccgcgcccctgtgactcggcgttctcactgcaatccccagcctccctcgccggcccccaccgtccccggactcaaagacgttctctgagcgagtctgtggggctctctgggtgtgaatgtcggaggctgcgatcgacatgccactccctactcaccataacttgacgcacgacatcaggctggaaggtgccagggggcctctggaaattgcgagccgtaggagatggagtgacttctggggcttggtcctttcgcagagaggggaaggggtctgtctgtgcaggggtcagtctctagaccaagacggtgagtctactttccgggttgttaccctttttccgagttgactgaacaacttcccttataggcgcctctacagtcccgcccctggggtggggcagggggcagagcgaaagctagtgcctttctccttgactagcgtttcctgagcacctgccgcagccagattaggtgttgctgggcattgaggatgttagggaaggagtcctcaccttccaggaacccacaatcaacccactcctacagtcaaagccttcccttttcccacaggatttcctgctccacgacctgccaggccatgagtggagatggtgcttaggagggttttatggttctagggctcagctctctcacagctgccctaagatcatagccaacacgtatataaaacttatcatgcaccaggtatatatattagcttatttaattctcacacgaaccctaaggggataggtactgcttttattacctttctataggtgaggaaactgagacactgagagtttaagtaccttgcctaagcccatatggaaataatggctctgaaccatcaagttatcctgttttcacataggcttcagggctgtaccactcagctggtcgtgcaggtggctgggaaaggtgtgaagcatccaacaatgtagtgaaggatccctatctgtattcctgcccagtccctatagctgctcttgcgaggcaagtctttggcattgatagggacttatatgccctttgaacaggagctcctggaggtggcaggccccaagcccactcccagggcattgtggtaaggctagatttatcagcccatccagagggttggtgacattgtggtgtacactacagtggaaacacctcagagctttcctgccctctcccttgcatgacaactcttgcatgcaaataccctaattaatgttcctgacaagcacatgctctggacacagtcttttgataacccagaagcatggagagtcttaaagatttagggcagaaaaaaggtgtccatattttacctttctgaggtctgaccatgactggaggttgtgggaacccgatagggcctgccctaggcactcaatccttcacagggatactcaatcctgtgggttgtgcgttggctctcactaaaggtgctcaccttggtacttgctttccattttgttcagtggtccatgggctctgctggttgaggcagaagtgatctgtagttttttctaaaacaactcttggagagccacaccatggcttctagcagggtcagttcatgctattttggaactatttagggaattgttcaaccgtagtctccttaaaagccaatacatggcagatacccaataaatatttgttgaattgaatgaataaatgaacaacccaaaatatcgagcctttcttaaggcactgatcatcctagatggagctccatactcagtaggaggaaagaggtgattgggttcctgtagggactgagggctctcacctgcacagttcatgaaatccatctgaagtaggctttagtatagagatatggtggtatcacacagaatccaagaaggcaagaagtgtagcaggtcctcagaaaagcctagagtcagaagctgagagccatcaaaaggggcagccactccctttgtgattctttttagagagaataacccaggctcagtatctccacttgaagggaacaggcagaaaggatttggaaaggtgttataactgggtttcttcagattgtgacgagaccctgagaatgagggataaaccactgtgaagcacaaagttgggtgtggtatcagggcctatactactttttgactcaaaataaacagcctctttaaaagaaggaagagcagggagaagaaccttagactaagtgcctaacaggaccctcagcttccagcaagggggtatgggggtggacctaggcagaggctgattcttggaattctgagctctggtcttttctgaggactgatgcctctgaccacagatgtcccatgcttttggagcctacttgggtatttctttttttaaattaaatgaaatttttttttgagatggagtcttgctctgttgcccaggc

SEQ ID NO: 1241615 - DNA, 4001 bp, Homo sapiens
acttctggctctaaaatgtaaggttctggctttccaactaagaggtgcccatttttctgatttagtaatagctcactcaaaaaaaaaaaaggaaaatggaaatttaggatcataatttcattgagtcctcttccccaccctgaggctaagcaggatcttcctgaggtcacacttgccttccttctgtgccagagaatgattgtatttgagcttcacccctctgtcagttcaccctgcatggcagtgtcccaggctgtagctcccttttgtctaaaacagcccacacttaacagttttatgtttggcatcagggaatctacaaggaaaggaattttctcaagccactaaaatccaagtcagaagggaaggcatttaattactccattcaccgttctccaaagtgaatcagatttacagttcttaccccttgctggaaggcaatgccagaaacagtacctagacagaaccgcttcagaaatcaggtgtttgcaactgcgttttattgaaagaaagagtggaggggttaacatggggcccacctcacaacccactcttcacccccaaaatcacgcagggatgggactcaggaaagggaagcatgtgtgtgttgaataggagccctaactgtagttacttctttcacagcagggaaggaagagggaagaggcagctgtggagaggatgaggttgagggaggtggggtatctcgctgctctgaccttaggtagagtcctccacagaagcatcaaagtggactggcacatatgggctcccttcacaggccacaatgatgtgtctctccttcgggctggtccggtatgcacagttggggtacctggagccgtttgtcaggcggcagtctgtgatgtgcatgctggagttgctcttgtagcagttgccctgcccgttcttgcaggtgaccttttcctggaaacagacattctggacatctaccaggggctcgtgcacaaaggtgttcactggtttgcaccgcccctgtgtcatattccggcgcctcatcatttggttacagtaggtggagctgctgctgggggaactgtctgagtccatatgctgccgctggaatttcttggcccgggattccttgcccagggaaggctggacccagcccagcaccagcagtatcaggacaagcagaaggagccggacaagagacttctccagagccatggtggcctcactttcccagaaaagcctaattgagaaaaggagagagaaggaaaagagccctcttagaaaaagaactccagctcccacctatggcttgcctggtttacactttctgtttcaggtcagccagaaagacgtccatcctacttcctgaggtttttcgtgtaatgagacactcacgtgtacccttttccacgagcgttttattcccactctccaaagcgaggtcttcctcccctctaggtggtgacctacaaagtgacctaaaatcctgtcagttcctatctttgaatactggagtttctttgatccaaaatacatttgtacccagtgctcaaatggctcatcgaaacatcagtttgaataaatcatgaaccaaattgtatccccgacatccagggccatgggtgacagagccttgttgtcttggagcataagggaactcaggccagtgcctgacactggcatcataaaagattccattgtattccagagagaaacgctggcctcccccaatttggaggctccttcttctccagtcccatggatgctctgcagcctgcacgttccaccctgacccctctgcccccagctgatgtttgcctgggccacattttttcagcgctagcatcacccaatctttctcagtgctgtggactggccctagctccctcttctgcaaccctgaagcagaagcggcacctgagaacacctcttgggctgcttacctggatctgcagcttggtgtctgagagagatggaaggccagtttctgcaatcactcagctcccggggtgtggaccttatacagattacaaaggggtttggcttccaagaggaaaagggtgggaggagcatctggagctcagttcaaataaaatcaaggacgtgaggaaggagtggtgaatcacccaggccgccgtctttctagggctgctgaagaaagagcaaatctttgcctacgttagtctttcttcctatgtgaaccacatctgtctgctgatgcacaaggagcagcagagaaagccactacagcactggtgcccaaacctggcacactaggaacaaagtccttgttacttcttcgtgggcgttttcaccaagtagacttggaggttaacaaaggacgcaaaggagaggttctaatgggagatagggaattctggccaaagctattccagggctcctagggagcaaaacccaagtctctttctaggagggcattctcccaacgctacctctcccggggatgggaggcggggtcggggggaatggaggctgtcctgctgcccccagctggaaggcttcccagatctggagaagaaagggggagtaactgaatagggaggaggaggaggcctctagggtgcgctcacccagttctggccacttcccacccaccctccacccctgctctgggggcatcgagaggatggggctgttcttatctacagtaaccactgaccctgtaggtcggaattgagtagaggaactaaagataaacttaaatcccaaatctcaaattctttttggggaaaaaatacaaagaatatcatatttattagcagcagaatgccctcctagaaagagacctgtttttttgctgagtaacaatttggatacctctaagaattatcaaaatatcccttcgtgctgtgtattcagattgtttcagcctttctgtgtaaaaagtggccatagtgaaattatctgacctaccttgtgtgattgtaggtcgtaagatcctcattccagagagggtcctgccccccatacccagaaaaaaaggacgaatgctcagagaggccaagaagaatctagacagggaggccttgctgggtttccccactcagtctattttcattagatcgccctgttgtccagtcatatttctacacagctgttcatactttgttgatatccaagtgtaagaatgcccactttcccctgttatctttgggtcttctgaaggctcccgtgtcgtgtaaaactacgatcaaatcaatttgtatgcgttttttcctatcaatctgtcttttgtcagttgattttcagcaaacctttggagggtgaaaggggaatttttccttggcccctacagtttccttactcccccagcccccacctgtattttatttttctgagtctttaataatacttttattctcttgaatagtcaagttagaatgtgttcattcattcattagactgtgggatacagacataaataaggcacaggactcacctgaagggcgcctggtgggatggtttggttagtcaggtggaccccactaaggcactgggcgtggctgcacaaaagtggcctccacccagcaagatgatttcagaaccacagttcagatgtgaacagatcttctgtaactataataaggctcttcaacagcccctggccctaggaatcctgaaactacaggaagccattttgtctatttatgcatagcaatctagacaagcccttggagctttaattgcacttcaatggggaaccatcagaagcccttactgcagccttatccttgacccagttgcagaggcatagccccgcttgtcttagggcagtagatgccatggcaacatttgttgttgcttctgctgaacttgttctagactccctgcttgacctcctggtttctcacgcagcacaggcattacacctgactgagaactcactgcacacttcaggcagccgattaacctcttataagattctatccctctctccctctcataaattactactcatctctgcaacacactgaattctgccaccctctgtccctaccagaagg

SEQ ID NO: 1241616 - DNA, 4001 bp, Homo sapiens
aatgtgtggcacacacacccttccccctctcgtgccttcgatagaggctgttgttcaaccacaccactgtccagaattttttgctacagcattttgggtaggcacttccttttttttttttttgaaacagagtttcactcttattgcccaggctggagtgaagtggcaccatctcagctcactgcaacctccgcctcccaggttcaagtgattctcctgcctcagcctccctagtagctggattacaggcacctgccaccacgccccactactttttgtatttttagtagagagggggtttcaccatactggtcaggctggtcttgaactcctgacctcaggtgatccacctgcctcaacctcccaaagtgctggaattataggtgtgagccaccacgcccgaccggcacttccaattagagttggtacacaaactgaaatctacttgctatccctcaattccgtgctctccaaagtcacttctggctctaaaatgtaaggttctggctttccaactaagaggtgcccatttttctgatttagtaatagctcactcaaaaaaaaaaaaggaaaatggaaatttaggatcataatttcattgagtcctcttccccaccctgaggctaagcaggatcttcctgaggtcacacttgccttccttctgtgccagagaatgattgtatttgagcttcacccctctgtcagttcaccctgcatggcagtgtcccaggctgtagctcccttttgtctaaaacagcccacacttaacagttttatgtttggcatcagggaatctacaaggaaaggaattttctcaagccactaaaatccaagtcagaagggaaggcatttaattactccattcaccgttctccaaagtgaatcagatttacagttcttaccccttgctggaaggcaatgccagaaacagtacctagacagaaccgcttcagaaatcaggtgtttgcaactgcgttttattgaaagaaagagtggaggggttaacatggggcccacctcacaacccactcttcacccccaaaatcacgcagggatgggactcaggaaagggaagcatgtgtgtgttgaataggagccctaactgtagttacttctttcacagcagggaaggaagagggaagaggcagctgtggagaggatgaggttgagggaggtggggtatctcgctgctctgaccttaggtagagtcctccacagaagcatcaaagtggactggcacatatgggctcccttcacaggccacaatgatgtgtctctccttcgggctggtccggtatgcacagttggggtacctggagccgtttgtcaggcggcagtctgtgatgtgcatgctggagttgctcttgtagcagttgccctgcccgttcttgcaggtgaccttttcctggaaacagacattctggacatctaccaggggctcgtgcacaaaggtgttcactggtttgcaccgcccctgtgtcatattccggcgcctcatcatttggttacagtaggtggagctgctgctgggggaactgtctgagtccatatgctgccgctggaatttcttggcccgggattccttgcccagggaaggctggacccagcccagcaccagcagtatcaggacaagcagaaggagccggacaagagacttctccagagccatggtggcctcactttcccagaaaagcctaattgagaaaaggagagagaaggaaaagagccctcttagaaaaagaactccagctcccacctatggcttgcctggtttacactttctgtttcaggtcagccagaaagacgtccatcctacttcctgaggtttttcgtgtaatgagacactcacgtgtacccttttccacgagcgttttattcccactctccaaagcgaggtcttcctcccctctaggtggtgacctacaaagtgacctaaaatcctgtcagttcctatctttgaatactggagtttctttgatccaaaatacatttgtacccagtgctcaaatggctcatcgaaacatcagtttgaataaatcatgaaccaaattgtatccccgacatccagggccatgggtgacagagccttgttgtcttggagcataagggaactcaggccagtgcctgacactggcatcataaaagattccattgtattccagagagaaacgctggcctcccccaatttggaggctccttcttctccagtcccatggatgctctgcagcctgcacgttccaccctgacccctctgcccccagctgatgtttgcctgggccacattttttcagcgctagcatcacccaatctttctcagtgctgtggactggccctagctccctcttctgcaaccctgaagcagaagcggcacctgagaacacctcttgggctgcttacctggatctgcagcttggtgtctgagagagatggaaggccagtttctgcaatcactcagctcccggggtgtggaccttatacagattacaaaggggtttggcttccaagaggaaaagggtgggaggagcatctggagctcagttcaaataaaatcaaggacgtgaggaaggagtggtgaatcacccaggccgccgtctttctagggctgctgaagaaagagcaaatctttgcctacgttagtctttcttcctatgtgaaccacatctgtctgctgatgcacaaggagcagcagagaaagccactacagcactggtgcccaaacctggcacactaggaacaaagtccttgttacttcttcgtgggcgttttcaccaagtagacttggaggttaacaaaggacgcaaaggagaggttctaatgggagatagggaattctggccaaagctattccagggctcctagggagcaaaacccaagtctctttctaggagggcattctcccaacgctacctctcccggggatgggaggcggggtcggggggaatggaggctgtcctgctgcccccagctggaaggcttcccagatctggagaagaaagggggagtaactgaatagggaggaggaggaggcctctagggtgcgctcacccagttctggccacttcccacccaccctccacccctgctctgggggcatcgagaggatggggctgttcttatctacagtaaccactgaccctgtaggtcggaattgagtagaggaactaaagataaacttaaatcccaaatctcaaattctttttggggaaaaaatacaaagaatatcatatttattagcagcagaatgccctcctagaaagagacctgtttttttgctgagtaacaatttggatacctctaagaattatcaaaatatcccttcgtgctgtgtattcagattgtttcagcctttctgtgtaaaaagtggccatagtgaaattatctgacctaccttgtgtgattgtaggtcgtaagatcctcattccagagagggtcctgccccccatacccagaaaaaaaggacgaatgctcagagaggccaagaagaatctagacagggaggccttgctgggtttccccactcagtctattttcattagatcgccctgttgtccagtcatatttctacacagctgttcatactttgttgatatccaagtgtaagaatgcccactttcccctgttatctttgggtcttctgaaggctcccgtgtcgtgtaaaactacgatcaaatcaatttgtatgcgttttttcctatcaatctgtcttttgtcagttgattttcagcaaacctttggagggtgaaaggggaatttttccttggcccctacagtttccttactcccccagcccccacctgtattttatttttctgagtctttaataatacttttattctcttgaatagtcaagttagaatgtgttcattcattcattagactgtgggatacagacataaataaggcacaggactcacctgaagggcgcctggtgggatggtttggttagtcaggtggaccccactaaggcactgggcgtggctgcacaaaagtggcctccaccc

SEQ ID NO: 1241617 - DNA, 4001 bp, Homo sapiens
tctaggaatgtgaagcagagaaaaactctaggggaaggaaatctcaaaattcagtcacacggtgaatccttacagctatgttctcagattcctcttctccctatgcatgactaactacactatttctcatttgaatttagaggaaataggctgagggcagccacttgcatcttctgtgtatccagccacacagcttctcttctccttgattaagtttgataccttctctgctgaaattattctttcactaactttcttgttctttagagcaataaagcggaaacgatgctaaatgagaaaaagactgtctcccatcccattcatcccacatctactgggcacctcatatgagcactattctgcttctggacataattcaaaaaagatttctcactctctctttctctttctctcttttcctctctctttttctcattctcttgacccacccccctctaactccctgtgccagactctgactataggacgaacatctgcttgcatgactgactataggaccaacatagcataagtgatcagtatcggctgactgaatctctaaaaggatccagataaagagaagagcgggcccaaaaagaaaaagaagaggaaaaggagaacagagaaagtaaggagaaaaagaagcaaaggacaaaagcaaaggtaagagatgaaaacaagaagccaagcaaggaggctgctagtaaaaggtgggaagaaagagaaaagggcagtgaagggtcaagaaaaaagagttctattcttgctccagcccatcttctatcttgctctacagcaccacaccacctccccagcagacccccatacctaggccctaaatttttccaagctcggaaaaggaagcctgttccacatggtcctccagaagccattacagatagaatcactttaacttcatccgcaatagagaagtgcagttgtgcaaaacccaagagtcttatgtgattgttgtagaggctcagggtgggcagcagggaagaacatgggtaaaggatacactaaactcttccagtccacatccagagacaaactcagagcagagcaggaaacaaatggatggccaggactacagtacggactacagcagctcttcacttactcctttccagggtaagggaaaggagaggcagagagcttagagaaactaggcatcatcaccttatcctaccatctctaatcctaggaacaaaatgcaagttgggtgacccatagggcaaggaagaattccatctgcatgatacctaagatcaggagaactatatgagaaagaagaagtaaaaaaggaagaggaacaggagaaggtgaagagaaaaaagatgatgagttgcttcattgtccagttggtaactggcgcttcatgtcattacaggttataataatgtgcttttttataacagaagttaggtaattgcagttaggagtgacctggtctggttgggacagctcgcacaatgtcaaatcaaaaggtcgggagcttttgtgacattttccccccttgagctcacaggcaatgacaggactgttacagacagctttgactgtgtttagatcctcatggatgaatgcatactgggctatgcaactctgactgggctccttcatcttgtgtgccatcatatcattgcattctctatctgtctggtcaagcctaagatagtctttgttgctctgaaagagagctgaggctctgagcatcttgttacccccaacctcatcttcaccgaggatgggatcttctggccagccaggttgcaccacttctttgttgctaagcaccagcgtttctgtggtttgggtgccgtctccctcctcagtggcctcagctttgtcctgtgagtcactggaccaaaattcattgagcggttgatcactctcctccaagactgctgtagccatatgaagtcccaaccccaggcccatccccaggcccagcagcagcatcagcaacatgaaaaagatctgcaccagattcagcttcattttgcctggagaggaagcgggaaatggaagaacgtgactttgagatcaaaattggctctagtagagactgtaatctcactaagccctacagcattgtatctggggtctcctgtgtcttctgcacattactctaccctcttcaaggcagcgatttctctttccattcccatttctcttgttcctccctaccacattccctgttgctgtgtaataaaatgtggaagtttcctcatgtttcttctcttgaagagtagggagatgaccaagggaagcagttctgaggtaatttacatatgggaaatcagtgaggaaagttgacatcaattgattcttttttttttttttttccttttgagacaggatcttgctctgtcacccagattggagtacagtggcaccatcatagctcactgaagcctcaatctcccagggtcaagtgatccttctgcttcagcctcccaagtagctgggatcacaggcacacactaccatgcccagctctttttttttttttttttgagacgagtctcgctatgttgcccaggctggtctcaaactcctgcggtcaattaatcatcccactttggccaaagtgctgggattacaagtgtgagccaccatgcccctgacatcaattgattcttaaacagaaatttgtgccaaataaccagagaatgattgagaagacaagcgtgtacagtgtcacactctcctttagggaaattcttgtagaaagccttattgtcaatataggactagatttaccacagaagaccatctctttatttttaacccaaatttgcttttgcttattcaaatatctattactcttcttgttacccaccttccccacaaaagataaaaaggaatagaaaaagtaccacagtccattcttactcctaagctgaggctggagggaagatgtccaactttacatctcaggcccctgctaaagctacatcttgttaagccagattccttctactattaaagatctcttaacatctgagtagtcttgctgattaggtttatactctcagggaagaaatggaataagaatgaaaccaaagaaaatcaaacaattgacctgctgggggttcccctactcataaagattctaaggaggccaggcttggtggcttctgcctataatcccagcactttgggaggccaaggcaggtggatcacctgaggtaggagttcaagatcagcctggccaacatggtgaaaccccatctctactaaaaatacaaaaattagccggcatggtgccacgcaccagtagtcccagccactggggaagctgagacacgagaattgcttgaacccgtgagaaggccaagatggtgccactgcactacagcctgtgtgacggagtgagattctgtctcaaaaaaagaagatcctaaggagagctgagcatgcatctttgtcttgctaggccagtctcatccccttaacaaagagacacattccctgccagaaaaaaaaaaaattgctatgaagaacattattgaggcaattgataaaagtatgatctctgtagtagataagagtattatggcagtcccccttatccacagggaatatgttccaagaccccagtgaatgtctaaggccctatatgtactgttctcttcctatacatacatatctacataagtttaatttataaattagtaatatatattaacaacaactaataaaatagaataattataacaatatactgttcaaaatttgcagataaaagattctttcttactgtagattttaccaattgcagcatgtttttcccccctttccttattaagttgagacactttcaccttttcactcaaacggagcactttacgggttctttttgacgtgtctgaattgccagcatcatcattcttgcactttgcggctattactaggtaaaataagggttatgtgaacacaggcgctgagatactgtgacggtgcatctgatattggccactaagtagctaatgggt

SEQ ID NO: 1241618 - DNA, 4001 bp, Homo sapiens
aggacttcatgaaatccccagaattagaaatctctctttctcgtccttctccttctagctgtaaggatactatgcccatagctgaatgtggggaaactaagcagtaagtccaattgtaagaactaaaaagagaaaagagttagtagtccggctcaaagtcctctctgttccttctggagacacaaagaggaggtcactgagctctgaaagtctcaatccctccctgggaaatccttatctgtgtctctctaaagtctttaagggaaatggtttcagaccagtcaggctcctttctttatttcaagacacaaagggagctgctgaacaggaacagatgctgcctgagttgtatatgctatctttaaaaaagaccctaagaggtgacctctgttgcttctacagctagaagcagagctaggattaggctgaggttaatgagacactcactctaagaccaaaatttaagagagtgccacaaaactcaataatcaagataaataatattttaatgcaacaattttagaaaatatttatttatttatttttgagacagagtcttgctctgttgcccaggctggagtgcaatggcatgatctcggctcactgcaacctccacctcccaggttcaagcgctcctcctgtgtcagcttcccaagcagctgggattacaggcgtgcaccaccacacccaactaacttttgtatttttagtggagaggaggtttcaccatgttggccaggctgatctcaaactcctgacctcaagtgttccacctgcctcagcctcccaaagtgctgggattacaggcatgagccaccacgcctggccagaaaataaatttaatgcaaaataatccctgatgaacaaatgttaaaattttaaataccaggatctggccctgcactacgtttctcacataactcatcttaccctgatcctagccttgtcagattggatcttcaaaattttgtgatagatattttgagcatccaagatttctttttttttttttttgagacggagtctcactctgccgccccggctggagtgcagtggcgcgatctcggctcactgcaactccgcctcctgggttcacgccattctcttgcctcagcctccggagtagctgggactataggcgcccgccaccacgcccggctaattttttgtatttttagtagagacagggtttcaccgtgttagccaggatggtctcgatctcctggcctcgtgatccacccgcctcggcctcccaaagtggtgggattacaggcgtgagccaccgcgcccggcgagcatccaagatttttgcattaattttgattgttttaaaatactgaaatcaaggccaggtacagtggctcacgcctgttatcccagcactttgagaggctgaggtgggcagatcacctgaggtcaggagtttgagaccagcctgaccaacatggagaaacctcatctctactaaaaatacaaaaatcagccgggcgcggtggcacatgcctgtaatcccagctacttgggaggctgaggaaggagaatcacttgaacccgggaagcagaggttgcagtgagccgagatcgtgccattgcaccccagcctggataacaagagcaaaactccgtctcaaaaaaagaaaaaggaaacactgaaatcaaatatattcatctaggttactaggtttttggtcttctggtgccctcttaagttttgcacctcaagtgagtggctcattccctttatcttaatctcagtcctgtttctcatcaaaggacctagagataagggacaaaaaatggaaacacatgtagaatttatggtttaattcagtaaagattattttattgaagcagaataaaacaatcccaacccagcaatacaggaaggataaattaattaccagtggcttccccttccgctcaaggcattgccccatgtccacggtccaggtctgcctcaggcacagccagctccaatgccattgagagaagagatctcagactcgggagctgatcttgagttatttaacatagccaaggaaactatctggcctcaagtcatcacaagtgacaagaacaaacccctctgtgggggaatagtggtacctgcaggcagggtatcttgtgccttcaatgagctgacagactgtcattttgaactttgtctcactctgaaagcagaaaatggccgaaaggttttggcaagcaaccttcttgggagaaatgcaaataccattgatttttcgaggcctctcatggatgaagacatgctcctttttacaagtgtggtcaggttccctgataactctttgtatgatcatgtggttgcagtaccttgcaggaacgggaacgtcattctgagggtagtccacatgcaagtgttctaaagttgacatcactgcttcatcattcacctcattttcccagaacagaagcaccaagaaaattatcaccattattatcatcagaggtaagagtgacttcgcatctttggctttgactgctgttgagtaagggaagatagaaagtagcaaaggacagtcagattcctcctgctccaacccctggctgctcccccatccttggaatattttatttccttctctccactaattaaaatcacactgaccttgcaagatccagctggaggcatagttccccaagaaagccttttctgaacatgccagctctcagagtttggtactgagctgttctctaaattattcctgttgtgtttgttttgttctacaagttctttgacagcagataccacatctcctatttctcaaatccttcgaagtgctcaacacagagctagacatatagaaagtggtcaaggttattcatattgctgaataaccttctttcccgtaattttctcaaccttaaatccacccaattgcacatgattttagtaccttctactcatctattcttcccaattccttccaagtccctccctctgtcaatcctgcttggctctgtgctagctcctctcacctgtcatttttctggtcactgtcacaggtaacatagccttttgatcatgaatttgacaaaatcgcttgtgtcttgctgttccctgacaataactgatagagagcctgttgttgaatgtggggagggccaaagtagaaagagcagaaaggagggacccgcacagggtgtgcttgggcaccgctggggaggaagagaagttacctccagcaggacagtcgggtaaggcaggtcctgaatgtgtcctcattaaacaagtgaggacttttcagaacatttagtgaaggccaatgtgtgccagccacagtactgtctcctttctaaattttcaatcagtccttatgacaaatacatgaaatttttcatttcattgacaaataaatgagttgtagaaaaggttaaggtggagatgggaagtgagaaggaaagcaagagtcccatcctttcagtgccaaacactcgaattccagttttagcgagtttcatttccacccggcgtccagcacaggacaaaaacaattcccttgtaataacgttaatcttgataaagccctgggcttctgaggagtatggagacagttcccaaactgctgaacgttggaatcaacgggagatttaaaaaagtattggcttccaccttgatacattctgctttaactgatattgtgtgcgatctgggttggggattcttaaaggatccccacgtgattctaatatatagcaaaagttataaggggaaccactgaaccatggtatacatgggaaacccacatgggagattagtggataaaggcttagctaaaacacagtggttcaaagtattgagaccagagaattatttttgttgctatcatctcccagttagttgatataggaacgggcaaatggacttagttttactacttcatgccctgaagtcatttctcttttggagcgacaggtacaaaatctcctctgtgcatatctgtgtctttctaattggcaggaagaaaataatcgcagcg

SEQ ID NO: 1241619 - DNA, 4001 bp, Homo sapiens
ttgcccaggctggagtgcaatggcatgatctcggctcactgcaacctccacctcccaggttcaagcgctcctcctgtgtcagcttcccaagcagctgggattacaggcgtgcaccaccacacccaactaacttttgtatttttagtggagaggaggtttcaccatgttggccaggctgatctcaaactcctgacctcaagtgttccacctgcctcagcctcccaaagtgctgggattacaggcatgagccaccacgcctggccagaaaataaatttaatgcaaaataatccctgatgaacaaatgttaaaattttaaataccaggatctggccctgcactacgtttctcacataactcatcttaccctgatcctagccttgtcagattggatcttcaaaattttgtgatagatattttgagcatccaagatttctttttttttttttttgagacggagtctcactctgccgccccggctggagtgcagtggcgcgatctcggctcactgcaactccgcctcctgggttcacgccattctcttgcctcagcctccggagtagctgggactataggcgcccgccaccacgcccggctaattttttgtatttttagtagagacagggtttcaccgtgttagccaggatggtctcgatctcctggcctcgtgatccacccgcctcggcctcccaaagtggtgggattacaggcgtgagccaccgcgcccggcgagcatccaagatttttgcattaattttgattgttttaaaatactgaaatcaaggccaggtacagtggctcacgcctgttatcccagcactttgagaggctgaggtgggcagatcacctgaggtcaggagtttgagaccagcctgaccaacatggagaaacctcatctctactaaaaatacaaaaatcagccgggcgcggtggcacatgcctgtaatcccagctacttgggaggctgaggaaggagaatcacttgaacccgggaagcagaggttgcagtgagccgagatcgtgccattgcaccccagcctggataacaagagcaaaactccgtctcaaaaaaagaaaaaggaaacactgaaatcaaatatattcatctaggttactaggtttttggtcttctggtgccctcttaagttttgcacctcaagtgagtggctcattccctttatcttaatctcagtcctgtttctcatcaaaggacctagagataagggacaaaaaatggaaacacatgtagaatttatggtttaattcagtaaagattattttattgaagcagaataaaacaatcccaacccagcaatacaggaaggataaattaattaccagtggcttccccttccgctcaaggcattgccccatgtccacggtccaggtctgcctcaggcacagccagctccaatgccattgagagaagagatctcagactcgggagctgatcttgagttatttaacatagccaaggaaactatctggcctcaagtcatcacaagtgacaagaacaaacccctctgtgggggaatagtggtacctgcaggcagggtatcttgtgccttcaatgagctgacagactgtcattttgaactttgtctcactctgaaagcagaaaatggccgaaaggttttggcaagcaaccttcttgggagaaatgcaaataccattgatttttcgaggcctctcatggatgaagacatgctcctttttacaagtgtggtcaggttccctgataactctttgtatgatcatgtggttgcagtaccttgcaggaacgggaacgtcattctgagggtagtccacatgcaagtgttctaaagttgacatcactgcttcatcattcacctcattttcccagaacagaagcaccaagaaaattatcaccattattatcatcagaggtaagagtgacttcgcatctttggctttgactgctgttgagtaagggaagatagaaagtagcaaaggacagtcagattcctcctgctccaacccctggctgctcccccatccttggaatattttatttccttctctccactaattaaaatcacactgaccttgcaagatccagctggaggcatagttccccaagaaagccttttctgaacatgccagctctcagagtttggtactgagctgttctctaaattattcctgttgtgtttgttttgttctacaagttctttgacagcagataccacatctcctatttctcaaatccttcgaagtgctcaacacagagctagacatatagaaagtggtcaaggttattcatattgctgaataaccttctttcccgtaattttctcaaccttaaatccacccaattgcacatgattttagtaccttctactcatctattcttcccaattccttccaagtccctccctctgtcaatcctgcttggctctgtgctagctcctctcacctgtcatttttctggtcactgtcacaggtaacatagccttttgatcatgaatttgacaaaatcgcttgtgtcttgctgttccctgacaataactgatagagagcctgttgttgaatgtggggagggccaaagtagaaagagcagaaaggagggacccgcacagggtgtgcttgggcaccgctggggaggaagagaagttacctccagcaggacagtcgggtaaggcaggtcctgaatgtgtcctcattaaacaagtgaggacttttcagaacatttagtgaaggccaatgtgtgccagccacagtactgtctcctttctaaattttcaatcagtccttatgacaaatacatgaaatttttcatttcattgacaaataaatgagttgtagaaaaggttaaggtggagatgggaagtgagaaggaaagcaagagtcccatcctttcagtgccaaacactcgaattccagttttagcgagtttcatttccacccggcgtccagcacaggacaaaaacaattcccttgtaataacgttaatcttgataaagccctgggcttctgaggagtatggagacagttcccaaactgctgaacgttggaatcaacgggagatttaaaaaagtattggcttccaccttgatacattctgctttaactgatattgtgtgcgatctgggttggggattcttaaaggatccccacgtgattctaatatatagcaaaagttataaggggaaccactgaaccatggtatacatgggaaacccacatgggagattagtggataaaggcttagctaaaacacagtggttcaaagtattgagaccagagaattatttttgttgctatcatctcccagttagttgatataggaacgggcaaatggacttagttttactacttcatgccctgaagtcatttctcttttggagcgacaggtacaaaatctcctctgtgcatatctgtgtctttctaattggcaggaagaaaataatcgcagcgtaaaaaattatctaggaaaaacagaatcctggagaagccttcaaagaatgcttttctttctatacaaaaacgaaagcaaaatttcaaattgtgaaaatgagcaaccaggagaatatatttacttccagaaatgtccattctgggtgccctttcagaattcagactatcctgttttggatatgtgttacccaatgccacaaagatataagtgcatgcttaatttttgacatgattttcaattaacaaaatttgattttgtacatcttgcagaaacatttccaatgtatacagagaattatatctatgtactgtaacatgttcattatttcctgccagaacttccaagtagctgaagtacagataatttactaagtgtacaggcagagaagtaatccccgttacaaagattttccccaaaggaggcaactaaacctatccctagggtatcacactgcaaaaggagttgagactgagtccaaatgttaactagtgtggcagcctggaagaaaatatttgtaatgcctaaaaccacatttgtggttttagatttatatgtagattagca

SEQ ID NO: 1241620 - DNA, 4001 bp, Homo sapiens
agaaaaagcaattaaatcacaacagagtcagatgtgtgttattaactttttattttgaattgattatgggttgacaggaagttacaaaaaatggtacagagggggctcgtgtgcccttcacccagtttcccccaatggttacatcttacatactcagatgtggttttagaaatttatgttcgattagagccgggcctgcctcattcgctgcctggtcaggggcagactctggagtctgggggatttgggaggagcttctggaagagaagggaagcaggaacctctggggaatgggtgagagaagataccttgaaatgccagtgagccaaggtaagaagactggaagaaaaagaggttggaaaaaggaaggcagggtgactacggttgttgggagtgtgggggagacagtcctaggctccatggtaagaggaagcaggagaggacagttatatgaagggagaaaccatgatttcacagagagaagcaggctggaaactgggggttgtggggaagtgaggctaacatgagtctgagggcctcagggaggttcctatagctagccatatcccctgagtaggtgggtgagtggagggaattataagggaactgggggaggctgacatgagaaggctggtggggatggggaggtgagactcggagctggtgcctgttgccatggtgtgagctgaggccctgggcctccatccaggacttaggatctggcccagtgggtggacagtcactgccaactggacacagtcaacttcttgggtgggttttactgtctctgggagaggaaggatgatgaggaggtgggggcgaagagggggtaaacaagctggaaagaacctagaagatagcaccactttgcatggtgatcaaagccctggacattttcgcacccacctggtctcttgggaggggaccctgcctgcctcgtaagtcaggaaggaagtcttgttacagggatcagagtgttggaaatggagacagctggcctgtggtggtagaggttggggagtggctcaggaattaaattcccgaatagagaccagcgatacctattggatcagcttcatacttgcgggagcagagtaggtagagcttctggttggttagggtgctattgtagtagcagctagtgggtggctgttggtggctcagggagcagaccgtgatggggagggaatcctgggtgagtgtgcagtattcattgtaattctcacagaagctgtcactatacttgcagaacttctggatggccttccaaggggcatgtatcacataatggatctttgggcaatctgaattttgcatcttgcctcgcatataggacatcagaccattacaatagccccggaaaccctttgggtagttaaccctgggatagtcaatgcttaaggtatagaagttcctgctgccaatctgcatcttgatgtccatgaccagagttggccccagaacaagctggaggaaaaggagccgggtcacagctggtgccattcctcctgctggtagagttaaggtggttgggggcagcagtgggcctgaagtggctgtctgccacatcccagagcctccagcattcccaacccaacagtactttagagatcatctcacccataaccaagttctcatgacccagaaagaggagatgcttgcccaaggccacccagacaaccagccaccttcagccagccctgctcccctggtccaccacagaatctcagcctctgcagagtccgtgagctacatttgcagaataagagctctaactggtccttgggtgagagactcttcccaagagtccttgggcccctggcactcctgctagtaaaaaatgcagagaagaaagaaggagcaggctgacctgacaattctctggcagctgggaggaaggacaggagctgaagatagctgggtagggacgtgtattcttcttgccaaggccaagacagtcaagagatgaggagaggctagaaaggtttctaggtaaaaatcagtctgggaggagggaatgtccccgagtttgatgagcccctgtgctaagagggttggatgggtgggaggaaagaggcattactatctggtctcctcctctacagtgtcattggaacacttacttccaatctccttgccaaaagttcctaagtgcctgggctttctttgatgttttctctgttccatagcctgtgctctcgtggcaaggtgagtaggaaagcactgttatgtttctgaggaacaaagtgcttcttattcctgaccctcagagaacagagcattcgccactttgtcatcccactcacgggagcccaggagggcatgtactcaggggcctcccaccaaagtgctgggctgagaatcaaagacctccatgtggactccccacggtccctatcagccttactcctgtcacacccacagccttcacctgtgacctcaggccctgtcagagtttgagcactactggaaatctctgcatgctgactctgaagcctcaaacttggcagtttggatttgaaagcataacctgaacatgaaaagctgtggatgccagagcctggcatgatccgtttcgtactgttggttgatctctgagtggtttgccatgctggggaaagggccacgctcctatctttttcatcaacatcttccctttcatcagaatcaaagagccagctccctggaaactgctagctcttgcccttgacttccacaggtcactcagccttgttagtctgcaaggtgtcttccagatttggggcctcctcttaggagagcctttttacctttgctgggcagcagaaaaggggagtcagaacacagaaagctgagtgctccaacaccctcagtatagctcaggaggagggagtaaggccgcagagagaaagattggtgttcctcatgtagagccccctaaactggcactttctgacagcacaaaccacagtccaaaatggaatccatcctccccataacttgtttctcttcctgttttgtcaactcagtttccctggttacctatgcaagaaacctgaaagtgatcctagacccctccacctccccaatcccagctacggggaggcggtcctgcatggtggttaagatcaaggcttttgagtgaaacagaccaggaattgaatcctgcctctgcagcttacaaactgcacaccatctatctgtttacgaaaccactgaaagcttccttgtttcatctgttcatgaggatagtattttttacctcacggcagtatgaggatccattaagatgtatatcaagagtttttagaccagtgcccggcacatggtgagtcctcagtatgagcctgagtccatcagtcacacagccctgacaatcttaaacttttcccaagcccatctcttccattcttatttcttcctcagtggatgctctcgtctcgcctggacagcacacacactccaactccagtaagactcaactcaaatatatctcttatacaacttcaagagaaaaagtgtgatcccttctttcgtctaaaagtctgcaatagcttgtttctcatagggtaggggtgcccagtcttttggcttccctgggccacattggaagaagaattgtcttgggccgcacataaaatacactatcactaacgatagctgatgagcttaaaacatgcaaaaaaattcataatgttttaagaaagtttacgaatttgtgttgggctgcattcaaagccatcctgggccacatgtgacccgcgggccatgggttggacaagcttgtcgtagggtatagtccaaactacatctcacaggacataagacttcccatgatcttgcacctgcccatgtgtacaactgcatctgcatccctgcctgcttcccaccttgtcccccacctcctctatgccctatctgctgctgtctcctctacctggaaccctgctgctgcaccgttcctcgcccccatctattccatggtgctagctcatagaaagactcaacccagaggtcccact

SEQ ID NO: 1241621 - DNA, 4001 bp, Homo sapiens
ttcactgcagcccctatatctcttgggatagaaatcatgtcaataaaaaccagacttcaaccatagagcatcatataggacctcagtatcaaattgggctcaattgtgaaatacaactaaaacaagtggagatctatactcgttataggttggtgtcgggaaggggtcagtggatggaaaattacctagaggagatatcaaggctagggagaccaatgctaagttgatgtaattggatttttgttttttgaaggtaggtcaggaatcagttatcacatggaggatgatgggggaattaaggaatttggtcaaatattgagggtgagagactcatgataaaccaagttaggaggacttctgttaaacctgactttaggtctggcactggtggctcatgcctctaatcccagcactttgggaggctgaggagggcggattgcctgaggtcaggagctggagaccagcctggccaacatcttgaaaccccctctctaaaaattacaaaaattggctgggtatgatggtgcataactgtaatcccagctactcgggaggcggaggaaggagaatagcttgaacctgggaggtggagtttgcagtgagctgagatctcgccacgcactccagtctgggcgacagagcgggactctgtctcaaaaaataaaataaataaaataaaataaaataaaataaaataaaataaaataaaataaaaaataaatacaaatgactctacaaggaaggactaggaagcccaacaggatgacctagttgtgaagagggtttagaggagatgactaaagcttgatcaaagcaagagtcttcgacagttgctagatatcggttgagacctcagcttctcagcctaaagcagggagagggataagactgtgctgtttcatgacagaaagcgtctcttatcttcaaatctctctgtttcccggaagtctcaggttagaggaagaaaaatctctagagtagattgtcactaaatgacagcagagcggctaatgaagacacacagacactttcagatgaatttgcaaagcagtttattgcagggttcacaaggcacttcagctcaggaaagctgaaggggtatggagactgatgaggacagatgctgatacccaaagtatatggagagatgggatcttggctatgattgaggagcttggcagatgagtgatgatgaggagtgctgatacaggagcttagatgattctatccaggtgaactggaaccaccggatactgtggagggtctcgtcgttgatctctgttgtcacatgcaactatatagaacatgtttgctggtgtctgcgcatacctgcagtttgaaatattctgtggacttggagttgtgaggttacagtggattaaaggcacctggcttccactgtggtgacaatttttgcgagttttgttactaggacaggtcatatttgggttaccacaaacattaactacgttagcaaaagttgtaagaaggaaagtattttggtttttgcatcgccgttgataattgttaatgacctgcattgcattggtgcattgctgggaggtcatattgatgtgctgggtttcaaaccattgagcccaggtaaactgtggaggtttgacatggagtgagccctccacagccagaagccccaacagaagaagcagacaaatttgggaagtgaacagttttggaaccatgtttcctgtaagaaaagaagagaagtaactactccctgatcgggtcttggttatgacacacactgtagtgtcttaccccacaggcccctctgcggccactctggggtcccatttcctttacttcctgtctgcaaagtgtgcaacgtctcctaagcactaacgtcagctctcttctccctcagttgctgccccattgctgccccttctgtcccagctctggggatcgttgacttacccagtctccgcgctgtagctcctgtgagaactgatccagctggttgttctggggttcaggggcagctggtctcccctacttggaactgtttaaataaagcatcccttggtgggttgggccagcagagcccagagggagggtctggctcttggccatgcagaaacccacagattggtacatagtccacttgtgcaatcatcctttttatttgatgacttggctgagcaacggatacccaaggacagccctgctgctctttctgctataaggactctaattccaagtcatcctgtgtaagacagagttttgctggttagatccaaactctggatgaaaactatatgctgcctgcagaatgaccacagattttataactgtcctctggcaggccactaaatgaccaaagtacatgaaggcaggcatagtagttagaacaaatagagccactgagggctgtttgcccaggagaaacccagcttccctttcatttttagtaatatccttggttctctctcacacaaatgctctccatctcatccaccactcttgctggaaacttgagctattaatttcttagggcacaagattctgtagataattaaaacaatctgctacacatacttgagggatttttttctttactcctcttgcattggatccactttctcttaagtcttgccctgattattgcttccactttgtgtaaagttacacaacctaaaaacacaccgaggacagttgtaaagtctggcagagaatgaatgaacatttggtgtcatgaaagattccaacctagcactcggtattcctgtgatcttttcagcctatggtattttctacaaaacactgtgttctggggttgtcattcatcttcctggtaagtttcattttgtgatattaacaagaaaatggttctgtatttacaaatgaacatttaaggacagagcactgtattcctgaaagtatagaggtcaagtgtacagtttgatacacaaagcatacatttattcttggccctcagagacatacaggaaagtaattgtagacacataattgtattacacttgtgtgaacatggtttcatggggacgccgagggtgaaggaaatcacttggcttgagggacaaggaagacttcaaaaaaaaaagtttgatttcagcagggccctaaaagataagcagggagttttcagggactttagggaagagatgagcattctgggcacaggggatgatgtggggaaattgtacagaggtgggaagtgaattgcagtggtaagacctgagtactaagagatgttaaatctggtctagctttcagattagaaaattgatattagacccttaaatgatataatataccttccaacagttaatctacataatttttactaccatccaattttcctgtcatttagaaatgcaataattttatcactggggtccttaggtaaatgtggacacaatggtgacccagtgaggactcaatgcgcagctaatattgctctgccttgaagtcctcttctggccgacattcattagcagctttatcatgaagcaaattcttttttcatgtatattgtgtggagatcatttttgcaggtgatgagaatgtaaaggtgaatgatacgtagagtatccgctctgtgatgctgacagacacactgggtagaaagacttgcactcaagtgtctatagtatgaggcaaaagacatagactgcagccccagggcaggtacctggctaaacagtgcctcttttcagcatatacagtgctatttataatgtttggtttggaaggtaaagtttgacattggaatagttcactaaaagttttcattactgtcttatctttaaaaatcacatgatgttggttggtgcactgtgtctccgttgctgtgtggtatcaattagagctgggtaaagctgcctctgtggaaggggctctagctcggggctgttctctgactccatctctgcctcctgactttcatcctgtctgttcagtaatgacacctgcctggcttctggagacatctgtgcttatgacgcatcagacttgttgca

SEQ ID NO: 1241622 - DNA, 4001 bp, Homo sapiens
tgcacctgtccacaacttgcaggaaggggcttcccctttttctcccctgtttctcatggattcctgagtgaagccctgtgttggagtccagggcagcggctctcatcatccatttcttctctctctgggtctacaaatcctgaattctcgaggctgtgcccttcctgacaggtgttgaatgaacctttgactcgccattgggaacatctatggagggcagaatgggcaggagccaactcaccttcatgagtgctcccacttcctcctcctcctcctcccccttctccttcccacgtgaccagcggctccccatctccaggacatggaacttttgggaaagatgtccacctctcctccagtcagcattacaatctgtccttactgctgtcggaacaatttatcttattgcacatttgactcaaaccctggttccacctctattacgattgctaatagctggagacttgatgtgcccatttaaaagaaatatccctgaggctaaacttttctttatcttggtttcaccttatttatagcattcttgactttttctactttcttcttttctattttctatcataacgttcaattctatcaaaatttatcattcataaatcataatgaagcacgtgcattttcagctgattcactgcagctctttttttcttgggatagaaatcatgtcaataaaaaccatagtcggaccataaagcatcaaatgggacctcaatatcaaattgggctcaattctggaatacaactaaaacaagtggagatctatacacaagttataggttggtgttgggggaggagtcagtggatggaaaattgcttagaggagatattaaggctagggagaccaatgctaagttgactcaattggatttttttttaaggcaggcctggaatcaggtatcacatgaaggatgatgggggaattaaggaatttggtcagatattgagggggagagattcatgataaacccaaatctctagagcagattgtcactaaatgacagcagagcggccgaggaagacacacagacacttccagatgaatttgcaaagcagtttattgcagggttcacaagggacttcagctcaggaaagctgaaggggtatggagactgatgaggacagttgctgatacccagagtacatggagggatgggatcttggctatgattgaggagcttggcagatgagtgatgatgaggactgctgatacaggagcttagatggtggtatccaggtgaactggaaccacaggataccgtggagaatcccgtggatctctgttgtcacatgcaactacatagaacctccttcctggtctgtctgcatacgtgcagtttgaaatattctgtgcacctggatttatgaggtcacagtggagtaaaggcacccggaatctactccgatgacaattgttgagagttctgttatgagggcagcgtatactttggttaccacaaacattaactacattagcaaaagttgtacgaagaaaagtattttggtttttgcaacgccatcgataattgttaattgcccgcattgcaatggtgcatcgaggggggttcagactgatgtgctggatggcaaaccactgagccctcgtaaactgtgggggtctggcatggagtgagccctccacacccataagccccaacagaagaagcagacaaatttgggaagtgaacagttttggaaccatgtttcctgtaagaaaagaagagaagtaactactccccgatccggtctcggttatgacacactctatagtgtctcaacccacaggcccctctgctgccactctggggtcgcatttccttttcttcctgtccccaaagtgtgccacatctcctaagcactaacttcagctcacctctccctcaggtgctgccctgtcgctgcccctcctgtcccagctctggggattgttgacttacccagtctctgagctgtggctcctgtgagaactgatccagctggttgttctggggttcaggggcagctggtctcccctacttggaactgtttaaataaagcttcccttggtgggtctggccatgcagaaacccacagattgacacatggtccacttgtgcaatcatcctttttatttgatgacttggctgagcaacggatacccaaggacagccctgctgctctttctgctatacggactctaattccaagtcatcctgtgttagacagagttttgccggtgggatctggactctgggtgaaaactatacgctgccggcagaatgaccacagattttataactgtcctctggcaggcccctaaatgactaaatgacacgaaggcaggcatagtagttaggagaaatagagccacagagggctgtttgcccaggagaaacccagcttcccttccatttttagtaatatccttggttctctctcacataaatgctctccatctcatccaccactcttgctggaaacttgagctattaatttcttggggcacaagattctgtagataattaaaacaatctgctccatacaattgaggaatttttttctttactcctcttgcattggatccactttctcttaagtcttgccctgattattgattccactttgtgtaaagttacataacctaaaaacacaccgaggacagttgtaaaatctggcagaggatgaatgaacatttggtgtcatgaaagattccaacctagcactcggtattcctgtgatcttttcagcctatggtattttctacaaaacagtgtgttctggggttgtcattcatcttcctggtaagtttcattttgtgatattaacaagaatatggttctgtatttacaaatgaacatttaaggacagagcactgtattcctgaaagtatagaggtcaagtgtacagtttgatacacaaagcatacatttattcttggccctcagagaaacacaggaaagtacttgtagacatataattgtattacagtgtgatagaggtaatagcatttgtgtgaacatggtgtcatagggacactgctggtgaaggaaatcacttggcttgagaaataaggaaaacttcaaaaaaaagtttatttcagcaggtcctaaaggataagcaggggattttcaggggatttagagaagagatgagcattctgggcacaggggatgatgtggggaaattgtacagaggtgagaagtgaattgcaaaggtaaggcctgggtactaacagatgttaaatctggtctagctttgagattagaaaatggaaagtagacccttaaatgatataatataccttccaacagttaatctgcctaatttttactaccgtccaattttcctgtcatttagaaatgcaataattttatcactggggtccttaggtaaatgtggacacaatggtgacctggtgaggactcaatgcgcagctaatattgctctgccttgaagtcctgttctggccgacattcattagcagctttatcatgaggcaagtttattttttcatgtatattgtgtggagatcatttttgtaggtgatgagaatgtaaaggtgaatgatacgtagagtatcccctctgtgatgctgacagccacactggctagaaacatttgcacttaagtgtctatagtatgaggcaaaagacatagactgcagccccagggcaggtacttggctaaacagtgcttcttttcagcatacacagtgctatttatgatgtttggtttggaagataaagtttgacattggaatagttcactaaaagttttcattactgtcttatctttaaaaatcacatgatggtggttggtgcaccattggtgttgtatcaattagagctgagtaacagctgcgtctgtggaaggggctctagctcagggctgttctctgactccactctccctcctgacttttatcctatctgttcagtgatgacacctgcctggctcctgaagacatctgtgcttatgacatatcagacttattgaagtgtcttaag

SEQ ID NO: 1241623 - DNA, 4001 bp, Homo sapiens
atggagtcatagaacaagagtgggaggggcctctgagactctgtccacccctcatattaaagaagagccaactgaggaacagagaaagagacatgtattgcccaaggaactcattgcattcgccggcctggaagctttccaatgcaccacacaattttttttttttttttttttaagacggagtcttgctctgtcacccaggctagagtgcagtgacgcaatctctgttcactgtaacctccgcctcccaggttcaagagagtctcctgtctcagcctcccgagtagctggggttacaggtgctcaccaccgtgcccggctaatttttgtatttttagtagagacgaggtttcaccatcttggccaggctggtctcgaactcctgatcttgtgatgcacccacctcggcctcccaaagtgctgggattacaggcatgagccaccgtgccgggcccacacaacttttatattccatactagtactttctagacaatcagagctaactttaaaggggccactgaaagttgctgttcgaaggaaacctacattgactattaccataaattcaaaaattattttactctgcttgtcatcagtaaaagaattgcttgaattgaagcgtatgtaataaacctatcctcttgcaaaacttgttagtggctctgtggttaagtaagtcttgaatacctgaggctgcttctgggaaggtggtcctgtgccacagataatgatgtcccttgggtttctactgattacattatgacttgattataagatttttactgtcacgagggagggtcttggctcatctgagatttccctagccccctgagtggtgctgaaattgttttaataaagatgttgcgctttactcatgtgctgctattagcatttgacgtgctgtctcagagcgagaaaacggaggatcccaaccttccagtaggaaggcttagagaagaggctgttggcaagtgtctctaagaattgcacaacactggctgagggtgggttaagggtgaggaggcagaggagagtaaacagaaaacaccgatccccaaatgttagttacgcttgcaaaaaactaaggcctgcttcaaaaagctggtgattagcctgaataactagcaaagctttcttagttgtgggcaagtgcaggcctcctagggcttcccttaggttcggcgattctgtggtccccctccaagcctactaatcaatagaagctggcatctgtgcccagctgcgcaaagtaaacctgagtgggaatgtaaagtcgttaactcatacaaatacgggactttcacgtccctccccattcctccctctccagccccgtcccgcaaactcctccccaaggagtcccaagctgcctctactaggaaaggactccccggcctaaacgccccttatgaagctaccagagaggaggaggaggagcaggagtgtgaacctacctcggcctcagaacaagtccgcagaaacgggcaggacaatggaaagaagttttgtttctcacccgcttcttcctccctagtacgatgatggggagccggtagaaaacgcaaagatgttcttttgaatcctgctttgcatctaggtggggttggcgtccttgtgtgagtgtgtgtacacggacggagatgggggcgtggtgaggtgtggagggtcggcgtgccagcctctgcgtagttgggaccgcgccccgcttctccgaggaggcccctcccgcctggatccgcccttggagctggcgccgcagcagcacccgccccaggggccgcaggggcagcccaggcaaagaacgagcctgggatccgcgctccttcctcagctggaccccaacgggcagcagccgcgagagcactgcctccacggagagcagatggcgggaaactggcttctgctcccaattgccaggcggcccttcagagactacccctggctgagcgtccaggaacccatgaaacttggtcttgacactggtcgacagcaccatctgccacgtacttattcgctgctgctttctttggcaggacagcccatcgcgagacagtttgtgtttcaaatttaacggagactttttttcagtagttgacaaaagggggtggaaaaacagtagccacgagggctcgtccgggatttgaacccgggacctctcgcacccaaagcgagaatcatacccctagaccaacgagccactgtagctgagtggtgcttcctatcactctgaatttctcttttccgcctgctgttctgaaggttttttgttttgtttcttttcctctgttgtgacatttcccttaggccttatttagttattccttccatcttcaccaagtttcaagtgtggcttattctctggcttattctcctcgatccagatgcaggatggggtgaaggaaggcagctttttagactttaggtcacatgcttgtgtctcactgagcccggggagcgatttaagcccgctagggcctggagggaacctggagggggctgaaatagagatcgagggccagagctgagctcggttgcaaggctgtagggtactgagccccaggacagacgcgcgatacgtatatatctgccggcctttggacttaacgtagaagccaaaatataacacacttcggtaagacaacagtgccttcccccaacggtgggacgattcgggtctactatctttcagaaaggtaaccaacttttcaagacgcgattaacgcagcccacctcgcggctaagctgtttccttcggacaagggtgagagacagaaacagatttgatcacgtcaagatacagagattttttgcacaaacgaagagcaaccgtaaaccccaaaacagcagcgtctccttcgagccggaatcgaaccagcgacctaaggatgaccacacattaagtactacagtcctccgctctaccagctgagctatcgaaggaagcacggaaacaactctcctaaaaatccctactcgagacatccttaaccagagacgggaaagaaagaaatctctttatacccggaaagtaattactgcagagtcacaaagccagcttgtaagacagtcctgcgtccgaggttctgaggacaacctttctaaatctggattcccctgcctcactgaggggctcccaagcagagcaggcgcccctgaaactcgggcataccgaggctgctcatcctctgggcgcccgagggctgttggcctcactgggcgcggacccaggggcctcgcgagcgtggatgcgtgtgtttgtgtgtagggtggggaccggcacctgggcgtcggagaactgggggctgaggcggtgggacgcacacaattctgactgcgcaactgtgaacgccggagagggcgggcctccaggcttaggcccgggctccctgatgtcctcacttcctgcgcttccctcccaatctcggctcttccgcttacacgtccacagacacgggagggagagggtgtggaatggagcagtggtccccaacatttttggcactagggaccggtttcgtggaagacagtttttccacggaccgcgggggcggggggaagagttgggggatggtttcgggatgaaactgttccacctcagatcatcaggcatcacttagattctcataaggagtgcagtttagatccctggcatgcgcagttcccaatagggttcgcgctcctgtgagattctaatgccaccactgatctcacaggaggcggagctcaggcggtactggtagctagcccggagttcacctcctgctgtacagccgggtccctaacaggccatggacaggtgcgcggcccaagggttgggaacccctgaaatagaggacatctgggcaaacccaatgtttctgtgtgaattcgcttttggagataatatttgcagctcattcaaaaggaaggccacatttctctgcgttaaaatcaaatttagtgacccaagtctcgcccctaaagtcgggcccttaatttcccaaaaccccactggcacatg

SEQ ID NO: 1241624 - DNA, 4001 bp, Homo sapiens
taattgacttcatttttctctccaggcctaggtttgttcatcaagaaaataaaagagttgctagctctaaaaatctgaagtttcatggttctcattaaacataatagaggctttgctagtttcaatagcaaaggtccagtgaccctcagttacagagacaaattttgtataagtttagttgggggcctgtaatcttgattccctaagacatccaggaaccaaatctcagcaagcgtacaccaaaaccaccaatatctaacatctgctccctcactcaaaactttctcaatatattcaactctaaattcctcaaaaagcaaggtaaaatggaattgggagaaaaccagtaagagacagatcgtttgtggtgtaaaagtgaatctgcctaagccaagggtgcaaagcctcacatctggtggcaaaagtcctatagatatatccttctgtacccaaacacgtaactgtctgtcagctttttgtcagtggaattagtcccagctgttctctgtcctttttttcttttcttttctttttttttttttttttttttttttttgagacggagtctcgctctgtcgcccaggccggactgcggactgcagtggcgcaatctcggctcactgcaagctccgcctcccgggttcacgccattctcctgcctcagcctcccgagtagctgggactacaggcgcccgccaccgcgcccggctaattttttgtatttttagtagagacggggtttcaccttgttagccaggatggtctcgatctcctgacctcatgatccacccgcctcggcctcccaaagtgctgggattacaggcgtgagccaccgcgcccggcctgttttttttttttttttgagacagagtcttgttctatcgcccaggctagatcgcagtggtgctatcttggctcactgcaacctccacctcccaggttcaggcaattctcctgcctcagcctcccaagtagctgggattacaggcggccaccaccacgcttggctaattttgtgtatttggtagagacggggtttcgccatgtcggccaggctggtctcgaactcctgacctcagttgatccggctacctcggcttcccaaagtgcggggattacaggtgtgagccaccacacctggccccaactgttctttagagtaactttatcttctgtatcaaatgaatctgttagtattcacaagaattattctctccctctccccacaggcaatgttcagtattcaaaagattcatcaaattttacacaccagggagttaacttgacagtttatgatgagtaactatagttatcattttcatcaatgtggcttcacacttttatacatcctagggcaaaatcccccaaagtaagagcctaacacccaaggcatattcatccctttattgcttttccttccttcttcccttcaacctgccagtgagccttcttttgatcttgggatgtgttccactttgtttgaaagagcatccaaaacttttctaagaagagaaattagcagggaaggttagaaggaaacaatgctaaaaacatactgtttctttccttgttaagccacgtgtaatgcctgtaacaggggtggacgacgggggaggactcccgatggccttcagcaaatggctcccccaggcctttggggattttatcacaatttagaaatccctcctaaacttccacttcctcccagtctcactaatttctctttatccacacataggccatcccaaaagaaacctgttttcattttaaactttagaatctgatccattttctttttaattcatgagcttgagcctggaggctttaaagggaggaaaatggtttcattaaaatggatggatggctagaaataatatataaaacaaattgaacaatagtttacccaggaggaagaatcttacaaaaatctggcagtttcccttcaacgggagatgggttccagctgtttgttcctggagatgggttccagttgtgtgaacctggaggcctctccaggttctgattatatagtgttcctaatatatagtgtcccagtcctggcagggacatgaaaaccaaggacactgctcttgaacaaacgaggagggtcattcaccttttcgctgggcatgattgggttagatattaacccacctgaatggattagagatttgttctggaagacaaagtttgagaaacatggccttctgtccaaaagttgcccttttctgctgtctgtggtgcttactcttgttcatggcaggactgaggtttccctattcacacataatagtctggatccataagatagcatctctgatctccctgggccaactccaagaactgccttggaagatgtcacagagtaagatatggtcttccagtaggatgcttttccactgtactatttatcatttatcatatcacatcctatttatcgtatcacatcatttggtttcatgaacggatgctaagcacgttattccatcgatttcatacagccaggaaagcacttccagagaaggttgtgtgacagctattagtacactgcccctccccctacactcaacttctcagcttctaacccccagaagcaggcttgccatgtttcctgggtttctccttcttccatctttacctgtccacaagagactaaccctgaacattcaatcttctgatccttgtaatgtagttgcaaaattgcttatctccatcatcaaagcagggctgtagatccattgcttgcgtaaaaacagtgggccaaaggtcaccaggatcaccttatagatctcatagtttccaatatcagacagcagcagggtaccaactgtttcacagacccccagcatttgcccacagtggtgttggatctaggacagtgttatctttttaaaaatcctcaatcctctgttgtcacccacctagctgccaagtattcagtctggctgcacttgagaaggtgtcaagaaaagacaggctgcctgctagtaaaacaaatgcacttgaaatcacaataattataatattcagtgcaatctttcattttgtgaagctctcacatacatgactacattcaaccaacaccaggactgtgtgaggtaggcattatgtaaatatgctctgctcatgaggaaactccaagaacaaacagcagatgaatggtggagtcagactttgaacccttcataagcaaggagaaaactgacctgtctttccaggcttagctcaagcaacaccacctctgagtcccgaaaagcggtaccctgccacagcatacaacccatatgcgcctgcacacacacagccccatggcctgaagcaccaattcaagcaccgactcacacaaacagagcagcctctgattttagagttctgcagtagtgctgaggtggggcaaccagcagcctctgaatatagttaggtcccttctctgcctctgggccttcactggacaacctttggaggatacacaatctgcccacaatgcaaaaagacagttttatgtttttcttttaaacttggcacaaggaagttttgttgaaatgaaaagtagggtttgggggaaaaattactatttcattagaatgcatctaagcacttagtcatttgtgtttaaaatacaacaaggaattatattctatgattaaggaacatcacatctttgtcagtaattttaatacaaatgaaggaatcgccaattgcaaaaaacctcatatattttttaaatgttcagacagctttaacttgaaagtcattcccctttcctggagatttttttctctctctccctcaagccaataatgtccctgcacacagacacgggatgcacgggtcctgtttccaaggaccctagtgttagagcactttcctccttcatacagagtatatatgtatcattctgtcttaggactaattataaaattagatgatgggaagaatggactaaataatttctatatttctttattattctaacactttaggtctataagcatgaactt

SEQ ID NO: 1241625 - DNA, 4001 bp, Homo sapiens
tgtatctttagtagagatagcgtttcaccatgttggccaggctggtcttgaactcctgacctcagacgatccacctgcctcagcctcctaaagtgctgggattacaggcgtgagccaccacgacaagcctagtgcttttttcttgatctatgctttctatttatccatttcaataaataatggaggattgaccctaaggttactacaatggattattatccctattactactactatcaccttatatttaaaacattatctgattaaaaacggaaacaaatagaaaagacataggatccttcagttgccagtgacagaatctatgtgtgagttatcatcaactgtctttgaggtatcagtactacctccaattaagcatagacaatggtttccaggggaatatataaagtcatgagcagagtttgaagaaatgctccaaagtcccaaacgctgtcctttcttgtgggcaaggaagtggggccccagggaggcctcaaaagttttctagggacttaaagtcaaaacagtgttcctctgagtaccggtcaacaatgctttgaaagcggatctcaaacacacactcattagaatgcagcaggaagtggttttattgctgtgaacacagggcaataaagcttggcaaaagttgcagggttagaaatctgaatctttctttgctgtcttccctattcccttctctcgaaaagtacagaactacaaagcagaaaataatcttatttctttttgtctcaactctggtctggcatcctaggcactcgaattctccaaacacctttcttctttcttctacgggaacaagaaaatcaacaaaagaaaagaaaacatggatgcaattgtaacagaagctatgtcaaatgaaaggaaatgcagtggatgccttagagaatactatctaagtgtacaggaaccaacttgtaggggggatcgctcttctgaggggggtcacaggcaacaatgaagaatttgtactgggcagcagcactatagcggcactggggatactttcctgaagtgagtctgcagtcagtcatgttgacaggctttgagctctggtggcagttgtgccgacgatttttgcagacaatgctgagcaaatcacagacagcagccacattctggaaagagtcatgcagaaaggtattttgatgcttacagtgctgggtataattgttgatgccactcattgccctgttgcattggagaggacttggctgtatatgctgaatttcaaaccagtgagccttggtgagacgcttaggccaagcatgaagtggacacactggtccccatagaaccagcagcagtaaaagaagaggaaagcatagcaccatcttttctgtgtagaaagagagaagatagttatagtaggagaagcaataagagcaaaatttttaatcataactatttagatttttattttgccttttaagattttacagctccctttaaaatcttctttctcacatagtctcacaattctatgaagaacctgaagcccaggaaacagaaatatgacctctcctttgattggcatatcccattttctttcacaagtactcatgcatttgatggctgtcatatcagaaagtttcttccctcttccctcctgaaatatttaccctctatctgaccactacctcccagccgtctttactgctctactcgctccagccctgaggctttctttcttacctggtctcagtgttggggctcctgctgagaacagaggctgtgattagtccaaagctcagaagctgttgtctgcctttcttctctaacccttcgagccctgtgtgtatagggaaggggaagaaatattctgagctttcagaaggagaatcctagggtttggcagattaacttcttgtgcagagtctggattaaactcttagactttcacacctgttctttaaaacagtatcattatcacatgtatacaggaaggctaaaccaacttaaagaaacaacatgactgaaaactcacagttttgaggaactgatcacttcctgatatggaatgagtgcttcctgcctcatctgaggcttcagtgtttttttttgaagctttatgattcctgtttcttaagagaaaatatgtcacataaatatgatataatgcctgccacatacttggtaatgttgtaagttcctacaacagaagtgaatacattattcatttatgcatatacttattgggccaggtactaggctacacaaattcaggagctcatgagttttttttttttttttttttgagacggagtcttgctctgtcgcccaggctggagtgcagtggtgcgatctttgctcactgcaagctccacctcctgggttcatgccattctcctgcctcagcctcccgagtagctgggactacaggtgcctgccatcacgcccagctaatttttttgtatttttagtagagacggggtttcactgtgttagccaggatggtctctatctcctgacctcgtgatctgccaggagctcatgatttaatgaaagagattagagacaggcaggtaagtatatagacaagtagattatattaatataaatagcacttacagtgtgatggaggacactgcaggaggctacgggaagatagtagaggggaaggattgttggagggcacaacacctgaactgaattttgaggaataattagaagttaggtgaagagagtgttaagcgcctcccaaagacagaattgtgtatgaaaagacctgtaagcctgaagaagaaggccgaatttaggatatttgcctcttgaatctgttcttaccttttcactggtactgcaacacccttattcagaaactcattgtcttatggagggctcacataaaagcctcccacatggactccttgccttgtttttttctccttccaatccattctacatattacttccagattagtctttttttgaacaagatataatagtacaacactcttgccccatgcttttatggctccaaatgtctgcagaataaacataatgtctgtttatagcaaggttgcaggatacaaggttaatatacaaaagtcagttgctttcttatataccagcaatgaacaattgcaatttgatatttaaaacacaataccatttatattgcaccaaagaaagtgaaatacttaggtgtaaatctaatacattatgtaaaaattggtatgaggaaaaatttaaaactctaatgaaagaaattgaggaagcacagatattccatgtacatgagtaggaatactcaatatgttaagatgtcatttcctctcaacttgatctatagattcagcacaatctcaatcaatatcccagcacattattttgtggatagtgacaaactgactctgaagtttatataaaagtaaaagattcaggttggacacggtggctcacgcctgtaatcccagcactttgggaggccgaggcaggctgatcacgaggtcaagagatcaagaccatcctggctaacacagtgaaaccccgtttctactaaaaatacaaaaaattagccaggcctggtggcgggcgcctatagtaccagctacttgggaggctgaggcacgagaatcgcttgaacccgggaggtggagcttgcagtgagccgagatcgcaccactgcactccagcctgggtgacagagcgagactctgtctcaaaaaaaaaaaagattcagaatagtcaacacaatgcagaaaaagaagaacaaagtcagaaaactgacgtgacccaacttcaaaacttactataaagctacagcaattaagacagtgtgttattggtgaaaaatagacaaataggtcaatggaaccaagtagaaagcccagaggtagacccacacaaatacagtgaactaatctgtgacaaaggatcaattttcaattgagaaaagttagtcttttcaacaaatggtagtagaactgaatgtacacatgcaaaaaataaatcttttcataggttagacttcatacatt

SEQ ID NO: 1241626 - DNA, 4001 bp, Homo sapiens
gagaggtaatgacctttattgcagccaacacagggtaactggctcttcagagcactcgtttcttcatgagtgaactcttacctagttcaccgcttgcctctgtaacagtgacttctttcttgcgcaactggtagagtagaaggtacactgtatttagagcaaggagacctaggttcaagtccaggttctgctactaactaattagacaagctctttaattcattaagctttctaaaaccttaatttcctcatccataaagaaggcatacaatccctgtcaagtctatgtcacaagggattagaggattctatacaaatatgaagtggtatttatttatatttttctttccttcaggtcacctcactgccacgtcagagctggggaagacttctagttcaggaacagaaacagctgtgtccacaaatcccatatgccccctttccatttatttcctctccttgtcatgctgccctaatgccagggggcaggggagacatgtgcaatggcatagaccagggaacccacagacctgagcttgctgtttcttggggataagcatctgggaaaacagcaacaaaaagatgaaaagccatccctctagagctcagctcaccagagtgtcagcttcagcctcccagcagaggctgaaccaggaacagccccaagagatgaggggaagagaatgctctgggtgtaggggagtggtgcggagtcctggagagggaattgaaggtcagccaaagagcaagccagtctggaaacctaaaggactctgtccaagtgtacaggaaccaggtggaattgctgagagtcctttttctggggaggcttacaggccactacgtaagacttgttctgtcgcttctctttgtacctgcagttcggatgcttccctgaggtgagcttacacatggtcagggacacggccccgtggctctggtggcagtttttatcgccattcttgcaggctattttgggggtctggcaggtggcggccacactggagaaaggctcgtgcaggaaggtgttgaggtctttgcaccgttttgtgtgcttgttaatgtttttcatggctgagttgcatgcttgagggctgggctgcatgtgctgaattttaaaccactgtgatgaggtcatgcccttgggcttggcactgactgggatctctgccacccacagccccagcagcagaagcagcagaagggggcagaatcctgctctggccggtgccatctctcttaggaggagcagtcaggatggagggcaggggtcgctgggacagaggtgttcagttgagaaattagtcctcttatacctgctcatatgagctagtcacccatctccctactcggttgtctcctttcctcactttgtgtctcatctctgcctcttcttctgtgtgtccacatccactgcagccccaacaacaaccctgtggccccatctctcatcttgtatttctgttcccttcattctgtccctgttgcctgtcactctttgtcctctcccctttcccttaagtctcatcccttttgtgtctccatgttcctgtgtctgtgtctcatcctctcccgattcccatctcgtctgtgttcccattctttttcattttttgcctccatccccaacatcactctcccctttccccaatgcgtgtcctcatctcccctaaatccagtccctcctttatccattttatcgctcacctgagtgtactctcaggatcagaacccatccctccttctctgtcctcactcctccccagatcctgccacagcctcacctttgcgcttggtcttcgtgctgtgactcctgctcagtgggctgaggtggtgtccacgcactcctaggctgtcagatctctgagggcctcttctcactcctgaactccttaagagctggcccgggctacgctgtgtctgtttgggggtgggctgggagcatcactggatcaggaaatgaatcaggttcatgcctctccacttacatgtcccaaatacgtggacacctaaggatgcctgtacctgcctaaacatgttcagcaatgaggaagcttgaatcgtcacattcgaagactgtatttgttccctggccacatgattttaatgactctttaatagagcacctgacccaggtgtcaactgaaatcaatttcaggaagagttgtcattcatatcctctcatatacacttctggcccttgatcctgggaagagtcaatcactgtggtgttaagggttgcttcttctctgacctgaggcacagataggacagcctagaaagatgctttgtctggttccttgtcatctggagatactggttatctttcggaggagatggaacagacacgagggaagtgggtgaatgaatcatcactgtcacgaggcctggcaccatccccaatagcgaagccattccacaatgattcacaggcctctccagttccaggtaccaaccaaggccacatggctttagctggagaaggcagccaacacctctcaatttcacttgttccctcccttttttattgaaaattgcaaaaatttaatactgcccaaatgtttgtgtttaaaatgctgttgctgctctcgacatcctgccttagtgcttccttcaccttgtatgtcctgttccttgtggtggttacagctgtgtggagcatctgggtcagtgctactccaagctcttgtgagcttggaatatgacactcaggagaaccgagacaccaaggcagagaagcatcaccctctgtgggtgagaaggcctgtaaaactgagatgaggaatatttttgttttcagaatttacctgtaagtagtaggcaatctcagaatcttgggcatgcttcattcatgtggtcaacaaacatttatcgagcatctactaagtgtcaagatacttgggatatatcactgaacaaaaaaggcaaaaatggccaggtacggtggcccacacctgtaatcctagcactttgggaggccatggcaggaggattgcctaaggccacgaattcaagaccagcctgggcaatgtggcgaaaccctgtctctataaaaaatttgaaaaattagccaggcatggtggtgcatgcctgtggtcccagctactccagaggctgaggagggaggattgcttgagcttgagagataaaatctgcagtgaaaatcatgattgcaccactgcactccagcctgggtcacagagtgagaccctgtctcaaaaaacaaacaaacaaacaaacaaacaacaacaaaaaacaaagacaaaagtccctgcctttgtagagcttacattccattggagaaagacagtaaaaaaaaatacgtatactttgctcaaagtgataatggctagggaaaaaagtagaacagtataggggttggtggtcagtaattttacgtaacatcgttgaaatcgctgactctggggcagagacttgaagataagagtgaacttgtgattatccggaggaagaatgttccaagtgaagagactagcactgcaaaagccccagagcagacagatgcctgaggtgttggaggaacagcagtgtgtccagtgtggctggagcaggtaactgagagttcagagagggaccagagaccaggtcattgggaagacttacggaccatttgaaggcctgtggcttttactccaagcacagtagggaaccctggaagggttctaagtagatgaataaagaacgtgtcagcttaaaggattacctggctgttgtgtggattataactgtggagaagtcgcacaacccatcctgatcataaagtttgtgttctggtccagaatttatgattctaagtcaggaggatggggagtttgttttgaggccaggaggacattattttagtagctggacagcacagctgtgggttgggggtcaggatgaaggatctttagaagcaaaagtggtgctggagatgagaaatgccactagatggcaaaagagaatcaagaacaagttcacacaggcctctggctcttctg

SEQ ID NO: 1241627 - DNA, 4001 bp, Homo sapiens
ctgagcgccatggctgacgcctataatcccagcactttgggaggtccaggtgggtggatcacttgagcccaggagttgagggatcgcttgagcccaggagtttgagaccagcccgggtaacatggtgaaaccctgtctctacaaaaaaatgcaaaaattagccaggtgcggtgccatgcttgcacgtgtagtcccagatactcaggaggctgagacgggaggatcacgtgagcccaggatgtcgagactgcagtgagcagagattgggccactgcactgcagcatgggtgacagagtgagaccctgtctcaaaacaaaaagcaaaagaaaaaaaaaacccaaaaaaacccagtaacttttatggcaatttgacagagtattttatataaattgaatctagtaataaaacaattgagcttgtattttctatagttatatgttctatttcattttctagtaattcattgtattgtattttacaaaagtattggtctatggccgattgcatataaaactgctcctttaccacagttagtcttcagcaatgattaagaccagatcaggactcctagtaggtcctgattctgaaattccccaaggagggaagttcactccagaacgctgagggtcctgctctgggtcacgtcgatgaaacatgaactctggtcttgcgcacacacaagggggtcaggcctcagacctgactggcatcccagggctcagcctgtccttcctgtcactctaccccttcacatgagagggggccaccagagagccctcaaggggctggaggacagaatcaagccagcttcccagactgtgcctgctcagggtgctgctctccctccggcctgcaaggcaggtggagctgatgcctcacagaagtaagtgtttcagggccttttcagggccttggaattggagctccaaacctctccacttaccccaagacagtaacacacactccatcagcaacagcagagtctttattacagcaagatcagatgcatttctttgcccaacacagggaacacagcagagattccccttccttccttccttagataattacccctgtctgggatctccctggactgtccagccacagcccttccaaggatctgacttatttacgtttgtaattttatattctttttctttaagagggtctttggtgagccacaggcctcaccaaacccagatccatccttgtggggatcctgagtgcttgactctggaagggctgcaaagtaagctacaatgaaaggctgaagagaatctgccctcttctttcatcgtttggagcgtctgtaaaactccctaagaaaccaagagtatgtgaggttgagtgtgtgggagggaaatggcatttgcagtggggagcaaggattaataacgaactggagggaggaaaagcagcagcatacagtctgcagagtgtgaggtggaacgtgggcaccagggcttagacaactttatccaagtgcacaggaacaagtgggtaccctgggtcaccctgttgtggagggtcacaggccactatgtaaggtgtgttcaggtgcttctctttgtacctgcagtttgggtacttccctgaggtgagctcacccatggtcagggacatgggcccgtggctctggtggcagtttttacagctattcttgcaggctatgttgggggtctggcaggtgatggccacactggagaagggctcgtgcaggaaggtgttgaggtctttgcaccgttctgtgtacttattgatgatgctcatggctgagttgcatgcttgagggctgggctgcacatgctgagttttaaaccactgagatgatgtcatgtccttgggcttggctctgactaggacctctgccacccacagccccagaagcagcagcagcagggggcagcatcctgctctggccggtgccatctctcttaagggagacagtggaacagagtgaggaggtaggtggatgaataggtcatcatgggggagtcttgttagtccttctaagaatttcataccctaagccagttattgcagggcaatgtgcagcctaagatattgaacacccctggcattctattgtttagtaccagcagataatgtgcctttttgtgcctctaataaacacttaccttctttacctctcacaatagttttatgggtatgattaccttctcacatatatatatatatatatgaataaaatgaggctcaggaaagttaagaaaattcctattatcccacagctagagcgtgtcaaatacaagattttaaccaggacctctcaagttccctaactcctattcttcccacactcccaggtatcttttctgagactgtgagaaatcacaaagagaaactaaatctttttttttttttgagatggagtttcgctcttgtcgcccatgctggagtgcaatggcgcgatcttggctcactgcaacctctgcctcccaggttcaagcaattctcctgcctcagcctcccaagtagctgggattacaggcatgcaccaccacgcctagctaattttttctatttttagtagagactgggtttctccatgttggtcaggctggtcttgaactcctgacctcaggtgatccacccacctcagcctcccaaagtgctgggattacaggcgtgagccaccgcgcccggttaagagaaactaaatcttgaagaaaaacatgtgaaaggtcaataccccactctgctggactagcttaggtgtccctgaaagagttgttattaaggtcgtggagtcaaatgcattcctccccattctgtggcccagtttctcactgaagttagaaaaaatgatcactcctagtgaagggatcgcagctccagctgtcaaagcagcatggcgagttgggttctttccatgcctgacattttgccctgctggagaatgtcttggaaggatagagggtcagggctggaagggaccttagagttcatctcagttgactccctcattttaaagatgagggagcttgagttcctgcaagggcaagtactctttccaaggccgccgagtgagtggcagagctggggctaagagcttcctgatgttcaacccatccctttgggctggcgccaagctaaaaaggaaagaggaaagagtttcccataggagcagagcagagtgagtgtgtctctgtttgtggttttaggtggtgtgtgctcattgccttaatttcttcagacccttctaaaaacatttaagagaaagtctcctcttagagcaagaaggtgaattcttttacactttcccgtgtttgtttctcctccttttcaataacgacaacaggcctcaggctgagttttcagctgaaaacaatatctggatagaatttttaaaagttagatgatattcattacatttatttttacttctgtttacaaagtaacactagtattctttgaaagatggcattactcagtttcattgtaaaagaattatttaaaataaatgagtaaatatatatttagcgtattattaaaataataggggtggtaagcagatattgtgaaaattgtcaagggttaaagcaaatgactgcagttggggaactggctctgcactgcagtttctcaggtcggcgatagtgtgttggactcccctcagtctctcaacctctgggatttgtgtaacttctccacctttgggataaagtgctctccaaaatggcaaaatttgccgaggctcctagtatctgcatttctgaatgtaaaaattctgagatgtttgtcatctcaggcaaacatggtggaggagccttgtttgccagtagaactcaccttttccacagcagggatcccttcgtgcactcctccccacaaagcaaacaaaacattgatttttgaacccaggaaaacattacccagaaagcagttgacttgggcagcagggaacaaatctttccctccctctgcactactccctcccaccaccctgtcccaggaagtcatttctctcttgcaggcc

SEQ ID NO: 1241628 - DNA, 4001 bp, Homo sapiens
tagtaagaagttagtgtggtcttttttcacatggtttatacataatctcatcatcaattatttgggaaaaaatctattctctcatccctaattttaaaagctagtttctatatttaataattctgtttctgaacagtttattgtgttttgatatgccaataatatactgttttacttattatcattttactgtttttttttttaagagtcatggtctcacagtgttgcctcggctgactcagaactccggggttcaaggaatcctcccacggcctatcaagtagctgggcctacaggtgcactacactgtacctgtacttattatcattttataaaacattttgatatctcataaagcaatctacactcattcctcttcttattcaaatgttcactgcggagacaaacacaaagtagattatagggtgcccgggacaggtggtagaaatggggattaacagtaaatggaagaaagagagacagaggagagagagacagagagaaagagagacagagagagagagagacagggaagcagtgagggagggagggagggagaacacagaataaatagtgttgaaacatgatcactcagtgtttctgaagtttttgcctggtaatctcacacagcagaaacgcctctggcctacctgtggaatgcaggcttcttggtttttcctcagttctcactaattgaaatttctgtggatgaatccagaaatttgcattttaaacaaatttaaaggtgattcttagctcactaaagttgaacaaggaatttcttaatatgcattaaaatgaacttgtgaaaaagaaaacatcctaaaacagtagggaaaacgtttggccctttcagcaaatgttcttggaagaagaatgggatgaattgcttcctccttttggctattgtgaatcatgttgctatgaacatgggtgcacaaatacctgttcaagtccctgcttttcttccctgcttttaaacttgcttggaaggtttattgtaacttagaattgcagactgagaaaggccttggaggggttgtctatctagtctctcctcctaaaatgcaagttctgagccccagatcagaactctatatttaaccacacacataagaagtttatagtaaaaagaaaagattggaatgagttatgggcttgtaggtgaaccaatatgtttcagaaggattattaagtggtattttaaatttttaaatttaagtttaagattaaaatttaaatttaaaactgatttaaattaaattaatttttaaaaagatttgtttgaacaccttatataataaagcatcaataaatcatgatcatataataattatatagcctcaatcacagaaggaaaaactaaattaaatcttttaaattggcaataattataataacttacaaactcaatgctgataagagtgtgatgagatgtttctgcagaaagaaattgttataatttttttgaaaaatttgagaaatacaataaaaagaatagctgatacttttctctagcatttcaatagctagaattctaagttgcaataatttatattgaaagacaaacagcaaattttacttaaaagggaaaaaaattgaaattttaaaatataaatatccaaaaatgtgggaaagggaaaggttaaaatgagtctgatgtgtttatagaaatgacaatacacattgcaataataattattattataagagctaatatttattgagacagtattttatattcatagaattgtatattcttagaatgggctatttttcagaatttacaaatatattaatcaataaagttttagatcatctgagaaacaaggagaatagaaaaaaagcattaaaaactttagagatatgaaatattttgtgatataatattatagtactaggactctctggttgacagtgagaaaaattccaaacaaattaccttaaatgcaagaggcactatgttgactcacagaagttggaagtccaagaggtagagcaggagaaagaaatcaaattcttgactagactcttgtttttactctctcccactctactctcctttgtacactaactttattctcatgtaggggcctctccatgtaatgacagagtcaatcactgccccctttgtagccttatatttaggatcacagtaggaagtgccattctctgccaccttcactcaacatggaaaataacttttctgattggctgtgcttctgtcacatgaataaatccagggatgtggggcactctgattggctacctgaaacacatgtcctctttgagaagtaaaggcaaaactacacaattaaaacccaacagaattccaattgtcgatagaagggctgttccctattacacaaaaaaggaatggagaccaaatccgaaagtaataaacgtgctttgctgtttagctgggggaaaatcaaaacactccatctacagcatgttcccaattaacagaaatatagattacaagggaaagaaaagaaaaaatgtaataataataagttgttatttctgaatgatatatttctggttaattttttattctaatctttaaaattgtcaattttacaaattcaaaaaaataacaaaatatcattgaagaagtcaagttttaagatctggattggccatgttcttaaatattaagtgataattttccagactcccacatgtttatatcagtaaactcatttttcatcagcatcaggaaaatctgtgccttagtttgagtggttgagaaaagacagattataaatcttcaatcctcagaattagactaacctttgtgaataaatcccagggtatctcttagttaaatccagtagaaaaatataggttttaaccagctttaaattaaattttcacaaacattttgaggcaatatttatgtctcaaacctttacacccatgattgaactgagaatggtatcaggatgggaaaatctggaggaaaaatgttatccttgtgagtaaataagagaatcaacaagttcactggtatatcacacctttggcccaattcaagacgtttcctcccttagggccactgtaaaaacttgagtgtcagagcttaaagcagcacacagactagacatacagaaaacaagtgtttctaaataattgaaaatcaaccttcggagcataaatagagtaattttcatatctgattttacaaaaatgaagtcaaaccaggtctgggttcacagaaatctcttcagaactgaccgcacgtttttgcaaatttattttactcatatcttatttagctttttaaatgtacaattctgcaaaattttaaaaggacttaggtagatatttactatttttcatgtaatgctagtgtgagtctagaaggtatagactgagatgtggcctctggttttgtttgatttcctaagttggtatttctcagggatcagaaatagcaagaaaattgaaatatggaatatatgaggattggctctctcctagatttgacactggaaaaggaagtaaacctggtgaaacagtaggttctatattaagaaaaaaataacatacatcccagttttcatgtcatgcacacacatacacacacagtctacaatttatgatgaactagaaatcaaagtaatattttaaaaacaatattaaggatattgaattaaaatatgcagaatatttttcacagtttttgagtaaataaaagatgttcttattaaaaaaagacaaaagcaccatcacaaagaaaattactgaaagacttgattacacacacataaactgaatcgcatactatatacatgagtgcacagaaaatttcaccataaacaaaaagcaaaataagaatctctaaatacaccaaatataagattcaaagaccataaacagcttaaaaaacactttctaaacatgtgcagtgtgaatgagcttctcaaactcaggtgtaaataaaatgttaatttcttctctaaatccaacatatctgtaccaaaaccccaactatt

SEQ ID NO: 1241629 - DNA, 4001 bp, Homo sapiens
ggccaagcacagtggctcacgcctgtaatcccagcactttgggaggccgaggcaggtggatcacctgaagtcaaaagtttaagaccagcctggccaacatggtgaaaccccatctctactaaaaatataaaaattagctgggcatggtggcaggcacctgtaatcccagctaatcaggaggctgaggcaggagaatcacttgaacccaggaggcagaggttgcagtgagctgagaccgtgccattgcactccagcctaggcgacagagccagactccgtctcaaaaaaaaagaaaaagaaaaagaaaaaagaaaatacaatcctaaaaatataaaaacaaaaaatgaatcgtccatttcttttttaactacttcctgtgatatggtgagagtggagccaagagaaggtagtgaaccagaaagagaagatcacatattagccacttgggacacattttatctaagggaaatagggctgatgaatgatggtatggtctcagcttgtatactttccttccacagaaggaaatatacttttcttctgcagaaactcagaatcaggccaagcatggtgtctcacacctgtaatcccagcactttgggaggccgaggtgggtggatcacctgaggccaggagttcaagaccagcctggccaacgtggcaaaactccgtctctactaaaaataaaagaaaattagctgggtgtggtggtgcacgcctgtaaccccagctacttgggaagctgaggcatgataattgcttgaacccaggaggttgcagtgagccaagatcgtgccactgcactccagcctgggcgacagagtgagactccatctgaaaaaaaagaaactcagaatcatagatctgatatggactttgaaaaattacttaatgtttgttcagtcccaacatttttcaaaagaggtacctgatattcagtaaaattaaatgacttgtcgaaagttccatctttagttattggtctcctgattccccatgtaaagttcttgctcccacattaaataacttttgtgttagacatggtaatcatatagcctgtattttctgccaataccaatttcatatactttgttaaatacctgagtaaatgtgactttgtaaggtttctttgtgggattattattattattattattattattattattattattattattttgagacagggtctggctctgtctccaggttggagtgcagtggcagatcagggctcgctgcagcctggaactcctgggctcaagcgatcttcccacctcagcctctggagtagctgggactacaggcgagcaccaccacgcctggctattttttatttttatttttattttttgtagagacaaggcctctctgtgttacccaggctggtctggaactcctggactcaaacgatcctccttccttggcctcccaaagtgctgggattacaggcgggagtcactgcaccgggacttttcgtaggatgtgtgtgtgtgtgtaaccgctgagggatacaaacttcgtaagatttacgataaaaaatgtactgaataaacagctcaacgcaaacgcatcccacagtgccacgagcttcgttgtcctatttgttcgatcgtgatacactaactttcaccagcaagtgagtctaaaaaaccactgaaaaggccccgttctatatgcccaggtttgtttaagggcagcaacaatgtcatcccctgaattgaccagatgagcccaacataaaaaaggcagtgaacagggtgattaaggcgaccctgagggcaaaattcccctgctttccagaggcgatggggcctcagccgtctcaagcttctcagttctttttctggctacactccctacccgcttggccgctgtgattccagaaagcctcagatctcaggaaatcatccagttctcctcacgaagagctggacatggcgggaaagtaaacagctggcttggcaccgggtgaggaaagaggctgggcgcagccgaggcggtgtgagaggtgtgggcggggcctggcggtatgctaaatcagtgggcgtggctccgtggcgtgcgcggggcgtgggcggggcccgcagaggctgtcactgggctaggagcggctcgcggtggcgggagaggggtgtaggagacttttcccagcagcccaggaaaattcacctcacttaaaagattggggacaaataaacactgtaacctaatcccatacatgttactgtggaaacaaaaaggtgaaaataaaacctaattaatgttccaataaacgatgagaacgcaatataaattgtggtcataaagtgggcgaaaacttttgcttaatattctaaaatgaaatgaaaataatgggtgctttgaaagaatagcgtaaaatcggaaacaggaaaatttaaaaatgatgcggacaaagaacagtgtgatattaattgagaactaacaaatttcaattaaaaaaagtcaacctttattcagaaatttttggccaggggcggtggctcacgcctgtaatcccagcaccttgggaggccgaggcgggcggatcacttgaggtcaggagttatagaccagactggccaacatggcgaaaccccgcttctactaaaaatacaaaaattagccgagtgtggcgacacgcacctgtaatctcagctactgaggaggctgaggcaggagaatcgtttgaacccggaaggcggaggttgcagtgagccgagatcgcgccactgcacttcagcctgggagacagagagagactccgtctttaaaaaaaaaaaaaaattagccgggtgtggtggcgggtgcccgtagtcccagctacttagggaggctgaggcaggtgtatcacttaatcccacggggtcgaggctgcagttagctgtgttcacgccactgcactccaacctggttgagggagcaagacactgcctcaaacaaaaaaaaaaaaaaaagagagagacagaataagattggcatcagatttctccacagaagcattctagataacaatgaaacaacattttccagattttcacggaaactatgatcccagaaatttatatccccttatattgtgttcaggtataaaggccactggcaaaaagcatgcaaatgagcttttcctgaggaatccacttagagtagtagttctcaaactttttggtctcaggcttcctttacaaaattattgaagaccctccaaagagcttttgtttatgtaaattgcatctaccaatatttaccaaattagcaattaaaagtgagaaattttaaaatatttattatttgaaatttttaaatattatttgaaaacaataataaaccccattaaatgtgtgtttgtttgttgttgttgtttggggtttttttgctttttgttgttgttgttgttgttttttgaagcagagtctcactctgtcgccagggctggagtgcagtggcgccatctcggctcactgcaacctccgcctcctgggttcaagcgattctcctgcctcagcctcctgagtagctgggattacaggcgcctgccattacgcccagctaattttttctatttttagtagagacggggtttcaccgtgttggccaggctgctctcgaactcctgacatcatgatccacctgccttggtctcccaaagtgctgggattacaggtgtgagccaccgcgcctggccaaaatgttaatataaataatctatggaaaatatgttttccaaaacaagaaaaatttagtgagaagagtggcatcgtttttacatttttgtaatctcttgctatgtagcttaatagaaagctggtggagtcctatatttgcttctgcattaacttttgcagtacgctgttttggttggagtgtgtgaagaacatttggattcactcaaatatgtggggaaagagaatggtatttaaatggccttttcagataattgtgaacatttctctttgatatcacataaaaattcaggaagtctgagttaaaagttgattgca

SEQ ID NO: 1241630 - DNA, 4001 bp, Homo sapiens
tgcctggggcagaaccacagaggaagcagggaccaggagtggagcctggagggcaggagagatggaacatctttccaaaaaagaccaggctacatctgaatctgctgtggatgggggcaaatcacaagactactttttaaacatctggacccaaggaaacaattttaatctcttttaaaaaacaaagaggccgggcgtggtggctcatgcaggtaatcttagcactttgggaggctgaggtgggtggatcacttgaggtcaggagttccagaccagcctgaccaacatggagaaaccccatctctaccaaaaatacaaaattagccgagcgcggtggcgcatgcctgtaatcccagctactcgggaggctgaggcaggagaatcgcttgaacccgggaggtggaggttgcggtgagcggagatcgcaccattgcactccagcctgggcaacaagagcaaaactccgtctcaaaacaaacaaacacaaaggaagataaccaagaagacagaggagcatcccaaatttccatcaatatagcttcctacctggtccccaatttaggaccaataatacctgggacagagggtgtggtgagggggccaggagcaatctctctcaatagggggtcaaattctgaaagctgcagcatctgaaaaagaaagggcagggaatgaataagggtttagggacacagagtctcacaattcctgtttcctttgtacaccagcccctttcctgccttccttacatcatcttcaaccttgtcttccaacagctgctccagtgcctgctgtcttggatgagtattctgcaataatacagataaaaacggtttccagctagacccctagaacaaagccctccctctaagccctggtcccttaacattcacagaaggaaaatcagtacccggagctcccagaatgctgaactatgcccatagttcagcagcacgggggtcctcaaacttacttgagttaggctgggctccccagccctggtgcataagtccatcaagactagaggagcatctcacctgcaatagcaggctgagctctgtccgaagcagcagtacttccagtgtgactgtagcaacctggtgctcatctggctcctcctgcccttcggggaagctcaacccatctggttgctcctctgtgtagccatataatcgcagcacatctcggcccccctgccacacattcaaacgagtcaccacccaggaggtttcctgcctagtagggctggaccccttcccattcagcacaacctcaggccttttctagccaaaccccagccccctctcccataaggccaggggattcacctgcacagcatccaccgtgctgcgaaagacagggttattaaacttgacaccacgccagtaccgaggccgctgagggctgagaaggttgcggccgtatttctccaggatgttcagagccgtggacagggtgttgaggtagtttcggggctgggagcaaggagagcagagaggtgtgagcgtggcctgggcctcaggccctggtgtcccccttccaagcggggccgggcctcacctccccatgagcgttgcagcggacaaggcgtgcggcgtccagctgcaggtagcgggcggctagcggcagagagctggctagtagcggccggagctgctccagggaaaacgcctgcccggaatccctcctcagggcgctcgccagctcctcgcgggccaccaggaaggcccgctcctcttcctcccccggcatcctgaggcaggagtcagccccagcctcgccgcccgccaggacccggcgcgggcagcgcgcggcccgagcgccgcccctcccgtctggtgcccggctttgaggcccaccccggcccacgcagccgccccaggtcactcagaccacggtcactctccagcccccggcccagcgccagggttagccgagaacaggaagtactaggagagagggtgggactgcgacccaatttcggaggaacgggcggggcttaaggttaaggttggagcggtgtcaggaaaccagggggcgcggccaagagggagggccaggtcccaaccaatgagaaggcaaatggctcctggctcctccctcagagcgcgccagcatcttccctcagtcaagcgctcttccccgccttcccccaatctggttccaccccttccggatagccgcaggcgcggggttatcctattcagctcaaaacctttctttttctagctggaccagtccggtacgctccgggcctcaccgaggaagtcccaccctgcaggggaaccgactctggccggccctaacccctctcgagcgagtcccgccccatctccggtctgtcctgaaggcagagggaagaccctcacccaacccctgcccgctctcttctaagagctgctagtccttctccaccccaggcgctccctctggctgcccctcccactcgctctgatctctctccgtccgctacttgcggtcgagccttcttgggggagccccgccactgaataccccctttgccatactcccacctctcttaccccaaccctggacttccagttggccctagctataagccccgcccctctccgagggacagcccccgctccagtctccgcggtcccacttaccctagcccctccctcgggcagcccctggactgtgacccagccagcaccgcctctcctagtggcaactggctgggaatggctgaggggctacctactgcttgcggcctgccagcgggaggaggggggcggaaagaagaaagggggcggggttgaggggggcgggcctggacctggggagtgaaagcgaaagcccgggcgactagccgggagaccagagatctagcgactgaagcagcatggccaagccgtgtggggtgcgcctgagcggggaagcccgcaaacaggtaatggggaatcggaggccaggaaggggtcatagaaccctcttgggtggaggccaagctgggtggttcaggggaccaagcagtgccagagaactcccccaatctcgctagtgccttcacttctcggggattcccagattcctgccttctgactgcagtgagcaggagcttccagggaaagctagtttgtggtgagaaaggcctgagccacagttcgagggcaccctgttgtgggtggaagcttttgacaacccagacccttaaccaacatccgggtactgctctctgtgtaggtggaggtcttcagacagaatcttttccaggaggtaagtctctggatttgagcgatttgacccagaatcttggaccaatacttgaggataacagcctctcagaatgacccccccaagtcaccctagacttaaccctacttcccttaccaagccttcacccaaagtaaccccggaattattgatagctacctttaatctgacctttcttatgactctcccgacttctggcacttctcccgtcttttgatgtggaggaaaaaaaccatggcttccaaagcaggaatatcacagtcctaaccttcgttctgccatttaccagcttgggcaagtcctttcattttcaggtcttcagtttcctcatttgcaagtcttggacccagtgatttccaaaggcccttccagttccatttgtcagacatctcattgagcatattctgtgattcccctcccttgcaatgtaacccacaggctgaggaattcctctacagattcttgccacagaaaatcatatacctgaatcagctcttgcaagtgagtagtgtgggccccttctgccccatcctatgtcctctatcccctttgcccaccctctctagctaacaactggattcagcatgcagagaatagtttcaaatagtggattaggaacattaggatggcgtgaggcatgagcctaggttgggaggcagagtgcaagtgggatgtatggagggaaggctgtgacctaggatgaagggaagaggttgggcagcccttgacagtgagctctgtgcaggaggactccctcaatg

SEQ ID NO: 1241631 - DNA, 4001 bp, Homo sapiens
ggctgaggcaggagaatcacttgaacccgggaggcagaggttgcagtgagctgagatcacgccactgcactccagcctaggtgacaaagcaagaatctgtctcaaaaaaaaatactgctatgaacattctggtaatgtctcctggtatatatgggcaagagttaatttctgcaaatttttaactcccgaccaggtgatccacctgcctcggcctcccaaggtgctgggattacaggcgtgagccactatgcccaggcaatttctgccaattttatactcaaaagtagagttacacgttcaactttactagataatggcaaatattttccaaagtggttgcatcatttatacacttatgggcagtgcataaagtgccctatcctcaaaaaataattttatagaagtgaagtcaagtgaaaatagaatcaacggtagccatgattgggattgagggatgggaaagtggagcaaaattacaaaaatacctttttttgttgttttagagatagggtactgctatgttgcccagactgatcttggactcccgggctcaagtgatcctcccacctcagcctcgagtagctggtgcaggtgtgagccaccaagcctggccaaagttagaaaaatatggttttttgggggaggggggtggtatggagtctcgctctgtcgcctaggctggagtgcagtggtgcgatctcggctcactgcaagctccacttcctgagttcacaccattctcttgcctcagcctcctgagtagctgggactacaggcgcccgccacaacgcccagctaatttttttgtatttttagtagagacggggtttcaccatgttagccaggatggtctcgatctcctgacttcgtgatctgcccgtctcggcctcccaaaatgctgggattacaggcatgagccactgcgcccagccctaaagatatcttaaataatgtgtggaagaagctctggtagggctgagccctttcatcttaaattgaacacttctgcttagtgacagtgaagggctaagggctaatcacaaggatagatgagtgaaacccactagttgttcttggcttttgttgtgctgtttgtggtggtagtatttagctttacctcctaaacccacacagtaatacttttactgtaagaatttaagactaagtctgggcacggtggctcacgcctgtaatccagcacgttgggagaccgaggcaggcggatcacttgaggtcaggagttcgagatcagcctggccaacatggtgaaaccccatctgtactaaaaataccaaattagccaagcgtggtggtggccacctgtagtcccagctactcaggagtctgaggtaggagaactgcttgaacccgggaggcataggttgcagtgagccaagattgggccactgcactccagcctgggggacgagagagagtgaaactccatctcaaaaaaaagaaaaaaaaaaagaacttaagaataaaatgtgagaagagggccaggcacagtggctcacacctgtaataccagccctttgggagcccgaggagggcagatcccttgaggtcaggaatttgagaccagcctggccatcatggtgaaaacttgtctctactaaaaatcccaaaactagccaggcatggtggtgcacgcctgtaatccctgctacttgggaggctaagacaggagaattgcttgaacccaggagtcggaggctgcagtgagctgagattgtgccactgtgctccagcctgggtgacagagcgagactccatctcaaaaaaaaaaaaaaaaaagtgagaagactgaagaaaagagctgaaagtaaatcagtctctgtgaaggccagcaagatgttccacagtgagagttcttttaattctaaaaggtgtccatcctcaggcgtagaagttaccttttgaggctggtagcaccagaggtatagcatctatgtctctaactggcaagtctcctgatgtagggtccaccagatgtgacatgatctctgttcccaagctgtaagagatcccagaggacactgaaataaaggaaaagtccagtcagttacatgcaactttaggatgtcttctgaaacgtgtacataagttgtagcaggaatttctcagcactttcatgatggtatatgacatgtcagagtcattctcatggtagtgtggacaactctacactaaagagtaacaacaagtattcagtaggaatgacttgatccaaaatgaaaatcagtttttatgattatggaattgatggatatcatttcggatcatttttttaagtgtctgctcagcctggaagccgatgaccatcccttttctctgcgaaataggcctctatccctctctccactcaatttacagggactgactccccaggaatcagtttatagcctacaatccagtccccgaagccattgctgattggaccagggttaatcgaatgacccaagacaaatgaccctcgctgaaccaatcagattctatctcctaggaggttgaaaataaaactgagaagtttaaattagcctctggggatggctagaactactatgtaaacttgggagctctgaaatgaccatattcagctctgtggcctgaataatcaggaaatcctgtctatagagttgcctcatactctggccaacactttttttcctggatgatagtatccagtctagccgggattacaggcacccactactgcacccggctaatttttgtatttttggtagagatagggttttgccatgttggcaaaactggtcttggactcctgactttaggtgatctgcccgcctcggcctcccaaagtgttgggattacaggcgtgagccaccacacctggcctctttctctttttttcatctctttcttttcttctttttcttttctttccttccttccttccttcctctctttctttcctcttttttttttcttttggcagggtcttattctgtcccccaggctggagtacaatggcacaaccacgtttcactgcagcctccacctaggcttaagcgaccttccagcctctgcctcccaaagtgctaggattaaaggcatgagccaccgtgccaggcccagtctcctgactttaaatactatgtatgtatatgcttttgtctccaaaatttttgtctccagcttcagatttgtacaattttgttttctgttttttgctttgtcatccaggctggagtgcagtggtgtaatctcagctcaccacaacctccacctgctgggttcaagcaattctcctgcctcagcctcccaagtagctgagattacaggcatgtgccaccatgcctggctaatatttgtaattttagtagagatggggtttcactgtgttgctcaggctggtcttgaactcctggcctcaggtgatctgcctgcctcagcctcccaaagtgctgggattacaggcatcagaccgcagccagcccaatttcttatttttttaaacatttctcttggcatggctactagatatctcaaattcacttttccccaacaggaattttgatttatcttaccagtctcatcttttcccagtctttccctaggtccataaatgccactaccgtcctaccaatcctgcagctttgattcctccctttccctcacccattagcatgttctccaggttcttcctttaaaacatgtatcagccaggtgcagtggctcatgcctgtaaccccggcactttgggaggttgaggcgggcggatcgcccgaggtcaggagttcaagaccagcctggccaacatggtgaaaccctgtctccactaaaaatacaaaaaattagccgggcgtggtggcgggtgcctttaatcgcagctactcaggaggctgaggcaggagaattgcttgaacctggaaggcggaggttgcagtgagctgaaattgtgccattgcactccagcctgggcaacaagagcaaaactgtctaaaaaacaaacacagacaaaaacaacatatatt

SEQ ID NO: 1241632 - DNA, 4001 bp, Homo sapiens
ggccatggttgtactagaagctaaggggttgctgattttattgtgttttgtattgcctttctcttttgattattattattatttagaggttgaattttcgtttttgaaagtgtggtaaaacgcaaacatgaaaaacgtcttaaaatagcaacatagcttaaatatatacaaataggaaatatcttatagcaagggcctaaaataaatatccagccagatacaatatgttaagactgacatagcatttctttaaataaatgaaaattaaatagtagtgtttcttactatttcttttgttgttttcattaaatgtgttgactttgaaaaagaaccgttagtctaaaaacactgaaggcactgttagcaggattgagattcaaaaggctaagtcaattgtaaagaacaagaattttttttaatgcagtacaaactcaggaattttagcttatgtagtttcaaaaataaaacaaaaagcacctgtgtcatcaacgtaactctaattcagggcaagcacctacaattgcaaactctctttagggtccttttatagcacagataaccgatttagtgtcattttctctcttcttttggttctactggagcccagatacaagtaatatgaactctgttgtcacctatgacctttctatgatgaaaaaaagattagactgttatctcttgactgtgagacaatgtaaagttcgtctggaaaagcctttcagagtgatactcaattgtcctaaggctgataatcagacgtgtaaggtaattctaaaaacaatgtacagaaatttatagaaaaacataaggcaaccaagtttagaaataaattacttccaaagaggctgtgggtgaaatatcactaatgcctactattattttcatcgctactgtttagtttatattctataaacaaattttttcactcaaatctattttttattcaaggaatgatagctgcataacttatgactttactacaaacaaaactttcaacatattgctctatactctcctaaatttaaagtgtttgcttaaaacagctttctctataaattgtatagttttactgaagcaaggaaggtaacatttgccattaaaactgaataaatagaaaaaaattctctagtagtctatattctaaaacattggatatttaaaaaatattaaaacttaataaggagttattttttgccagtaaacagaatttattagtaagcataagtcagaccagcatggcccaaggagacagtactgccaaaaccttcatgagtgcagaacccgccacttgtccaaggggccatgactgggaacgtacttgactccacaaccatcagggatgaggcacttcttggccaccatgtcttcaaattcgtcagcattaaacttcgtgaagccccacttcttggagatatgaatcttctggcgtccagggaacttgaacttggccctgcgcaaggcttcaatcacatgctcctcgttctgaagcttggtgcggatggacatgatgacttgaccaatgtggacccgggctacagtaccctggggttttccaaaggcacctcgcatacctgtctggagcctgtcagccccagcacaggacaacatcttgttgatgcggatgacatggaagggatggagccgcactcgcatgtgaaagccatctctgccacaacttttcaccatgtatttgttggcacaaatacgggcggcctccagggcttcagaagacagctgctcatattcatcagacaccatgtggccaccgagtgggaactcatccacttttgccttctttctacccaggtcaaagatgcggatcttggcatcaggaacccctcggcagaaacgagattttgggtacggcttgttcttacaataccggtaacagcgagctggacggcgccccatggcgacacagtaacgtcggcggtgcctcgaagtcaaaatgcgctctcttaactacgcctgcgcgcatttatatacgttgcccctcgtccctcgcgggaaccatagagtcctgaggccggaaccatagagtcctgaggaggatgtgacgactctctttcaggacgtcccaaccagagacgcagggacgtctggcgcctcagcgcctgcgccaagtggcgcgcttaaggtgagcagagtcagctgtgggtagactccccctggcggccagggaaggaattgggccccgccccaactgcacagctgctgcttcctttctgctagccatcttgggctaggaactcttgctttcagctttgctttaagtataaaagaggttatttccaggcaggagaatctcttgagctcaggagttcgaggccagcctgggcaatatagtgaaatgctgtctctacaaaaaaaaaaatatatatatatcaaatagctgggcatggtggcacatgcttgtagtcccagctactcaggaggctgaggtgggaggatcgcctgggccctgcaggcagaaactgcagtgagctgagatagcaccactgcactccagcttgagtgacagagggagaccctgtctaaagaaaaagaaaaaaagaaatcctagaatttgagaggaaaaatccttccagttattcaacatgctgtttccagtttggtcagttcattttccagagcttgtatctcactgtcagcatttgtagatcaattgctgtttcttgggttatgtggccaccttccctggataaagtggtttcttggcatgagtgctttgatgagactcaggaagagatgagaggaagagaagagagagggataaagagaagatatctgttgtatctgtagcttggcaattgttttataaacatgaaactttgttttttctttatttggcctaaagaaatgattttattatcaaaatgatatatacaaaattgaaacaccaactagattttttttaacttaaggctatttgcattttcaaatgttaaagctgctgaaactatataaaagagtaacagtttgtgttttagtaatcttttgcccctgagaataaatttaaactttttttcttctcagagtttgtaaaaatattatgacagggatcagagtgtaggaaaggaggaagaagagagaggaaaagaaattaatagtttacaaaccctacttgcatttttctagttttcttttttgttttaatgttgtttcacaaatccattacatcatggaacaaaatccccccaatgtgaatatattctgtcaatactctttgttttaagggagaaaaataactcctgcccttaaagtgagtggatttttacaaaatactaaagataaaacaattaaatctcccaatgtagaaaactttctgacctttaagaaagctttctcacttcccttttcttccttcatttcttctttcccctttttctcaactagttcctgtttaacatattgagataaagtagctaataccatgttgctctcaccaagcttacaagcctaggagaggatatagatacttctcatatatcatcatattaccaagtgtaaaatgtgccaaaaaggaaaagcaaagtaagccctgagactgtgggatgaggctggggatgagaccttgatccagactgaggaatagacaggaaaatctttatcagaaaagaaatttcatgtagtgaccatggcacatggggtctgatgtataaaaggcctgaagcaggcagaaatatggaacattttaaggaacttaaagtcaggccaatgtgactgtgagtgagaaaatgagtcacataacatgagcccagagtgtgtgtatgtgtgagagagaaggggtcatgctttcatacagggcccattttaccaagttagggatcctgatctttaatgtgaggccattaaagagctttacttaggtttcatcactctggttatggtatggtgaatagactgaaaccagcccaaaaaaggtatgcaaggagatcagaaaggaagacttcgcaatactgcagaaaacacactataacttgaacatactttaaaatatt

SEQ ID NO: 1241633 - DNA, 4001 bp, Homo sapiens
agtttgcgtaagaatatcactgtatttattttccctcgggtaacttttctatggcttcaccattttctcttcaaaattgaagaaaaatatcccaaagtttagaactggatcacttggccctttctcttcttatctcctcccagttcaaaatgcttgcatctcttaatggccagcatcctcttggatctgcagttaggctcaacacattccagccttagcacaatcttctttgtggtcttagccttcttccggaaaattggctttgtctgcccaccatagccactctgcttccgatcatagcgcctccttccctgggcatacaaagaatccttgcccttcttatactgtgtcactttgtgaggctgatgcttgccacacttcttacagaaggttcttcgggttttaggtacgttgaccatctttgcagcagggctgttttgtctatatgatgaaaactgtagtaaaatatttaaaataagatagcagacgttaaacattccgaaaagtgaaagtgctatacaagtatatacaggaaaaccgtacacataaatgagtaatatataaatccaccacgtactctttttccatatgaataaacgcacatacaagtacatacctttttgaaacacttcgtttaaattactggaggactaatttgtcgacctaaagaactgaggcaaggccgagcacggtggctcatgcttgtaatcccagcactttgggaggccgagaagggcggatcacctgaggtccggagttcgagaccagcctgaccaacatggagaaaccccgtctctactaaaaatacaaaattagcctggcgtggtggtggtgcatacctgtaaggagaatcgcttgggcggggtggggaggggcggaggttgccgtgagccgagatcgcaccattgcactccagcctgggcaacaacagcggaattacgtctcaaaaaaaaaaaagaactgaggcacaattcatataagtagaatgtttatttggggcaagtttgaggattgcaacccagagcacagattcaaaatgccctgagtagcagcagttgcaagtgggtttttagaggaaaaaatggcagttcctaaattgtctaccaagaatttacattaaaataacacaagcgattgattggctatacatcattcttttcatgacaaattccaggaacgcggacataatgggtgaagcagctagtcaggaataaaatgccaggcattaagtggggaggtgtctgaagtcccatactgctgtctctctgggcccggcaaattttgcacatctcaaataattaacaatgctccgagccattcttcttttctcatatagaacaagactcacgaaaaccgacagcagcagctttaggaggcccaatacagtccgttttccgtacgaaatgagtttaatttattgtgactgctccaaaagaaaagtgcggttcatctaattttcttccgaaaaggaagttaaggaccagagtttctttgacccccttccccccacccacctcctccattttccagctctagagaatggctggggcagcgcgcgacgttgtagctacggttacgacccgccccgttccttctacgagaaccacatcagcgtagtatcacttttcccctccgaagcacagtcacccgtcagcagcctcgagggctgacgtgtccttatcaagccggcgcgccccgcgattctatagccgccatgcctgagacctttttcctgaagggagaagcctgctctcgaactaaggccggcgagggccataggtctcgccttccctttcctaagaaggcctagtcctacccaggattctgagcaagggaggctcctattggagccgctacagcctcgttcttagcttaccgagaaacagcgcccgacacctggcccttcgcagctctcgcctttcgcagctctcgcctaacaggaaagggaagaaacaggcggaagtgggaactgcacctgagcgacagtactgcaaaccaataggcagccggccacggcggtcaggcgccttcggtcgcgtctggaaagcaccaaccaacggtctaaggggcgggccggaggggtgtgggccggagggccgcggtgtgccgcggggcagttgcgggttgtcataacggtccccgccggagtgaggcgaggccgcgtcgctcagttctggccgtctagggcccctgtaaggatgagagcgcagaggacgcagggccgctggaggcgcaggtaacgaagctagggtgcggttgggaccgcggctgagctttttccgggacccgtggtgctgaatggagaggacggagacgaagccgagccgcggctcctagcggcggcgccgatgctcgagctgtagctgccaggcgaggatgtgtggagcgcaggcggcgcggggtaaatgagaggtctcgggccccaggacccccggggcccgggatgagttagcgagggcagccgcgggggccagttccgaccgtgacaggccaaggcgacggccgccgcccgcccgccccttccgtgcagaagcagctgctcctttccgcgcccgcccgcctgcgctcccggccctggagaccatgaggttccgcatctacaaacggaaggtgctaatcctgacgctcgtggtggccgcctgcggcttcgtcctctggagcagcaatgggcgacaaaggaagaacgaggccctcgccccaccgttgctggacgccgaacccgcgcggggtgccggcggccgcggtggggaccacccctctgtggctgtgggcatccgcagggtctccaacgtgtcggcggcttccctggtcccggcggtcccccagcccgaggcggacaacctgacgctgcggtaccggtccctggtgtaccagctgaactttgatcagaccctgaggaatgtagataaggctggcacctgggccccccgggagctggtgctggtggtccaggtgcataaccggcccgaatacctcagactgctgctggactcacttcgaaaagcccagggaattgacaacgtcctcgtcatctttagccatgacttctggtcgaccgagatcaatcagctgatcgccggggtgaatttctgtccggttctgcaggtgttctttcctttcagcattcagttgtaccctaacgagtttccaggtagtgaccctagagattgtcccagagacctgccgaagaatgccgctttgaaattggggtgcatcaatgctgagtatcccgactccttcggccattatagagaggccaaattctcccagaccaaacatcactggtggtggaagctgcattttgtgtgggaaagagtgaaaattcttcgagattatgctggccttatacttttcctagaagaggatcactacttagccccagacttttaccatgtcttcaaaaagatgtggaaactgaagcagcaagagtgccctgaatgtgatgttctctccctggggacctatagtgccagtcgcagtttctatggcatggctgacaaggtagatgtgaaaacttggaaatccacagagcacaatatgggtctagccttgacccggaatgcctatcagaagctgatcgagtgcacagacactttctgtacttatgatgattataactgggactggactcttcaatacttgactgtatcttgtcttccaaaattctggaaagtgctggttcctcaaattcctaggatctttcatgctggagactgtggtatgcatcacaagaaaacctgtagaccatccactcagagtgcccaaattgagtcactcttaaataataacaaacaatacatgtttccagaaactctaactatcagtgaaaagtttactgtggtagccatttccccacctagaaaaaatggagggtggggagatattagggaccatgaactctgtaaaagttatagaagactgcagtgaaaatcacagttacaaaagcgacagtcttctatttttgatatttgtccaaacaggacatacaattgaataaaaga

SEQ ID NO: 1241634 - DNA, 4001 bp, Homo sapiens
cctgagtttaaacgtactttctctgtccctgctgcactgcagtattcatattaacaatttacaacagacagggcgccgtggatcacgcctgtaatcccagcactctgaggggtcaaggcaggcccatctcctgaggtcaggacctcaagaccagcttggccaacatggtgaaatcccatctccacaaaataataaaaataggccgggcgtggtggcagacgcctgtaatcccaggtactagggaggctgagacaggagaatcgcttgaatccgggagggggaggctagtgagctgagatcacgccactgcactccagcctgggaaacagagggagacccaatttcaaaacaaaaaaaaaaatttacatcattatagaacagtactatccaatacaaaataattgatcagaaagctggtgatttttatctcaaagagccaataataaattcgttttcaccttaaaaaaaaaaacccaaactactatttaaaagattttcagaagccaaaagtttcacagtcaaaagtttcatataaacactagcttgactaagatgatcaagagatagaagcactaaatggcagaccattgtttgctgaatcttaacaatgtctttccggccccaaactttaagttcattccagtgtatgacgctttcaaacattttgggttggccgggcgcggtggctcacgcctgtaatctcagcactttgggaggccgaagcaggcggatcacgaggtcagcagttcgagaccagcctgaccaacatggtaaaaccccgtctctactaaaaataaaaaaattagccggacatggtggcaggcgcctgtaatcccagctattcaggaggctgaggcaggagaatcgcttgaaccggggaggcggaggttgcactgagcggagatcacgccatcgcactccaggttgggtgagtgcgactccgactcaaaaaaaaaaaaaaaaaaacttggggtcagcggttaatacatatatttggttagaaaatatctaggtacagccgcgcgtggtggcaagagcctttagtcccagctactcgggacgccaaggcaagaggatcgcctgagaccaggaggagttcgaggctgcagtgagccgtaacaacgccactgcacttcaacctgggcgacagagggagaccctatctctaaaaaaaaaaaaaagagaataggtacttacaagattgataaatgaaacaaatgtaaaacaattttagtggcttctctaaagtgaatttcaccaaacacaatacacggcacctaaaactggctaagctatctaggtaaaaaagggagtaggaaagactaagtccttcaccttctccattctattaatttgattgcccaaaccatcaacactgtcaccagctaccaactaaaaaaagaggaaaagctcttggtcgaatgctcagaattaccactccagggaagatctgtccgtttgtctttcgcggaaaaaataacccccacaaccttctctgcccaaacaacatggagtacgcctgcagacgcctaccttaatgaaaccgatatccttcgcgtactgacggaaacactggcggcacatattgaggccatatttccggatcagaccgtgccggtttgaacagacacgactgtaagaaaagagacagcggttttgcaggtcatagaaattacaagactccgcactcagacggctactacccgcatcccgggactcccaagccacagtacaggcctgtaatggcggcaccagcgactcccagtcggcgtgctccctcgtgccgcccgtggcctcctctacttgagattttaagcagcctagcgctccacggcaacgcttccccaaaatcacaaactatttctcaccaagagcgagaaccctggccgaattttcgcgggtggctccagtacagctgctggtgacccatcttgctctcagcagtgcaacgaggtaaaaggaagaagctggcccacgcatgcgctcttcaaatttttgagacagtttacccagaatgcagtgctcaaaggaaacgcgtgcgcagtgtggtcaggttgtttcgctgggtgagtaaaatgaaatcttagaggcgttgtgggctggcccagttgatgacgtcaccataccacagcttctagtgctattctgcgccggtatccgaccgccgggcgcggtggcgcgtgcctgtagtcccagctactcgggaggctgaggctggaggatcgcttgagtccaggagttctgggctgtagtgcgctatgccgatcgggtgtccgcactaagttcggcatcaatatggtgacctcccgggagcgggggaccaccaggttgcctaaggaggggtgaaccggcccaggtcggaaacggagcaggtcaaaactcccgtgctgatcagtagtgggatcgcgcctgtgaatagccactgcactccagcctgggcaacatagcgagaccccgtctcttttgaacaataaatacgttaattttggactctcaagagatgaatattctcatagtcttttttattgattaaaccttttactttcttttaattaaaacgttacacttgggaaaggagtttttcctcgactcaccagtgacacctactggaataaatttacaaaacaacttaaaatcagctgtaatgatcacgagtcaacggtagggtttgcttttattttgttaaagagagtacgttttcaaatttatttttttgacacactcctccaagaaatacacctacaccattccaaaaaaaaatgagattctttggcatttagtgtatttgattcttaaatgtaattggctgaatgtaaagtaataaacaagtaatgtgcagtgtatgttgctttgaccagataatttggtgacaaaacaagtaatgaaaagcaaatgcaaaaatgcaaaaaaccaatgtcaataaacgaatttctgctgaaagatacctacattccatatggtcatttataatgcctccagataaaactgctctgaaatcaaagctttaactagatttataaaatgtagcacagggtgcaacaattccagaaacttttacatataaacttttataaattgaaatacaacacttctttaaggtatgttatgtcagggttctagtggggtccccctacccaatcattaagttaggcattgtattatatgattaaggaaggaggggagtcagagatttgtaaactagatataacttgctccttgccctcaaaattttctaatctgtgggaaacaggattatctccaagacttcaacatacaacgtttgtgcaccaacaacatatgtacagctaaggaaaatattctgtattaaatcatgggtgtgctcatgaagtacgaaaggagccaagaagagaaattaattccagttcgaggtacatttgagagacctttgaggtagaccttgaagaatgggatttctacaggcagcacttgacagaagggaatgcctggtgaaaggaagcgcttgagccaaggtaaggtgaacaactttgtgtaactagaatagaagatggacaaaaggcctagtgataggaatgaaaaggtattttattttaaagcctcattgggcaagatccaatgtcaagcttttacaactttcctataatttatatcagtcactaatgtgtggtttccaaaagccatttgcctctcaaaagctaatctaacatttgtccacactttcttaggcctcttctagttggtctccacaatatttaaaacattacagtggttctgagatcaattccattaatatttttagtactctgatatataagcctttgggcctaaagaagtgaattcatttaggagagaaaaaaagacaaatgagaagcaattagttgcacttcaacaatcttaatctgaatacttaagtaattcttaatacttattctagtctatacattattctctttgatagagatattgcaaaagtgcagctaagacgtcgtacttcctttcagttttaagataatgtgacacca

SEQ ID NO: 1241635 - DNA, 4001 bp, Homo sapiens
actgagtaaaccatgtcagggtcttttgaaaatatcagttgtctatgaaattgagagaagaaaaaccaaatcacctgaattcatacaggttatgttaggaactcaaaaatatggaacagctggctcaagatgtataacagattcacaatgaccaaaaaaacaatgtttacaaatgttgaattaagaagcatgaatttgacatctctcttgaattaagtcaccacactggcacccaatggaatgcttataggcaatctcagtagaaataacaaaaactgaaagaactgacggacagagctaactttccaatctgttcaaaacagaaacaagatgtactagtggacacctgaatcctgccgtttaagcttttgtgccttcacaattaaataataacccggccgggcacggtggctcacgcctgtaatcccagcactttgggaggccgaggcgggcggatcacttgaggtcgggagttcgcgaccagcctgaccaacgtggagaggaccgccccccccaccccgcccccacaaaaaatacaaaattagccgggcatggtggcgcatgcctgtaatcctagctactccggaggctgaggcaggagaatcgcttgaacccgggaggcggaggctgcggtgagccgagatcatgccactgcactccagcctgagcaacaagagcgaaactctgtctgaaaaaaaaaaaaaaaaatcccaatatgccaaagcagctctgtcaaaaaccttcaacgctcacaaacatatctagtaataacgaacgactcattaaaatgtactatctgttcagagaaaaaagtattaatatatctacaatacgagactgggctccaagaatataaatccaaattgtactgattggtctgaataagcattttccaaaatgaacaacctgaacctacaccacgaatacatttaattagttataaagcttaggacaacgctagtgatctcaaacattagaacgtaagcgctgaagcctgctcgttagttccttttacctggagctttaaatttctaaagccatcatctccagggacctctgaaggaaattcaaggccaagtatagtatttcatgataagtgagaataaaggcactcaatccctggagccggcgattcctgttcctgtctctagactggactcggtaaaagcccgaggcgaaacctcccgtttatctcctacaggaccccagcaccttaggggatggctccacagagccccaccgggaccccccatcgcggggaccagaggggcggaggagggagacactctccaaaacaaagcgccgctcgccccacgcggaggcaggcgcacctttcgccctgacaggacgcagacacacgtgtgtcacctgtgcgggaagggggagcagcgacatcctcggaggtgcgtgccacgggcagcggtcggcggctgcgctggccccgatgcctggtgcccgccgctcattcccgggctggggaaaactttcggccgcctcccccaaggcgcgcccccacctcccgggacccccggggcacgcgccccgaccgcgacgccccgccccaggcccgcccctccgcgcccacggctgcggccccgcgcccccagccccgcgcgggcacccgcgtgccctcaggcgcgcccccgcgccgggcccggccggcagagggcggggtcgctcaccagtccgcagctcgtgcttgacagtgaggagctgctctcctccgtcgccgccgtccgcgctggtccccgcggcgccgccgctgctgccaccctcctcctccatcttctcctttttttccgatcccgcgggtcgctacgaggggaacccaggagacagcggacgcccgtcccctcgcagccgctgccgcggccccaggagtcggggtgcggcggctccagaactcggacgcaaagacgagtctctttcccgctctggccgcacggctcgctcctcgcctcctcccccttcggcgggcaccgctagtaccgcgcaaccaaaccgccccctgctccaccgccgcctcctcaggccgctccgcccacagccagcaaggtaagggagccattcgagccgccttcgctgattggacacagggcgcgcgcgtctgccaacgccggttcccattgggcagtacgctgtgacgtttcacgagcctccccgcctcgctcctcgaattgttgttgcttggcggggaggcaggagagggaggagcgccgccactccgattggtgagacccaaagctctgccccgcccatttcctctggtgcgcactcgcagtcaagaccttcccttccctgacctccccagaacggtcacaccccttattccccagcttcgatctgttagtaaacagtgtctagtagtcaggaggcgctcggggtctctgattggctactgccgaaagaggcggggagggatgattggaacgtttggtccgccaatcaccgtggacagaggaggggcctggagggtagcgcttatcacccacgtgtttgcagacaaacctaagggtcccggcagcgatccatgcgtgtgtgacaaccagcgagacggcgtgccctaaaaaggtcttactcgctctagtgaaccctaaacaagttaagcagagtgtttgttcttaaataacagatagttcttaaacgttacaaaaattcacagtcccagctcccgatgaggaattttacgaaggagagacatttctgtttcgtacaagactcttactaggcgccgaaaggatgcagagattaacaaaatagaatacaattcctcccctaagcagctttcaatagaacgtgagaaacaatctgtgtgtgtacacaaaagaactataaagcagaatttgaaataaagcagtcgtacaaagcgttagagaatctcgcacggatggcaataattattcccagacgaggaactggggaaagcttttagggcaaggaggcatttgagataaccaacgtaaaggatggataagagagaaataccagcaatagacattccacacagagagagtaactgtgagcattggcctacagcagagaaggcaagggtgggttaagtgattgataaggttagatgaaagtatgatgtaagagatacagctgacaaggtgaggtgtggtaagataatggggaactagggatgctgtgctgaagagtgcagattttttttagtacacagtgatgaactgaaaagaggagagagatagcagggcaggaatcctgctgcaaggatagaactaaagggaacctgatttctagtagcagacacgagaatgggaaaaagcagaaacttaaagatgtacagttggacgtaattcagatagatgtgatcttttaaactaagcatggattggatcaggagtcagcacacttttttctattaagggccagatagtaaatattttaggatttgcaagctgtatgacctttttcacaactactcagctctgccattgtagcgcaaaagcagtcatagacaataaataaaagaagtagctgtgttccaatagaatattttttatggacattgaaatttgaatttcacatagttttcatgtatcgtaatatattcttcttttaattatttttgaatcacttaaaaatataaaaacaggtcaggcgcagtggttcacacctgtaagcccagcactgtgggaggctgaggcagatggatcacctgaggtcaggagttcaagaccagcctggccaacatggcaaaaccctgaatctactaaaaatacaaaaaattagccaggcatggtggtgggcgcctgtaatcccagctactcaggaagctgaggcaggagaattgcttgaatctggcaggcggaggttgcagtaagccgagatcacaccattgcacttcagcctgggcaacagagcgagactctgtctaaaaaaaaaaaaatatatatatatatatatatatatatatatatatatatatatatatatatataaacaatccttagctcaagggcagttaaaaaacaggcaat

SEQ ID NO: 1241636 - DNA, 4001 bp, Homo sapiens
ccagagggcaggaagggcccagtgcccacctcaaggcctggccaccagggcccacaggcgtctcaaaatggcctcagcaccagcctctcccctgacatggaagttcctcatgctgccctggagggacctcccctctcgcctctaggccttgaatgttctttctggaactctagccagttcttcagctggataacgcacctaccattctccagtgctcagattagagatctaacatctagaaaatgctctaggccggcccagtctgacctcagtttccctctttcctctcttcacttccccactaatcctcttcctacctgagactataatggtccaaatcaactcatcagtctccccccactagaatgcaaactcccagagggcaggagcccagcccagctccaggaacagtcaggtgtagtgggccaagtacacagcctgtgaagtgaaaccccaattgtgccatttgatagctgtggagccttgagcaagctactgaactgccccatgcctcagcttcctcatctggaacatgagaatgtaaaaaatggttcctgtgtgcttggaacaacatacaacaacatatatagtaatttctattactgtgacactcaaatgaatgaatctacatgaagcccttagaatagtacctggcatgtagaaactgcttaataagtgccagctatcattgtcttttatggaggccctgcaggccagcatagtgccgtgctcactcagtacaaatggacaggggacaagacagatgggtgacaggaagagccctgcactggcccttccccacccaccccagccctgcccagccccggtcctcaccgtgtatgccacggagcagcacgtccacgccattctgatagtggttgaaggccgcctcatagtcctcactaacatcgcgctccagggccagccggatctgcgtggccgcatccaccagatagtcacgttttgtcatgtcaggcactcccagagccaccctgttgcgaatctgctccaggtacacgtgagcttgggaccgtgctcgtgagcaaggctcaggctccaggccggggctgggcaggcactcacaggccaccaggctcatggctgccctgcagctgggacctggaatgggcaaatgcattagggaggacctagctggtagcaacacccctatccgcaccccagtttcctccactgaatgtcagggagactcatattcacctccaaagactgaaggggtcagagctaaagtgggtaaggtcttttcatggatccaggtccttcctaagtggtggtaatgatagaatcataaccagctcaggattctgttttcttttcttttttttttttttttttgagtcagagtctcgctatgtcacccaggctggattgcagtggtgcgatctcggctcactgcaacctccacttcccaggttcaagcaattctcctgcctcagcatcccaagtagctgggattacaggcacttgcctaccacacctggctatgttttgtatttgtagtagagacggggttttaccatgttggccaggctggtcttgaactcctgacctcaagtgatccgtctgcctcggcctcccacagtgctgggattatagacgtgagccaccgcgcaggcctggggctctgttttcctttccagtcaaattcagttcagcaaacatttctggagcatctggtactgtgttgagctctggagagagctgaggatatctgtgatccacagccaccttcacagggcctccgtagagcaagcttggtatccagtacgcattcagcacatggaggccacacacgctgggctcaaatgctgttcctcatgctgttccctccaccctgcctgttgtctcctccctgctcctcctgtgggaatctcatttaccctttggggtttagcacttctccgtggaccggatggattgcccctgctgtgttttgttcccttggtcctgaggtcagtgtggtcagcgagtgaggacccctcctggagccagcagagagcagagcacagagctgggctgtaagaactgttggcagacggaatgactgagtggcagactcggtgccacgttggatggggggtagaagagggcagggtgacccagccccagggagggtcgctctgtcctcctggctttacttttgagaaggtcatgtggcctccaaggacctgacagcagcttcttcctgagcaatgtgtgacccaggcggccaaagggatgacagccgtggctgcgggaagggaaggggctcagagagaggcccacaaagctaccccgcctttgctctcccaggtcccactgggaatgggcaggacccggaacttccaaccccaggtcatttggagagaaagaggagagagcaggatgggcggtggggcggggagggagacccacagcctcagccggcggggagctgaatcccggccaggatgcggccaggaggcagagggaggccgcaccatccctgctcggccaagcccaggggaacttgaggctctgaggccttgctctggggggtgcccgggtaggactggcttcagggtccaccccgccgggcagggtcctgccgggcagagccgccggccccgcctggacacagaaagcggcgcgtgcaacccacggggccccagccgcaaggtgcacggtcccagggtggagggacggccgagggggcccctcgcctgggagggtggagaagggaccggacaaaacaccgtacctgcccgagctgggagccgggtccgcgggccaggcctccccctcacgtaccggcccttcacgccagagcgcgccgcgggccgctgctttccggcatccagcgtgcggggccagccggtgcagcgcggccattggctgcggatgagctcatacttgagccttagaataaaccaccaatcaccgcccggctcggctcctgccggccttaaagccgcaaggtctgcacggctgggctgtgaggggcggggggcggtttagagaggggagggtgggatgggatgtggggtgggtggggagagcaggtctagaatcatccagggatgcggaaggggctgcttcagaaatctagacgtgccacttctaggacttttctcattcattgcttcattcatttattcaacgattcaatgctatgtattgagagtctcccatgcatgaggagctggatgttgagatacagccgtgaactagacagcgctgtttacatccgcatggggcttacagtctagtgagggctaccgagagtaaagaacccagcaatagaaggcttttgatatcagaaccgagcttaaaattcaagacataggccgggtgcggtggctcatgcctgtaatctctgcattatggaaggctgaggcgggaggatcatttgaacctaggagttcaagaccagcctgggcaacataggtagacccaatctctataaaaattacaaaatttagctgggcatggtggcgtgtgcctgtggtcccagttactcaggaggctgaggtgggaggatggagtgagctcgggaggttgaggctgcagcgagccgagatcgtgtcactgcactccagcctgggtgatggggcaacagatcacaggcaaccctgtgacacagatctcacctgcaggttcagtgctgactggcttcacactgtcccccggctgcacttgctctaccttagacaccctttcatactttctccctctgactcccacccgtccccctatcctcactctcagccagcactgttgcttcatccttcccttgacagcagtggcgcacagactcccacaggcttgctcttggcccgcgggcggggctgtgcccacactctgcttccaacctttttccacaggtgactgtctgtgccccatcgaaggccacccttccaggtgggcatcagtcccgtgccatcacctactcagcgacaccactccagcgattctcccgtctctcccactagataattcccacctgatacaaacataatgcttgt

SEQ ID NO: 1241637 - DNA, 4001 bp, Homo sapiens
tatgtagtcctgtctgttggtcagcatgtcctgcaggtcccagtattcctcctgtagcctggctctttcttgcatcctggcacccacaggttcccaaggcgcggtggagggacactcgtaaaaggtctcgctgtgatcactgtctccagcctgctgaagctcagagggctctgattcagaaagatcatcggatccgtctgagcttggctggtcggaagtctcatcatctgcttccttcgggttaaacacgtcggccaggtctgagtatgggtgtggcagtccgggtagcaggctcatgccgtgcctctctagggcaatgcatggcgggggcgggcggaagcagttcttcaggcagtagggagagtggaaggtgcagcggcctttgatccagtcgacttcgggggcgtggactcggagccagcggatgcctaggaccacagagaagttcggtgaaggtacgatgtcaaattcgatggactcctggtggttctggtggatacacaccaggggctccgtgtagagccagacaggctcgttgccaatcagcgagccgtccacggattggaccggctgtgggtacggcttctcgtagagctcgacgtagtgctcttgggcgaacttctcatccatgaagttgccgtcagctcccgaatccaccagggcctggaccgcgacgctgtggtaggggttcactctcaccatgagcagcaggaagaggtgggcgcgattgatgtccggatggacttcgctgggcaaccagctgctgaccatccacctctctggagcaggtgagtcgatccaggtcaggttccgggggcgggcctcggggggcagcctgagcatagctcttctctctgccagcttctcttctatttgcaggatgagcacaatcagactgtctagggaatccggctgagggacccggaatagatagtgcctgatctcctcgttgagcccctggcacaagtgggcctgcaggacttcatctggccagcccaagatgggtaccaggctctggaactcatcgatgtactcagtggcagagcggccgccctgcctgatggtgaacatggcctcttctgccacacgcagtgcctggcggtactcaaacacttcggacatggcctccaggaaggctgggaagtctccgatcagggggctgttttcctgcagtagagctttggcccattctaatgccaagccggacaggtgattgatgacatagccaactctcagacggtcgttatagaacattcttgggtagctctgtaaggtcagttggcagagtacgatgaactcgtggaattctctgcgatcgccagagaagtgctttggggcgggcagttggcctgcattgatccctttgatcaagatctcttctgctactctctgttgctctttgaggtcttgcattcggaagtacagcgagatgatggacctcaccatggccataagttctgcggttgagtgctcggtctggttttgctcttgaggagtctcctcccttcccgattccttcaggtcagtgtgagcctcttgttcttctcgggctcccgatgggttgactgatgcttctttcatcctatcagatgctccactgagtggatccccccttgcctggtgtgaaccgttgcatgactcctccaggtcttggagtaggtcattgggtggatcctctatttccttacgtgggccactggatggctcctccatgtcttggagtagatcagtgggcagctcttccatttcctggagtgggccactggggggctccttcttttcctgggctgggccgctggctggccctgcctctccccgcactccactgcccgacgtcgcctcggtggtgttggatgagccctcggaggactccatttgttttgatgatggattcttatgctccatcatcgtctcaaatgagtcttcagagggttctatcatttcgtcggatggaaaggagtgtattctgaagattggtaaggttgtgatggcgtccagtcagtagctgggaccgtggagatcagaacctggtggtggaaggggagtgtggggagtaaaggcagtagtttaggatcttgtgaagtggcagtatcagggtctcaaggacaaatcagatgcccaactaatcagagcagagagaaatgggggaaagccttcttgtatcgagccagcctctttggctggtcacttggggtgcccccagggagggaagatctgtcaacccctgacctgcctcccaggcttattcagtctgcctgtcctgtccttttcctccatagatgtgagaaattcacagcccataaattctgtggctgggagcagccaccgtggcaggcgggtacctggcagggtgcacaggctgctccattcccccctggcacatgcacctggtcaatcctcttttcctgctttggtcacctgagaatcacagaggtcacatctcagcaccatccaaagccacccctggcaggctcagggctctggagcaagcccagccaccttggttgtggagcgggaatctctagcaaagatgcctactgtttcaccagtgcagtggaagaggagaaaatgggcacttggccactgtcccgtcagttgggtcagcagcccaaaatagttcttatttccttccccatgttcaaaatagaaatttcagggggtgtgtacaggtctgggttttttttttttttttccataaattttataacatacctactatgtgctggataactgcatatttgttacttgattctaactcagacttttggccaatttctctttctcgatttggtctccttccaatgctatgttctcccgacctctgagctgttgaggagatcttcaaataatctccttctcttcctacaatctccactctcccaggactgccctctttgtgaggcttctggaacttcacacatctggcctcaatttcaccagtgcaagcatatctgcacgcctctccaatcttatcctcccaggtccccttcttaacgccagtgggtctggtctcctctttctagcaaatatctttttctctctgttgctggttgagccctcccaacagacatgtatctggcagagttgggacattgagtgtgggggttggggggaacatgtgacatctttggaatctgacggtcccagagtggatttttggaaatctagtgttgggtggttttagtgggctgagacagaattgaaagggaatgtcttggttggggttatttgcacatttcttctctgctggggcagagcaaattaagctttgattatctgatagattaactgtaaagctactgctctttataaatttaacaccttttgttacttctgagttttcttctaagccactggacccatccgtaaaaaaaaaaaaaaaaactgcgttcccccttacgtgaaactcattggctaaaatccaagctttccaacaggatacaaaattcagatctgctgtttctcaaaattaagtacacccttgttagcatgacacttaaatttgatcatgcagtctctctgattaaagccttccactgtttatttactgtctgcaatattaaatccaaaccttctagcgtaaacatatctgacatgtaaactcaccaaaactattctctggttaaaatgtaagggccttaatataatataaaattcttattttgtcattcctcaaggtagagatcacatttttttaaagcacagtatacaaatcagcatggtataggaattataagaatcatcatcatcatcatcatgatgtacatagcacattgcagaaattaactcatttcctctccataaaagtcctctgagatatgcattattactgtaaaattccaaacctctaatataaaattctaattgaaatacaaataaataattctaattgaaatacaaaaactaagtaattcatctgcagacttatctatcaggaataaaaatctcagcatgtctctcacttaaaactctttattggtgaaaatttaaatttcttagca

SEQ ID NO: 1241638 - DNA, 4001 bp, Homo sapiens
caaagaatggtaaagacaaaaactaccttcctttgtctattatcatttgccatcttcttttgcaattataaagagttttgttttcacttggatgcagaagttgaaagagagactgagcagccattcttagatttaaatcctcccccactcctagggatataataattaatatataacctttggcgtttggcgttggggcttttgagtacttttctttctttctttttcttttttcttatatagggtctccactttttctcttcctttcaggatattgacaatttttattcaacgcattctccaaacctcttttccccagctcagatcttctgtaccagggcagttaattacgattaccttagacattccacataacccttaagagaagcttacgaaaaggggtttctttaaatcaaccaccaagagcacacacaccagtcccactccccttcccctcctctgggagcaccccccaccccaggccttctagctctacattgccaaaactacacaactcccactccaccatagcaaagctttctcaggaaagagcaccacacagcatcccctttcctctccctggaaacagcgttaaccaggccggcagcctcaaagcgcgcttcctggatcctttgaccaggatgcgccaggggcctgggctcccgctggacactggcgcgctcagactttgaatagggcgtcaggcgaagaatggccaaacccagggcaatttccggggtgggggggggggggcgcttagactgctggtaaactgtaccacgtccactcaccaccacccaagccctccaacccacagccaggcccgccgcacttaggacttgaagtttcaatgctccctgcaaggtggggccatccgggcagcggcgaaatacaggttttgggcgggggcagccacagcacccaaccctcttgcaaagctgtgcctcccgaattagggacaaactccctgggatttgttttctgcgggagaaaaggcggagggatgtggggggagtaaggtgtggtggcgattcgtggagggcaagggtaaggggcagttacagccacatctctgccctggacagagccgggtccaggggccgcgggcctgcccgccgctcggttgtcagcatctcctgtagccggcgcgcacactgcgcgcaaacacgccccccaaaatccccacaacctgtcaaacgggccctacagctcggagcctcctggcaggagggagaaacttgtacccagactcgccagcagccagaatgctgctgtttgcctatgagaacaatttttaaagcggaaataatcatgataatgaaataaaaggatcaaaagcatcttgactttttctgagcctttgggaaaaataaaattgttgttttctaccagcccgcgaatattcccagtcgcccgtggcgacgcgggggtggggtcggcgctcaaggcagaaagcgcgaggcaggtgcccaggagagccgcgcagaaggggactgactggggggccctggtccccgacgccatttgaggggcagcggcgcccgccttacctgtggatgcagtttccatggcaacgggcgactgccgggcggggcccgagccggcttcccgcgacgccgcttcccgggccctggcgcccaaccccgggctgggctccccagcctgcggcgccggcgtggcccctttcggcgtcaccgcttcgttctccccctccccccggtgcctgagccactgggacccggggccggccagcggcagcagctcgtcctgcggatcccccggcgcggccatggctggcggtcccccggcgcggcgacggcggcttggctgggcagaggctcggtggctgcgcgggcgctccctgctgctgtccccggagggactcggcgctcagggaagctgcggtgtctcagcgtcgccgccgcctctgctgcaactccgccgagccgctgcctgccgctcttcccgcttcagctcctccttctcccccctcctcttcctccggccccgccgcggccgctgcctgcgctcctcctcctactccactcgctgctgccgccgctgcttcgctattcccaatcctgttattacgcaggtgaaaatggcctgcttggtccgggtcctcctgggcacgtcagcccccaacctgcaaatggcaggccccggttaggggatgtgccaaatccactcgaatcttcctctcgtttggggaggaaaaaaaaggaagaaccagcaagtagcagcagccaccagcagcgtcgccttcccaactgagaaagttaagccccgactggtgtcctgggtcccgaggcaaagagggaaagctagagaactcagggccacagttctgagagtgaccagtatgagttgtggaggggacacaggtctgaacggggaaggggtggagatgggttctgatggcagatggagaccagggaagctgcaaccccgcggttaaatcctgcgtttccagaatgggcctgaaaatagtggagtaaagaaatgagttatcaggacagcctccaaaaaaagcttaacagatctcaccctgaccagccctgagggcaaacagggtgtcaataggcaaggacaaaagctgtacatttgctttcagaaacactgagccaaggccatcctaatcataagctgtctgtgcagtccgttgtatttcagaatttggacattccatgaagcttgcatctttttctttacagttcactgtgataaaatggaagatagtcagcaaataaacccaaactcagaggaggaaagtgacttgccttatcatatgttgtgcccatacgaagacccatcttttcaaatgtcttgtgttttattggttcccaagttgtttatataataaaataatgtgcctttaaaaactaagattcaccacaacacacagggtgaaggaataggtttttctgctgtttcttctctaggaaaggtgggcgcagacggtaccgcacacactgtgagactgtgggactcttggccaccatgcgcatcttgaggatttcatacctgtccattggtatattcaaaggccaacttcaggaccattcaggtgctcctcaataatgctaaaatgaaaaagcccagagtctgcctaatcttttgttctgctagtgcactaatgttcaaaagatgacaataaattagagaaaaatcattcactaaacaataaatatggcctcctgaagccagatatccctggaaatctgatggtcaccaaaattttacatttttgacatactcaaaattatgtctcatgatggaaatattcactatctagattgtggttatagcttcacaggtgcaaacatatgtcaaaacttattgtttactgtaaatatgaacaatttaatgtgttgtcagttataactcaataaatctataaaaataatctcatccaaaaacaacaaaataattggttatcatgaatcataatgatttttaaacatctttccatgggaaaacaagagtgtatttaaaaaaccgttaagttgaaaagcttattccactgctgtatttccatggagcttaatcctgtcttgtaattagagggcacttgtaagttttttcaaatctattacttagtattccctaaagcatcagaaatactagatgggaatttctcatggttttattactgataacaagacaagaacatagacaattctaatgatataaccttaaagtggttattgatgaatactaatatttgagaattgctatgcaaaggagttacatacaaaataatatgaagtatattcttttgtttctctgagaaacatgaatgaaagtcatcattaaaaaactgggagacctaagcaagcctctgtgtttccttatgattaatagataggaagtttggggatatgattctaattatttgtcaatttctttcatactaatcaatactctcattgagaatgtgtgaaggaaatagccagttaaatctatttagagtgtagttgttaaaggaaattgaacattat

SEQ ID NO: 1241639 - DNA, 4001 bp, Homo sapiens
tgaaatagattaagatatttaattcataagattttgtgaatatcttatacaaatagaaaagaaaacctgccatctttggatatctacttttgttaaaaatactagaaactcataatcatggtctaaaatccagtgtttatgtccaactaaatttgatcttataccaagccatagttgtttgtcaggtgtgtatatcaaataaactggatggatctaaacacagaacaagaataaaatgttacaaaatattttcacagctgccttctatattgaacatatgttcttccacgtaattgtcatcattcttcaaaacattgtgcctcaactggcatacatttcttatttactggcttttaaatttatcagctccatcgatttacttttgacaacggtatttccaacactcacataatttgaagtagacgactgtattttatgtcattgccacccaatccaacaaacaagaggcaaggtaagcaggcttttaattctgagatttatgtttactttttcttaaaatatataccgaagcaaaaccctacagaggcattaaagataaaaggacatcctatccttcctgtgatatagaattacaaggggaagatgccaggtttttacaaaatcagctgctgctccagagtattcttggtctcctgagggatgctgcaaaaccctgcaggttaaattaaacgcgccttcttcagaaccatctttgttaaatatgaaaagacactacctccgacaaacacccaagttactacacacaattcattcttgcaaattatctttctcctcatactctgtaactgcaaggtgaattttaatgtaacaaaggagagatggatgtgtgaagtgtgaggctgaataaaaatggctgaaaagcaatccaagcgaggctggagggtagccacacccagtgctaatatggactattccaaaataaatctgttataccaagggccacgggcactgtttcgttctttccctccatttatttcacagatacctattattaataaatagtagtcacaggttactccaatgacagaaaaaaaccccaaatatttcaaagtgaaccatcctaatatgtggctacgccatcatattttcaggatttcgagagctagtctgcatctccactctcctttgtgtgaccacaaataacaaccctgaaatgggtgtgtccctcttaaaaggatgcactccagccctctcagttaatggttctgccaggagatttcaacctttgggcagaaataaatgcactgggatgcatggaacaataagaaagcactttaactccggggatgagaaaacattaaacaagtactgaatgatgcacagatcccaaaagaactcccggaggaggcgattgatgcattatttaaaataccagcattacaacaagaaaacaaaggggtgggggtggggttaaaaaaaaaaagaaaaaaacaacaaccaagcaccatccattttgattcttgaaataagaggtttactaccccccaacacaaagctctggggtataaagcatgcacaggtcccacaggtgaaatgatgcacaatggacgagtccaggtcccgggtttcccgtgcgcctcaggcatgcactactgaaataaagagaataccctgacttttccagttgctccacacacagtccatcttggtggaatcggcagtggcctgcatcgtgcgggctttgggggctcgccgtggctctcctcgggggcgccgagcgtgcactcaagcgttggtgcccggctgctgcggctgggctcgcagtggccgcgcggctgcggagagactgaggctgcaccaggcggcgcgcggtgaggggcgggagcgtcgctggcgccgcagtctgcgcggccggcagcgaatcagcgcggcgcggccccggagccgcctgcgcgcatggggatgcgggcgccgctccacgcgacagcgttggctgggctgcccaagggtgctaccctggagacgggtaaagcggttctggccgcgaaggcgctgacgcggacagtgggtgggaggtttgggaggaggggaaaaagggctgacggtgggggtgagaggaggaggacttgggctgttcctgggagttcttgactcccagaatatgcgaggtgcatattctagaaatttctgagaaacccaagaaacctgctggacaagaccaagtcaacggcatcataaatgtcaggcttgcagcataatgttccctaattgttgccaccgtttacctttcacttctccctctaactcttaaaaatctgaactcgatgaattttaattgcccagaatcttctgaagaattgccagattctctccttttggaatattccacagatatccaaaacctttgttggcaagcaacaatcactggagagaaagcctactgctctgtcccagagggcttgtgtatttcttgggttacccctctctgtttgtgggttgaaggaatccatgtcagaatgcggtgcctgtagaccccagaccaaagcccttggactctggtacgtggagtcattggtcaatgcagtgacaatccaagggtgtcatttgtggggacgttcaaacagaactcagggaagcaaagggcattctgtctcaacagtgtcatctttgggattgaccactggggggcaatggaggtgggtggtgtgtatttgggagataagacttttggcttccaagcccaggtagttaaggatgtcaggagtccacagttaaaatgcaaatgtctaaggaaggaacagaacaatgggtggtgacctgctttttaaatcttaccataaactactttatcagaacatacatcaagaccctgaaggaatggatgggataaatgtattttgatgaagaaaaggtagaaataggaaagagaaaggactggaatgtgggcattgtctggaaaagaaggtactgttggaaggggtccctagaggagacaagacactgcatgaggacagagaatgccctggagaccacgggagcatacagaagagttcagagggagcaggaacaaactttccacttcatcttgtggcatggccttatccattacagggtctttttcatagagaagtggagccttcccgattcttctacagttgccagaggtgttctttcccagatcaaaatctacatttgcataccccacaccagcatgggcctaaggacagtaatctcaaggttatgcttgtagacatgatttatcatctttcattttaatgaagcatatacactttaaaatacgatctttgggatcatgtgtattcttttcagaatacaagcttgtggagaaaccagctgggcctctctgcgtatctttgtaacatatctgaaattattcttgataaagcttaatggggtgtcagagctcccacagggctgatgggaaggaacaacaatgaccacattattacaaagcacttttcacaatgacctactctaaggttattcttgattattttttctatttgtattccctacctttcctccctcctcccaatttttttcattgccacgtcatttttgggaattctgtcagttaaatactgaaaagactggtatatgatgatagcctgatcagcaccgacttctcactgcatgatatgaggacaagactgagaagaaaggagagggtaaggcaggggttgcctggtgggcttttgctgccctggctgcttttcagttggagggagatctttagagctgtggccactaggaggcactgccagtccaatgatagccccagttatcattccctaagtccagaaggtgccagcaggtacctttactgatgagtattgtgtccaccacattacgggaaacagcgtgtactgccaatctgacagtctgtatagtgtgtatggtgaatacacaatgttcccaataaggaacagggagaagcaagctctctttaaagtggaggatacattaggtcagactttctgggccaggcgttttcattgaccataaagttgaccttgggg

SEQ ID NO: 1241640 - DNA, 4001 bp, Homo sapiens
cgcctatagttccagctactcgggaggctgaggcaggagaatggcgtgaacctgggaggtggagcgggcagtgagccaagattgcaccactgcactccaacctgggcgacagagcgagactctctctcaaaaaaaaaaaaagaaaaaaagaaaaagaaaagaaaagaaaaaaaaagaaatgctgacgtttgccaagaggttcctgagttttggtcatactacagcacttgcaggcagtgtcactgcattcacatataatgataataacgatattcacacatattaagcacttatttatgctaggtatttttccaagggatttacacatattaactcatttagattttcacaacaacctaatgaggtagctagtatacacatctttatttcacagatgaggaaactgaagcatagagaggcaaaataaaccagccaaggtcacatagctaaccaagtggtggagctgggatttgtctaaaagtctggtttcagaacccttgtgcttaatcctatactatactgttgggtgtatcaactgtatgctaaacagttgcctgtctggagccaggacttccagactttcagtctgcacatatggagccataccactgacaagtatgtccaaaacttctttgatcctaagaattacctggacaattgcaaaatatatagattcccacaccctggctcagatgtactcacaatcaggcaagtttttaaaacccaggtttagtgggtttagtgagcactaccagccagccctgagcattaggaaattgaagtttttgtcctgattttgcttctgtctctcagactctgagcaatttcactcttcaattccctgcttgctctactgtctgcctgtcacttaacggaatgttacaagaatacatacaatttttccccctcataagggacacctgttgcttcaaaaacacggtatcctcataaaatgatatgcatgtagtaacaggtgtattttcttgcacttcttttgttttgttttgttttttgctttgctttccttgaagcacaaacctaagcccctcatccagacctagccttcagctgtcctccaggtgacacgcatacacaccccaaaccaggctgcattctgaccgaccttagctctctccctctgggagctctgatcggctctcagttcagcccaacaatgagaaacttttttctcgtctccctcaggggagccttcacgtttatccaattcattctcttgcaacccaactctccagaaagaaaaggggggaaaatcccaccccgaagagacggtcttcaggtctgaggacgttacttagcaacggcacaaagaccagtgagcaaagggagacctgaggagaaaactcttgggtggggagacagagccagtttgaaaactccatttcatccagagaaaaacaaggaaaacacaaacagaatcaatcccaagtaacaagcggggcttctccccagcgcaggtcatctcttactccctgcatctcaactccttcaaacccccagtgaccaagtccgcccccgcctggtttcgcccatggcccgagtgccctccccttgccctggcctgacccacacaggcttggacttaggggcccccacccctccccaggcacccaccgttctcagacgcgctgggaccttcgcagtccgagattaactgttggggtttccgctgctttcgccgagacattcccgggtagagagttgggagagggaggggcaacgctcacttggtcttaaccggggtgacctggtctcgtctcccccttgggtccgaagccaattgatgcctctcccccagcgcaaatcactgtgaagcagagatgttcttctttcccagagacacagactctctctctctctctgattctctgttcttgactctctctctttctctctcaatctttgcaagtctttaaaggggagacgccccctttttttcttcagcttcttccctacgcttctgcagctcccattgtaaaagcaaaaatcctaatctttccgcacactcttttcttttgtactgcagaggaaaggatttaaccctctcctccctgcaagggccctgggcctctccctgtgctgtctgttcagaaactgtccctggcttgtttttctaactcttcttccaagatcttcactgtgctttttggttctgtcatatttctatgcccctctgataatgtagctgcttttagggtataaactgaaataagaaccttctgatatgccctgattatgagtaatatatgtatagctctttataatttatagaatattttcatttataacgtgttttgaatgttataactctgagatgaacacagtaggctttactactcctatttatagctgagtccctttatagatgaatcaaaaggcccagtgaggttaagtaacttctccaaagttgcacagctgtgatgtatcagacacaggcctggaatccaggtgcatctgacagtagcctaacattgtttcctctatatcagtaaagacacaatatgccaccaaactgctatcatgaaaaacaaaagtgattgatctcaaggaatctcatttaaaatagcaatggctgggcacggtggctcacacctgtaatcccagcactttgggaggctaaggtgggcagatcatgaggtcaagagctggagaccatcctggccaacatggtgaaaccccatctctactaaaaccacaaaaattaggctgagcacggtggctcatgcttgtaatcccagcactttgggaggccaaggcgggcggatcacctgaggtcaggagttcgagaccagcctgaccaacatgttgaaaccccgtctctactaaaaatacaaaaattagctgggcgtagtggtgggcacctgtaatcccaactactccaaaggctgaggcaggagaatcacttgaacctgggaggcagcggtggcagtgagccgagatcgcgccattgcagtccagcctgtgtgacagagcaagactctgtctcaaaaataaaataaaataaaataaataaaaaggaatccctccatctccacaatacactgtttggcaacaaccaggtttctcctgcttagcctgtacactgagggtgattcatttatttttaacttctggctgtgatgttcctacctatatttgagtactactgagctactgggcatagaatattctggatatgccctgtcttctggcaataatgcctgggcccctttcttttagcatgatttctgttttattcttctggctgagatagcatctgaaacaccatcagttggaaaagtgggaagtattttccccttttaggattagtaatgtaaatctctgatggctttatcttcagagaaaagcaaaagaaagctcactcacaggtttgggtgcaaatttgaaggtttttgcatttcttcccttacacaatttcaagctagtttggcaataccaagaaaggaaaagggagacagcagatggcaggggtgctgctagtgataattgaagcaggtatccacattacatctgaagagttttggaaaatgctctcatctttgctttggagttcactgaatctccatttttttttccagtcctttggtgtcagggccctgggtggctttctcaagtctacccttggaactcttgttgctgacattatgtaattcatcctattaactcccctgtggtagacaggtgccattatttattactagaccattgtaggagaaataggggtactgagcctaggaaagcttctgattcctccgtggaatagactgagtcctgtcatcctctcaccccactgtttccatcatttatttccttccaggaagggaaaggagagaaggaaaatagctttctgcttttctcaggagtctgaaatctccaagggagcagatttcagggtccacatttgtcttttttcctgaatcttggctgtcttcatcttttcctatttttccccctccttcttgtgggtcttattgtgaaaggaa

SEQ ID NO: 1241641 - DNA, 4001 bp, Homo sapiens
tgctctggtactgggtgtgggttcatctgcacatgtgggtacttctcacgatgccggtggaaatgcactttgaggttgccacgggtggtaaaacggtttccacagacattgcacttatagggcctctcacccgtgtgggaacgaaggtggatctgcagggcactgtcactgccaaatactttggcacagaagcggcatttgtgccttccaccaggcttctccaagggacccatcacttctccgtagctcagctcaccacttccattctttggcttcaggagccctggggaggcagtggcctcaaggcctcgggctgccccaagacactgtgctgccagtagtcccgtggtgcttgggaatgccagatgaggcgaggcaatcagctgatctgtgctgcctggcaaggctggggaaggggcaggggtgggtttgtggcttcgcccaacccctccagcagagaaaggatgctgtgaccccagtgggtggtaaaggtggaagaaggcctgcttgggcgtttctgcccctgaagaggaagaggaggaggaggaggaagatgccagtgtcttgctggtttggacaggcttgatggggctgaagaggggtagtaggggcttggtggaagaggcagtccctgtcccaggtagctctgagggactggcaggggcacccaccgtctggcctaaggagccaagcaacagcacctgcctgcagatttgctcagtcatctgcatctgatggatctgccgctgctgcagcacccgtagctcttccaagatcagggggatattcaagtggccactgcctacccctgggggcggagggggtggtggaggaggagggggtgcaggggtcgattctggaggtaatggggttgctcccagcttgggactggccaagatcaggcccccgcctcccccagccgctgtacctgtggcagcgaccaggaaatgccctgaagactcctctcctctcctctctgggccccaggtgggatccgtgggcacggaggacccagaatctggggggttgctatgctctgtgtccatgacctgaggattattgtgaccctcaggccggggttcagaggaggccgaagagttgttggggttctcctggcccccaattatcaccattacaggagggtcagtagaacatgcgttctggtgggcgaggaattcagttgggtcagtgaattgtgcgcagcacttggcacagacttgggggtgatcctcctcgctagcatcacctggggagaagacaaggagagagagcgtgggtggcgcagttgggttgggtataccgaggctctaattaacaaggaggccagtaaccgctagttgggggtggggagatgagctcaccatcagggccatgcagaagtctagagctcaggcctgatccgtgtggacaggagacaacccggcatggggcaggggggtggggagggaggaggggaggggggcaagagcatgctactcccctcctcagccaccctcccttccccaggccacaagcgagttcacggaataggtgtggggacaggggcctacgcagagaatcatgcattttctcccacccaccgaaagtcttcgccgcccctgcgcatccccctccgcccccacccctgcccagcccgaccgaccctaccgcacctccgagctctgccggctccccgcagggcaccccgagacgagagctcctctcggattcgtgcgccatggttgtgggggaagtggagggccaggtggggtgggagacaatggatattgggattgagggaggcgatggccgctgggtctgcggcagcctctgcacccagcggcccagactgcggagatggagatcggcagcggcgggggcagggagcagcggcggagggggaggggagcgaggaggcggggagaagctggagtgagaaagcggggagaggggagatctgggaggagctgatgaggaggggagtttatggggaggagctgctggggagggaggcgggagctagaggaggcgggagaagggagcgctagcgggggcgtgggggcgggagctcagagctcgggagagtttccggaggcgcagtgacaggtgctgtgaagcactgcgggggtccacctttcccggtccctggccagctccccccatctgcagatgcctttgcccaggcctaccctcctccccccgccctcccctcctaagctctaggggcacagtgggaaacgtagccctgctcagtggagcaaggcgataggcttctcttatttttctttggataaaggatccgctgagcttggaaaaagtggattccagagagggtcgtctgatctcctcagaggtctgagggccagaagaagagggggagatcagaacatccactcctcaccagcacacacaccccaaaatattcgaagttttgtctcgtctttctcacttccattcccaccctacccccatccctctccacaaaagaagtttctcagggtgggcggctgcaaggtagaatttcccaggaagtcatttcaggactctctgcggaacactaagccccttcactccccgcccctcctccccctgaataatagctgaatgcaggttactccgcagatcgcccagcctacacaacacctaattcatagagtccatgcttatttaataagccatctcctatttagtaccctcttcctcctctattctcctcttgcaacattcctcacaccgtcactattaaagacagtgggtttggggagacgctagcctgcagaggcctacggaggcccacccagctctaacctgggggggaggggagccctcttgaaacaatgcggtaggaactaccaggcagccctcagtgtctaaagccctttcagccccagcctgatttgaatgcttagaaatagctaacacctgctcaccatcacagaggcagcctcctattcagacaggataagtaagaataaaatgcctcctggaccaggtattctggcattctcttttttaccttgaaatgagtcttaaagtgcttcccacttcctaaaatactttctcttacatgcaggaagtgaccacaagtccttggttttgtggtttccctgggcatcagtaaacctaaattgttttaatcccagttctattcttgcctcactgataaaactgagacatggtggtcagtcacaccatgttataccaccgtttccctcttcataaagtggtaatattgtagctgcagtattttactcagaaaaatattgtggggacaaaaaattgaaaaattggacaatattaatgtgtaaaccaggtatggtggtgcacacttgtagccccagctacttgggaggctgaggcaggagaattgctttagtccaggagtttgaggctgcagtgagctgtgatcacacctgtgaataaccactgccctccagcttcggcaacatagtgaggccccattactttaaaaaaaaaaaaaagccgggcgcggtggctcactgtaatcccagcactttgggaggtgggcagatcacgaggtcagaagttccagaccagcatggccaacatgttgaaaccccgtctctactaaaaatacaaaaattagctgggcatgatggtacacctttaatcccagctactggggcagctgagccaggagaatggcttgaacccaggaggtggaggttgcagggggctgagatcgtggcattgcactccagcctgggcaacaagagtgaaactgcgtctcaaaaaaaaaaaaaagtctaaaaaaattaatatgtacatgtgagatttttaaagtttggggagtcctgaatttaatcaatgagataatttacattgtcagtagcaaaataatcgaagtaaccttaaatacacatatactaaaattagatctgttttccatgttgtttgttaatcttattaatttctgaggtaagatattggctaatatcagcagcatatttcaaaggtaggaagtcttttattgcagtgggtgggggagctgaaacaaccta

SEQ ID NO: 1241642 - DNA, 4001 bp, Homo sapiens
agcgagattgtgtctcaaaaaaaaaaaaagaaaggaggtctatatactcttcttggtcttttattcaaggattgcagagaagtgtaatcactggaagaggaaaaacaaaccgatgtgaccctcccttcctctcccaaaatacaaatatacatcagtggcaaggccaaaattaaaatccaagttacctctaccacagtctaggactttttgatactccttccggtaaagaggtaagagctcaggccaagttagaaggaataagaagtagacggatgacagcatgtgatttcaaaacatcttatttttgtataccttgtattgagggaagcctagctggctaatccactctgcaacttcctctggatcccaattaagatgctcaaattgtaactcagtccctttttctggctgggtttcgtcatcttcagagacccgttccttcaactcttgggacaaatctacaacttccttttcatgaacgaactcacttaattctgtctgagactctgagggatctgagtatgagcattcttcactgacattaagcaatttttggagtggttgcaaaaactcataatgtgtaccaattgattcttcactttctctgagagatcctaatgcgtaatattcttttctaaatttgtcacttagtgacaactttcctcttttaggctcacggtgctctagctcatcgtttcctacagaatacttagactttattggttctggcctgtcttccttggaaaattctacatgtgtctcccttggtttggtttcatctggtaactctagaattttctcagttggctttgtttgtgttttctcttcaacttgtgggttgatctcctgtggtagcactggaccagtctcctctggtggctgtggattttttttctcatttgactttcttatctcttctggactttctggtttcatcatttctgattgttctagaattgtttcctcatttgtttttcttgattcttcctcaggaaactctaatttgatctcttctagtggctcaggaacgttctcatcagtagactttcttggcttgtggtctggaaagtctggtttagtccgctcaggtagttctgtccctttctcctcagttgcctttctttgcatctcctctggaacctctggttgagtctcttctggaggctctagacctgcctcctcactagactttcttggttccttctccagaaattccagtctagcctgctcgggtggctctgtccttttcttctcagttgactctctttgtgtctcctctggagtctctggtttggtcatctttggtggctgaagatctgtctcttcaagtgattctcctagtttctcacttggaaaatcttgtttggtctgctctggaggctctagacctgtctcttcatgttgcactctaagtgattcctctggaacccccggttcagtctcctcctctagtaattctaaatttctctctctgactgtggcccccgaaacctcagacatggtttccgttggtggcactggatctggatctgtttccatagctgactctaggaacacatcctctgtaacatttggtttagcctcctctggtggctctaggtctgactctttatgcgtttcatccataggggcctccaaatctttgaaaaactctcccatctctctggatgtttccgactttacctcttggtgtatccctggttcagtttcgcttggtacgtctctcttggactccttggcaattccttcctgggacgtcccgccaggtttcagctgcacgttcttagcactgtctggctccccctctttgaagtcctcttcctcggtctctggctgtggctcttggtaaatctctgctggtagcttcgagtctgcctttgccatggtgtctggttcggcattttcatacaatttatgaagtccaggcagttcaggcctctcaggctccagctctccatcttcatctgggccggaatcataatcctccgggacttcagccatttgcagcttagcagacgcgccgcggcttcctagcaaccccaacttccgatagcgtctctatggataccacgatttccggcagtgtcttcctgactcttccccaggttttgtttgttctttcaagccctgactttaaaaatcgtctgtcacaagcacgcagtaaccctccctgcggcctcatcgccagcctcagcgggccagagctcctgtggccgcccctgggtcagctagcttttcaagcggccgccgcgccgcttcttccggcctgcaggctgcgctcggctgtgctcggcgctcgctcggccttcggctgtttccggagccactcgcggctggcagcggagagctccgtgcgcgggctgcagatgtctgacctgcaggcggctgaggggccgggctcctggagccccacagcccgcccagggtcggctggcggcgtcggggactgccagggagtggaggggagccaggcggccgcctcaggtacgcaaggccggggcgctggcgggtgggtgccgcccggcctcagggccccgcaccacggcgcgagcctccgccgcgctctgtcctgggcttccccgcggagcggacccacctcggcagccccttcgcgcgcggggccccttccccgccgctgccaccacccgggccctgggctcgaggttattttctactcactcctgtttcgaaatgccttgattcctgccccgcttcctttctgagatctgcccaaatggtagtgacagggtggctctgcccctggcgcctcttcagcttcagtttcagcttcagccggggttcgggtcccacctccgtctgctaatcacatctagactgccgacccgaaccctactggcctcgccgccccctgcttctggctccccaccctatccccatctcagtcccctgccccagccttaccacgcgcctctcggcccccacccgggttggcagccttgccttcctctgccagaagcccactgcgccctagccttcctgcacataggccccctggccttgctgccatcctctccatcgcttagagtgggaaaaatgaaaagcagagttgaaataggtagtgtctggggtcttttgcttgaacacagtagccaaagcaagagcaggaattaaaaatttggcctacctccctcattctcaagaccctcatcctcttcttgtccaggacgacgtctccatttctactaacgcgagttcctccgtgtgtattatttcagtgtccaaagacaaaagagtccatccatcacactttcttctttcagcctcctgaacaccacacacgatgcaactgaaaggatgctcttttgaaatacgaaagggtagaggggagagaacttgtcttatttaagtagcaaatataaattaattttctaggtctgaaattaaaatagacaccataaagtataatggttgaggcactactgtggagccagggtgcctggattggagtctgaaacgtcagtttcctcatctgtaaaatgtgattactaaaaatatctgcctcataggattattgtgaggattacttgagctgctttgtctaaggcatttggggtatagtccatggtacacactatactcgtctcaaccattgtgacagtaaggtctctttttgttcagttgaacttcctgtgccgccagaggtgttcttggatgtatggcttccaacatggtgcctttttctgtcttctactctgatcccaagtatcttccctctcataatgctgccttattcaaacacacacacaactcacccagctctttcccatgattttatattcttttactttaaaacacctgacaaattttgcctttttttcttacgaactctgctttgtattaaattaaaaatcgttggcatatatttaacatagcagtagaaattctaagcataatgtctaaaagactaagcaagtaaacacagaaaggtaagtcttataacacttgtcccttgcatgcgccagtatttacaaattaagcat

SEQ ID NO: 1241643 - DNA, 4001 bp, Homo sapiens
aattatgcttccacaccccagtgaaggaggctggccctccagctatttataaacgtggagctcaaccaaagggggccctgtcatcgccaccccagtgagtcctggtgtgagctgggaggctcgggctcaatggaatctccctcaatgtggccctccatacttggccatgcaggatctttcgggtgcagtcctgtctggtcaggaaaagaactgtgaagatttccagcggtcacttccaccctatgattctatatatggaagcatcccattctagtgttttcaccatcgtgcacaccatactagggaggaggaatgagtaggccggctcgcttcttgctgctctgaaggcacactcactttagtgtctcccaggccccactgccctggactggaccttgtcatcaaatggcagcccagacctctgctgagctttgcaggctcgcagctccaacatggaacagctggaagaggaccctgcattcttttctctgcataaacactggggactctgttcaccctcctgcagcagcatgaactaaagaatttccccctatccaaaatcacaaccatcagactttccccccatcccccagcctcctcctaccctccaggatataatttcagtctgtcaccacccacgctagcaaataggaaactgctggacctttcgactatattcactttccatactagttgaggtgtctgtaaatactagcagggtaatatgaaacgattctgttctattcagtaaagtttcctaacgaaaagcattaagtaacccacttcatgcctgtcctttctccaagaccctttttttctacaagatccgtatcaatatggataatgtcacgagcagtaagcttaaccgcattatatatatatatatatatatatatatatatatatatatatatatatatatgctgcaaatgtcattttactagtctctagcgtcacctgcatattattctgaagacgaagctctaaaaccagaatatctgtggggaaaaatgaataataaaattggattttcatgtactcctcacacagccttatccaagcttggcttctgaagggcagtcccgggcatctatcatgtgttgctgaaatccagcgagccacgttgcccaaaagaaggaggaggaaggaaaaaacacacacacccagaaaatccagactctacgtgacctgacttacttatttcccaggaaactgcatgagagaaaaatcaatcattcatgctaccgtagctaccacacggaaagggctgacggagttcacagtgggcaaaatcccaaagcggccggcggaggtaagtaggtggggggcggtagtggggggacacccggagggggtggattccgagggcctcggggccacgccgtccaggtcccggcgcggctggcagggactggcctcggcctggcccgaggcagagaagcggagggaggagcgggggttgggcaggcgggacggcggcggcggccgccgcacacttaccggggctgttggcctcgcgttcgaggacgtgcagctcggcgcagtcggccagcgagtgctccaggcagagctggaggaagcgggcctgggtctggctcacgcgcttgagcagcgacagcagcgcaacagtctgctcgcactcgttccagcccttaaaccagcccgccagcaccccgacctggtcgcgaaacatcatggttagggggccgccctcggtctacagagccccctgggcgccccagcccgccccgcccgccccaaagtttggcggagccgcagccccgcggccggagacgcgttcctgttccaaggtggctctggtgcccggacgctgcaggtactgcctgggctcctgcctctcttgtctggtttcagttacgttccggtggttctggctgatttccccagagacgatgacagacagtagcacggaaatgtttctttaaaaaaaaaaacgactttttaaaaatcccccacaaggcacacaactgaatgaagaatgctttctccccccttcttgcagctttgggatggtgatttccggcgtcctggggtctcctccccgctgggcggcaactcggacccttcacgcccgcattcccgagcggcgatcaccactggaaggagagaaagagctgcagtgagacctcggctagcggaggagcgcgccctggggggacgagggcatcagagggtgctggggccaggggagggggcgtcccgcggaaggttgggttcgccgaaatccagccgccccctccgccccctccgcacccgatgtgggagatgggctattccccaccgggtaacagcgagaagcctgcttcccaggtgcgggaggagaccccgcggcttcctgttgctgccgctgccaacggctggtgctcccctcacggcccgcctggggtggcctcgggcgccgtgcttaagaacgccagcaccagcaacagatcttccccgcgcagaaaacttgcaatgcggctgcgaaggggcgcgggggtgggggtgggagctaatgcaaagcagaggcggaggcagcggcagcccgagttccttcctcctcctcttactcctcctcctcctcccagagaagcagccgagcggctgcagctccatctacagcaacagccagcatctccaccgccaggcgcccctctggatttaggccgtgagcagccgcggcagcagctcgagacaaaaataaactctctccacccaaagctccgcgcccagcgggcggcggcgcaacccagagccccggctcccccgcgccgcgccgcaccagcccacccgggaggtctccctgggcctgctccggccggagcggtcactgtgcgcgcgcgtgtgcgtgtgtgtgtgcgcgcgtgtgtggcaggcatcctgccgccgccgcctacgggctggtctgtccggcccggagcctcgcccgcgcgtcgcaggccgagggcggcacagcgctgggcacacgccccgcgaggggacggccggggtccgcagcgctgctcccttcggccagcggggcggccccgcggggaatgcggatcggcgccgcaggcacacgccccccaacgacagcaaagaaagttcggctgcgggggttcccccagtcccatcccggttctcgtggccgccgccggcggggaggagaacccagcgactcagccttcaaggagccgctagcttccaacaacacgctgcttccggctcccagaacttctcgggcggagggggaagcccccggggaggggacccccagtgacccgcgggtcccccgccgagggccgtagggagggagcgctcacctcggcgcggctcatcccggcggctcgggggcccttgcgcgggtccggggccgcggcggctctcagcggggttgggggcgcccggagcgccggccgcgggccatgccgtcggggcgggcggcgcggggagagtgcggtgcttcgagtcggggccgctgcagccgccgctgctgctgcctccagtgtcggctcgcggaggactgagccgcccgagccggagctccccacatgctactgattaacatacaccattacatcatgggcttggcagggagcgcccgagcggggggagaggaacccgggcggcggcgacggcacgcggggggagccggggggaggaaccccggacccggcgcagggcggggggacggattcctaagtggggaccagaaaaaggggaggggagcggagtgggaggagctggtggcgcagaggggtcgggtagaaggaacctccgagaggaacgaagaagttcggggaagaggacgggtccgggtgaatttcttcctgcggccgcctgcgtgttctggaggggtcgggacactcaagccactggagccccggcagaaagggacccgagggcgctcgggcgggggcggtgctgccacccgctgcttgtccttgggaatgtggttcgtccgctcggctgaccctcggcccttctggggccccggggtggccgaggtgtttggcccccgg

SEQ ID NO: 1241644 - DNA, 4001 bp, Homo sapiens
gtgcctttcctgggcatatgacaacaagctgcaaaccatctggaaaagagagtcttgagcagccgaagtgtcctcagcactcatgtgatatctctagctccatccttccctttgtgtaagaattgggattctcacataatagacaggactcctgtatctagcgcatccattctttcctcctctcatgcacccatcagctgctgagccctgtcatcaaccaggcactgttacacactggggatatgaaaacaaattaagtcataatctttgctctaaggtgcttgcagtttctgggacccacacggtatgatgggcatcagggcagggagctgtgggaacatataagagggatccctgaccaccactgcatgtttcaggaaaggataaacagcatgaaaggaacaaaggatgacaggacgctatacgtggccgagcagggctcagggtggccagagatgaagctgaagagcttttccaagtccttagcaaccaactttctaaggagtttggactcactcgagtttctttttcttaaaatcaggataccagcagctctcctgattaccttaggaagtttgctgtaagggccaaatccaccgataggggtgaaacatttttaaaaagtatacaatgcaccttactggtataaggcattattactccagaaatatttagcatttaatattaagtttatctgcggtttctctgcagcacttgatggaattgggggtctcagatctgaacccaagaggacaagatctggatgtgtttgaagaaaaggcgcaggcttacagagaagcattttctccttctgtaagcagcaataaatggaagtgaggtgaatgcatgagtgtgtgtgtatatttccttcctccatgccaaggacccaggctcagaacatggcttagtttcacagtttgagagtgaactgaaaaggcaggatggtgaataaaagcacatggaaacattttcattactcaagataaatgttgaaaattctgctccagtgaccattctaattttccttttccaccacgtatcttgagaagtcttcaattctgtaccccatggcccctcacccattcacaccaactggtttacaggcttctgcttctgtttcctcccattcccctaaaactcctatcatcatggcatagtgacctgctgagggccaatttcagaggacagtgttccgtctccattgtacgtgacacttccatggcacctggtgggattccttccttcaaaccctcccgaccttctgggcgagcatagcctgtgttattgttcagcccctccatatcttacggtgctcctcagggcctgtccacgctcttgacccttggcacacacttctggggagtacctattatcagttacactcacatgatgcacaactggtcctttcaaaccttgtggggctcctggactctagacctgctcttccggccactgacttgccatttccacttgggtgtctcacaggcacctcagactcaacccttctcatggacctacatttcccgcccccacttctcctatcttttctgtccccaaatactatgacactcaaacccaagcctcgtcacaatcaccagactccctctaaatgatctctatcctcctcctccatcctcactgcctctattttggttcaaggtcccatcaagacttgctatagtttcctaatgagtttcccggccaacatccagctcttctgaaggcttcccacctcatcactgcacagcggtctatttcacctcaggaagcttcccccacctgctatggtgatgacatcgatcagactgggttgtgagatcatatggtgccatatctaactgtcccaatgcacgtccccagctccccattgcaggaaccatgtatgactcacggttaatctccaatggatggggcaaattgagtcccaggcagctgcttgataagggttcagtaactgaacaaaagagctctgcacacagaactcagacagccaccactgattatgaactaactatgggcggggccccagctatctccttagaaatctatgtgaggtaagaatatgggaggcaggcaagggcagatgactttttttccaacagcatcatcagcccagcggtgtctgtgaatgcctgagaaatggctgatttgagtctgccaccggtgccgtcagtggtaacaggttacaaacaactcactcccttgcaaagcaggagaggtaggggttccagagaagacagaggagggccaggggatgcgtcctcagtggatgcctgagagagactgcctcccaccccatctcatcagctcacgcagggacaatatacaggatgtccaaacattggggtattctgatgcaagctcaaccagtcatctgacacacataagctctcttctctctcaaagaagtcagactcgataaactcacaatttctttccacttgaccactggctgccatcacactttgctctgcatgtggcatctttttaactttcccattccagtgaacaggggagtcactattattctaggtgcaaaatctgggacacggaaaacatcactgacttatcaaaggctagatggaaagtcgatggcatgtcagggtcacccttgctacctggttgccagagtgttccccatgctgacttctgccaggctgcagggaataaagctaacggtaatttgtctcccaggtgggtgcgcttcctcagtgatggaggatatgaatgaatcctcaaggctgctccagaaagaagggaagaaatcactcttttaccataacacttagcaatgaaatccttatgcaaaatgttttccgtactttctaacaaagaaagagtaaattggccttttgaatgttcccccaaagagaatggtttctcaatttaaaaatggcaatagtcacttagacaagctgctttctaaagtagtataaaattaaaaacaacaacaaataaacctcaggttcaactggatagctcacttgtaatttgtaattcactttaagtaagaagaggtctttaatcacggatgtgcacgtgagaagcctctgtctatctggccagaggtttaaaaagaaacgtttcttacaaagttatatatgtatattctataaatatatatataacatatatgcattaaaaataactttatatagtctatatgtgtagggaaaagaaagagagatcagactgttactgtgtctatgtagaaaggaaagacataagagactccattttgaaaaagacctgtacttgaaacaattgctttgctgagatgttgttaatttgtagttttgctgcagccacttttccccagccactttgacccaacctggagctcacaaaaacatgtgttgtatgaaatcaaggtttaagggatctagggctgtgcaggacgtgccttgttaacaaaatgtttacaagcagtatacttggtaaaagtcatcgccattctctagtctcaataaaccaggggcacaatgcactgcggaaagccgcagggacctctgtccttgaaagcggggtattgtccaaggtttcttcccaggtgatagtctgaaatatggcctcatgggatgagaaagacctgaccgtcccccagcccaacacccgtaaagggtctgtgctgaggtgcattagtaaaagaggaaagcctcttgcagttgagatagaggaaggccactgtctcctgcctgcccctgggaactgaatgtctcgttataaaacccgattgtacatttgttcaattctgatataggagaaaaaccgccctgtgatgggaggcaagacaggtttgcagcaatgctgccttgttattctttactccactgagatgtttgggtggagagaaacataaatctggcttacgtgtacgtccagtcatagtaccttcccttgaacttaattatgatgtagattctattgctcacatgtttttctccttatcatcaccctgccctcctactacattcctttttgctgaaataacgaagatagta

SEQ ID NO: 1241645 - DNA, 4001 bp, Homo sapiens
cacgaaacttgaaaacagcttaagacattcccagttagaaagcaaatacctttaaaacaagacaaaaacctgaatatgcagaccctcttattattcatcaagtaaacaatattggagacactcatattaataagcttcagaaactaacactggacagaaacaaatatctgaataaataaggctcaacacttgatgtaacgacaacaaaacaaagtagatcaaaagttatttgcttaactgtgacaaacattaacaaaactgcacgttctacacatgtaccccagaacttaaagtataataaaaagtgtgacaaacataattcacgatttcaagtaatgtctgataaactttatttgcagcaaacagcaagctatcacttaaaaacagccagaaacctaactgcatgtgtgactgaaaatcaagttgttaaaaaaaaaaaaaaacaacttaaaaatcaagtttcgagttactgatgtactcaactgacatatattttgttgaaagtattgcaagtaccaccataaatctggaaggctgacaatgtggttatgatggaaaaacatgctctcccatctgtgtgatcttgggcaaatactagaaacctaactttcccaattacaatatgaggtaatacttaagtcacaaggttactaccagcttccaagaaggaaacttaagcaaagggcccagggcgcagtaagagcaccaaaataccagctccatgcctcacaaatgtcctgaacacacaagaattaaaaattcaagagattcaactcaaaaatcaaatacttacattaagaagaaaagcagcgggggaccggaggtggggattgggagtgggatctaccctattaaaaaaaaaaacttttcgaggggggggttctctaatacgatagaaattattttgagttgccttcttggaatctcacgaatatagccaaatacaaaggcttttggctctctgctctgctgtgtaagagtgatgaggctttgggtggcggctacaagaacgacggtatgcttttcaccttctcaagtctgcatccggcagcaggactaaggaattctgccccagagttcgcacaacttgcagcacagtcgagagacacccgcaatgtttgcaaacatgacgcacatctcgacgcatctaaaagagtaaaaagtgtccctgtctaattacttttactcctatagcattaggtgataagcaatttaaatgtttcctactctctcttccagtaatcaaaaccaacaactctgcctggtggggcgaggaagtctgttatttttagggggtgctcttgggggggttaggcgcgggggggactaacccaagtttcttactcttatgggctttcaatcaacgaataccacttcagacacaagaaaatctcaaaaccagtatttcacgcgaccaaggacgaaggagaagccctggagacccgccggcgcccccgccagggtccccggagcacctggccgcctgggccaggtgtgggcacgccccgcctgacactcactccgaagcagaggcgacgtctccttcttcacgtacttcccctgcacctcggccggcttggacacttcgtttttggttttctttcgggacagcatccttctcgacgaggcccgaggccgcgctgaactgcctccctagggctccgcgccgggcgccggccgtctccgccgccacctccgccggcgccgccgcctccttccctcccgagccgccgcctccgccgccgcctgtccggagcccggggtcgcccgcagggactgccgcatgttcagggcgctaagcgcgccggccgccgctcagtcgctggtcagttccttcccggaagtcggcccgctctgcgacgctgctcggggacgccgtgaggaaagcccagcgacgccgggccagggccagggccatggtccgccgcgggccgccgaataaccgctaccactaccgccgccgccgcctacatcccgtaaactttccccgcggccgctgggaattctgggaagctcgacgcagcgcgggccgccgctgcccctcccccaccgcggctccaggcgcggctccggcggcgggactcgggtgccggcgctctaggctaccgggccgtccccgccgagctgcggctgtcctcactcatcctcagcgagaagcaggtcctgccgactgagaagatgaaggacgaaacctgccccgctgagtgcgggagttcgtcgcatgcgcatgtcgtggaacctactctccacgagtttttattgttgttgcttttgtaccccctcgggatccctagcggaggcagtgactctctttccccccaagacgttgttccctgtttgaaggtgttcttcctaatgtttcctaggctgctgaattcagctctctaaaaaatgcggaatgctaaccatgactcccaggcaagtgctacaccaaagcatctattctgctggaaacgttcatgctgattaactagaaataagttgatcctctactgagtatcagggagtgcgtttttctataacaggaaaaaacggaagaatgcaagatggaatttccagtacctctttttaagatacaattggtgttagcatattacaattattttattgcatcatcactatcattagtatgattaatagccacatatttcctcctgacgttatgtgttatgatcttagaattttgaagactttgaccactgcgagtcgggaccgggaattttctatctaaaataatagactctacttccttctatataacttagcaagactgccaaatgtacaggataacatttggaaaataagattggattcatcccctagtgaccaaattaatgctttaataatgaggaatgctttccctgagatctaaaacatctcacaagagatctaagacatatatcacaattaacaaaagacatggaattttttaccacgtaagattaagaagatggtcaaatgttttaccatgagcaaacaaaggagacatttgatctagtgtctgtctccatatgttcccttggtgcagatctcccacaattcattcattaaccaggaaatactcattacccactgcgctagtcgtttgtgatagagcaataagcaaaacagacaaaaatccctactgtcatgggaaagagaaaaaaatgacaaaaaataagcaaaacatactatgttagatagtgataagtgatgaagtgaaaataagagaggactcacaatttttgagagggtaatagagggaccagagaaggctcatgaggaggtgacattggagttaagtgacagagtgaggaaattggccatgcagctaactggaggaacaatattccaggcagaaagaacagcaagtgcaaagtcgctgcaagtggccatgttcctggcagattggaggaacagtaagagggtttatgtactggaaaagacggggagacgaatggggaatgcagttagagagtaacaatagccacggcacctagggctttgtaggccattgtaaggaatgttactttgagcagaggagtgacatgatctgagttaatgttttcataggactgctttggatgctgtgtggagagtagacaatggagctaagggcaaaagggagatcagtcagaagttattgctggcttggacccaggcaataataggtggagaggtaagtggacatattttagacatattttaaagaaagccaaccaaatttgctgacattgaatatggagtgtgggagtatcaatcactgccatgggtatgaaaatcttaataaacagaattggaactcactagaagcagagtgtactctgagagaaacattagaaaaacagttacttgttcctgtggttcagaaataaggacgagtcctaaagcgttgatagtgtgcagggagaagaaagagtgatgaaacttaagtgagagcacaatggggttttgttacacatcagggtatgaaggcgggagctgaaggaggaagggggagccaaagaagtgccaggtttctg

SEQ ID NO: 1241646 - DNA, 4001 bp, Homo sapiens
aatgggaccctgcaatgttgagaagctgggaagatgtgcaagaacctgtaacgaagacgcattcaatgaagaacaacagtaacacggagcaggaggcaactgattctacctattgaactgaaggtatggatagaggggacagtgaaccaggaagaaaggagatggcttgtgggatgaccttcaaaagatcaataaagatttttcaggagaccaataaagatttttcaggcaggcaaagcaagaaacaggcacgttagtttacctctatcttactttcctcacctgtaaaatggagataatacataatcacctaatgcaatgcctaacaatagtaaatgctcaataaatgccaactattatctcatccacccaaatattctagtatctagaatatttaaggactgtgagttatctcccaaaacattctccataggcatgagggaaatagctaattctgcattataatatatatacaaggatttaccttcctctgaaaataaggcagaattcaatgacagtaaaaatttgataaaaaatagatctagcactacctagtaattctgtaaaatcttactatgtttatttctgcagaaatacaaacgattagattttaatgatctacaaaatttctgcatacaagtttacggccacgcaaatttatttttcaaaaagctctcttgtattggtacagttttactgacacgttattttaatatgtagtatagtcatcagaaacacagtattaaaacaaatggagcttccatttgtttaaacatatacaacgaatggcaggtatgccccaaatcttatttgaacttccctatatttagttatgcctgacttcacctgataggttatactaaattatttactgggaaaagcagaacgcaactcagtatcttttgtgtgtcattactaaattgaagtctatcactttttctttaaatgccaaaggaaggaatcaagtacagcccaaatcccttctgtaggtcatatgaattataaatttattttcctattcatatttatatccaacagagcataatttcaggaaacagaattccaagtatgcacattcttgatgccttatttctattagctcctcagaataaattgcttgaaaacttttaagacaactagttaacaagtataaacctttagtttgtagctaacaggtataaaccaagttgtcatgagaagttttcaagtaaggcaaaactaatttctaagacggaaaaaaacccaaaactcaagagaagaatatgtgcctttttacatttctctgcataaatagaagctatataaacatgctctattgaagataaaatattattttaaaacaatgtgtcaaacaattaaaatgagaaagctattaattcatttgttttgccattcttcaatgccttccagcaagctgaaggagaaaatgtttatcaccaggcatttttctgcaggtacccccaaaagactggtccgaagtagagaagtggcgcaaagcaagccgctgtgaaaatacctaaattctctgagtgtcagaaaatgggagttctcttaaaaatcaaaaccaggagaactgaaccacgcacagaaactcggagacctcataggtggcaacatagataagaagctatcagctgctagatcttgttgtgatggccttctgatgcccactaggaaggagacaagagcagggccgtagcaatccgcccaccgctgaagctccttctcctgcaccacaggaggaaccgagtcctcaagctaatggcaacttctccccaaaaactcaaaggggaggggctcttgatgttctagggactggattaaactcctggagatcggtctctgagctgcacgcaccagaggagaaggatgtcgtcggggcagtcacgaagcttcaaggagaagagaataagtcagtacctgtctgcctttcccgaatactggctgctgctgctgctgtcgctgccgccgccgccgccatcttggctcccacgagccactgcccggctggggagcggagcggggggatgacgtggctgcccttaccgccccggaagcaaagcccggaagggcggggccaaagggtgtgcctgagttccggaccccacctcctccaggaagacctccactctcggtagaactgggagacccggtgcaggttaattcagtggcccgtaatgttaggcgaatactaagagtttttatcctaccgaatcaagccacactctctcaaatggtagcaacattaaattgagctgttagggtaggagcgtgtagtgctaagaacctaattactgaactgttggtttggtgacttacagagcacttaaagggtgataatgctctaggagtataaggaccacaggactgaagtaaatgaagctcctgaaacacaggcaacattttaacgttagctctcgtttctcagtgcagcaggagtcttccctttgctcctttctccagagaaacggaaagcattggagcattactctgatctggcatatttctcagtcgcatctctttaaaaaaaaaggtgtagctttatggtggcgttctgccggcatggacacgggatccagggaggtacaaaatgagaaattagcatttctcctctttccttgtagtaattgcaaaatcaccttgccgtgggaaggaagtcaagcagtagtggggtgtgttgcctaggctggagcgcgcaatcagggatcactgcagcctcaaattctgacggtcaaacgatcctcctgcttcagtctcccaagtagctagggactacaggggcacaccatcaggccaggctgatgtgctggtttttgttgttgttttgtttttgagatagtatctcactgtctgtcgctcaggctggagtgcagtggcagaatctcggctcactgtagtctcgacctcccggactcaagcgatcctcccaaactatccttccacctcagactgcccactagttgggactataggcaggggtcaccacgcccggctaaattttttttttttttttttgtagagacggggattcaccatgttggccaggctggtcttgtgctggcggtttaatgtacacttgaagccacgtgaccgcaaaatatatgggatagatgatttctaacttaatccatagattttactgtatgaccaaaatggatacacaatgacacctcatttcccgagttcattgatgacgcttcattatgaagttgcaccaaattctgaaatgaaatcactctgtacctcaaaagcttaactttcacaattatataaatgaaatggttagcctaacgattatatattgttttatagtgtgaaacactggcttttttcattaataaaaatttatttttgtgacatttaaaacaggttatcttattacataatctctgccgggtgcggtggctcacgcctgtaatcccagcactttgggaggtagaggtgggcagatcacctgacgtcagtagttcgagaccagcctggccaacatggtgaaacccggtctctactaaaaatacaaaattagccgggtgtggtggtgggcgcctttaatcccagctactggggaggctgaggcaggaagaactgcttgaacctgggaggcggaggatgcagtgagcagagatcgcgccactgcactccagcctgggtgactgagtgagattctgtctcaaaaaagaaaaaaaaattatgtaatctcatttttatagctaattggcacattcattaagaaattaactggaatacatgtgtgtcttcagtactattactaatattttgaaggaatcttcaatgatctaggtgtgttccaactaaacaaattatttctgccctatgggaaagttctactgcattctacagtctctatgaaatataaaatgtctgagagcccaattttgctcatttgggtacttccactttcaaatgcaaatccatcattgagccacttcagttccatcacagattctctcccaagactatgagtcatgttaaaaccacga

SEQ ID NO: 1241647 - DNA, 4001 bp, Homo sapiens
atgaagaacaacagtaacacggagcaggaggcaactgattctacctattgaactgaaggtatggatagaggggacagtgaaccaggaagaaaggagatggcttgtgggatgaccttcaaaagatcaataaagatttttcaggagaccaataaagatttttcaggcaggcaaagcaagaaacaggcacgttagtttacctctatcttactttcctcacctgtaaaatggagataatacataatcacctaatgcaatgcctaacaatagtaaatgctcaataaatgccaactattatctcatccacccaaatattctagtatctagaatatttaaggactgtgagttatctcccaaaacattctccataggcatgagggaaatagctaattctgcattataatatatatacaaggatttaccttcctctgaaaataaggcagaattcaatgacagtaaaaatttgataaaaaatagatctagcactacctagtaattctgtaaaatcttactatgtttatttctgcagaaatacaaacgattagattttaatgatctacaaaatttctgcatacaagtttacggccacgcaaatttatttttcaaaaagctctcttgtattggtacagttttactgacacgttattttaatatgtagtatagtcatcagaaacacagtattaaaacaaatggagcttccatttgtttaaacatatacaacgaatggcaggtatgccccaaatcttatttgaacttccctatatttagttatgcctgacttcacctgataggttatactaaattatttactgggaaaagcagaacgcaactcagtatcttttgtgtgtcattactaaattgaagtctatcactttttctttaaatgccaaaggaaggaatcaagtacagcccaaatcccttctgtaggtcatatgaattataaatttattttcctattcatatttatatccaacagagcataatttcaggaaacagaattccaagtatgcacattcttgatgccttatttctattagctcctcagaataaattgcttgaaaacttttaagacaactagttaacaagtataaacctttagtttgtagctaacaggtataaaccaagttgtcatgagaagttttcaagtaaggcaaaactaatttctaagacggaaaaaaacccaaaactcaagagaagaatatgtgcctttttacatttctctgcataaatagaagctatataaacatgctctattgaagataaaatattattttaaaacaatgtgtcaaacaattaaaatgagaaagctattaattcatttgttttgccattcttcaatgccttccagcaagctgaaggagaaaatgtttatcaccaggcatttttctgcaggtacccccaaaagactggtccgaagtagagaagtggcgcaaagcaagccgctgtgaaaatacctaaattctctgagtgtcagaaaatgggagttctcttaaaaatcaaaaccaggagaactgaaccacgcacagaaactcggagacctcataggtggcaacatagataagaagctatcagctgctagatcttgttgtgatggccttctgatgcccactaggaaggagacaagagcagggccgtagcaatccgcccaccgctgaagctccttctcctgcaccacaggaggaaccgagtcctcaagctaatggcaacttctccccaaaaactcaaaggggaggggctcttgatgttctagggactggattaaactcctggagatcggtctctgagctgcacgcaccagaggagaaggatgtcgtcggggcagtcacgaagcttcaaggagaagagaataagtcagtacctgtctgcctttcccgaatactggctgctgctgctgctgtcgctgccgccgccgccgccatcttggctcccacgagccactgcccggctggggagcggagcggggggatgacgtggctgcccttaccgccccggaagcaaagcccggaagggcggggccaaagggtgtgcctgagttccggaccccacctcctccaggaagacctccactctcggtagaactgggagacccggtgcaggttaattcagtggcccgtaatgttaggcgaatactaagagtttttatcctaccgaatcaagccacactctctcaaatggtagcaacattaaattgagctgttagggtaggagcgtgtagtgctaagaacctaattactgaactgttggtttggtgacttacagagcacttaaagggtgataatgctctaggagtataaggaccacaggactgaagtaaatgaagctcctgaaacacaggcaacattttaacgttagctctcgtttctcagtgcagcaggagtcttccctttgctcctttctccagagaaacggaaagcattggagcattactctgatctggcatatttctcagtcgcatctctttaaaaaaaaaggtgtagctttatggtggcgttctgccggcatggacacgggatccagggaggtacaaaatgagaaattagcatttctcctctttccttgtagtaattgcaaaatcaccttgccgtgggaaggaagtcaagcagtagtggggtgtgttgcctaggctggagcgcgcaatcagggatcactgcagcctcaaattctgacggtcaaacgatcctcctgcttcagtctcccaagtagctagggactacaggggcacaccatcaggccaggctgatgtgctggtttttgttgttgttttgtttttgagatagtatctcactgtctgtcgctcaggctggagtgcagtggcagaatctcggctcactgtagtctcgacctcccggactcaagcgatcctcccaaactatccttccacctcagactgcccactagttgggactataggcaggggtcaccacgcccggctaaattttttttttttttttttgtagagacggggattcaccatgttggccaggctggtcttgtgctggcggtttaatgtacacttgaagccacgtgaccgcaaaatatatgggatagatgatttctaacttaatccatagattttactgtatgaccaaaatggatacacaatgacacctcatttcccgagttcattgatgacgcttcattatgaagttgcaccaaattctgaaatgaaatcactctgtacctcaaaagcttaactttcacaattatataaatgaaatggttagcctaacgattatatattgttttatagtgtgaaacactggcttttttcattaataaaaatttatttttgtgacatttaaaacaggttatcttattacataatctctgccgggtgcggtggctcacgcctgtaatcccagcactttgggaggtagaggtgggcagatcacctgacgtcagtagttcgagaccagcctggccaacatggtgaaacccggtctctactaaaaatacaaaattagccgggtgtggtggtgggcgcctttaatcccagctactggggaggctgaggcaggaagaactgcttgaacctgggaggcggaggatgcagtgagcagagatcgcgccactgcactccagcctgggtgactgagtgagattctgtctcaaaaaagaaaaaaaaattatgtaatctcatttttatagctaattggcacattcattaagaaattaactggaatacatgtgtgtcttcagtactattactaatattttgaaggaatcttcaatgatctaggtgtgttccaactaaacaaattatttctgccctatgggaaagttctactgcattctacagtctctatgaaatataaaatgtctgagagcccaattttgctcatttgggtacttccactttcaaatgcaaatccatcattgagccacttcagttccatcacagattctctcccaagactatgagtcatgttaaaaccacgaagacaattttaaaattgatgtacactgcatatatatgaaatgataaaaactcctgaccaagtgca

SEQ ID NO: 1241648 - DNA, 4001 bp, Homo sapiens
tcagactgggctggtagtaagctgccggtggaacacaatcatttgccctgggtgtccttggtcctgcctggctctctgtagtggaggctccccttggcctcaccttctctggcccttaggatctccccatttggagacagagccatttggatattttccccttgaacttctccatgacctgaagcgttccttccctggaggaactctggttgcagggctaaacttagaggctgctagagtgtagtggttaagaacaggaacttgggtaccaggcgcctgaattttaatcagctccctcatttattaactctctgacttgatgcaagttacttaacctctctgtatagaattttcacatctttaaaatgggaataatagtacctacctcatagggttgttgtaaggaataaatgataataagcataaaacacttcaaatagtggctggtgtgtataattgtttgcaattacttggtcccaaaggtgaccaggaactctgttcctaaagaactatggtgtgagaagtaagggactttgggataggtggacttttccctggcattgagtgatgccactccccactgttttttcagggtctcaatttcttagtgaaagtacacaaaggttaggagaaacatgcatggatcaagggcctaggaagtcattttgcctggaaaagaccagtgctctggtgtgtgcatagctacagaggtctgagttaccccgttcccctggcgaatataaggggctggtgatttggggggcgtacctacacctgtgactaagacccaggccttggggggttgtggggctttggtgatggctttagccagcaattgggtggtctctaggcggctgccgattacctctttttggaaggtttcattccatctgcaggagaaacatgggaaataaaaagccactaaatacataagtgcacatatccctctctctgtcttttcctgggagctatttcataccaatttcttgtaaagccctgaatttcggcttaagagaaacagtcaacgtctcctgtagagggaaagggcattcatttcctgggcatcctgagttatacgtgaggacttaagccaattggctgactgggtggaggagcaggtgggggtggaggagtggagcagaatgagtagtctgggatatcggtttagttcggaatctgggagctccattacccatagctcacaggttctcatcagtggggcactgtcctccctgtgctctagtgggtatcagctttagggcccgggctgaccttcggagagggttgaggatgttctctccggccaggttgacggcggcatcgcagctcggcagccccgatgcagcgagctcatcctgtcggagaaagcacacagtgcccctgccccgccctgcgccgcccaactctgccctcccacccgcttccagaggatggacttacccacgtgatccggccgggcccgggctttcgggagaccaacgtcacttcgtggcctctggcattcagcagctgggttagggctgtcccaatgaagcctgtcccgccacctgatcggaaaatacaaattgtttatattcccgtggagttggggtgggggcgccttccgtccccgctgtggcaccctcttccggcgccatcccatctgacaccaggcttctccccacttatccccctcctcgcgatgcagaggtgacacaggtcacagggattagggagattcggcttctcgggctaggaggccaaggccaggttgcctgtgcactagacagtgccctcccggaagcggattcccagtcctcaatctccgactaagcccgcccagcactctccctttctgccctccctcacccacaagcacacgcatagcgactaggacctaacgcgcctgcgtaaagtttagagtttacctcacctcagacgcgactacgacctctctgcgcatgcccctttcgggaagcgcgttccaatcgaggtcgcaatcctgtgcgtgacccttctcggcgacccggaaaaacttgtaaatataggctgggtgtttcaatagcaagcgaggtgggagggattagaccgatggacccggaaagggcggaggagggaaggctttagtgtagaaaaccaaccaaaccaaacccaaaccaacaaaacccttcacctaaaacccgaagctacccagacctcagaattttggatgtctattaagttggcgggtcagtaatgcaagagaacccttccaccggtaatctggatttctttccactcggccagttttttcttctctctctttccgctggagcctttctatcaacatttaaacattccaaagatccccctatattaaaataagccttctccagacctgtttttcctccagctaatattcttttttttttttgccttcatagccaaacttcccacaagtgtggtttccattttctacttcttacttcactcctatagggtttgtgcctttatcattcatttcctcactctccaagaacataagtttcccatgtgtcaccaaatctaatccctagttttcagttagttttcttgacctctcagtatcaatgggcacctgctgattccttcctccctttgaaaatgtttggcttcagtgaaagacattctcttctcggctttctcgtaccttttttcagtctctgatgcttgctccacctctgctaagttcttaaaatattggtattcctcagagctggatcctaggaccttctctttccaatctgcactttaccctaggcatctatgccttgaattcagttaccaggctttaacagaagacatcccaaatctcctatgcaactcggatctctcctctgagctcctaacccctataaaaacttttcactacacatctcttcttggacgtctgaaaccctgttgattttaaatactgaatctctcccagatttatctaagaggggtctttgaaaagttcatggaaaatgtgtattatgctaaaaaatacataggtttccaattttttttttttttttttttttttttttttttttttttgagacggagtctcgctctgtcgcccaggctggagtgcagtggcgggatctcggctcactgcaagctccgcctcccgggttcacgccattctcctgcctcagcctcccaagtagctgggactacaggcgcctgccactacgtccggctaattttttgtatttttagtagagacggggtttcaccgttttagccgggatggtctcgatctcctgacctcgtgatccgcccgcctcggcctcccaaagtgctgggattacaggcgtgagccaccgcgcccggccccaaattttttttacaccaaaataaacttgtactaacttgttatataacatgtctgaacaggatctgacgcactaagaaggctagacagtttgaaaagagcccctatcaaagcaacctgaattctgctaaaattgaagcaagaacaaacatggagtttctggtgaagaatgatgaaattgatgccttatgaaaagtttatgaggacaatgccccaaataaatcatcagtctacaaatgcataactcattttaagaaacgaggagatggacaagcatggtggctcatgcctgtaatcccagcactttgggaggattatgcacgagcctctctcaagcccaggagtttgagaccagcctgggcaacatagcgagacctcatctcactaaaaatttaaaaattagccaagtgtggtggtgcacacctgtagttccagcgtcttgggaggctgaggcaggaggattgcttgagcccagcagttcaaggttgcagtgagctatgattgcaccaccgtgctgcagcctgggtaacagagtgagaacctgtctcaacaaaaaggggaggagatgatgttgaagatacagatagtggcagactatccacatcactttgtgaggaaaaaaattcatcttgtttgtgccctaattgaagagaactgacaacagcagaaacaatagccaacacca

SEQ ID NO: 1241649 - DNA, 4001 bp, Homo sapiens
tgtggcccatggcaccacccccacggcccagcacaacccctagagcaggaaagagggaaggtacaggggtcctctcagccttgaaggagcccactgctcctcctggtttctgtttccccttcctcactctccccatgctgacttggctctgtaacagaagtgagcagtatggctgtctttaagacctcacaccttctcatctgcaggttggctagaagtggtggcatcctctcactctgtaattgtaatctcagctctcctaatcccatcacttccccagcccagagaagacattccaaccctgtctgatacccaggcccgtttctcacctgagcgcaccaccacctggcgtgtagaatctccaggaagcctggctgcagcttcccatttggttacgaggttggagaaaaagtcaaagtcccctcctgggctgtcttcatcatactccgcagtcagactgggctggtagtaagctgccggtggaacacaatcatttgccctgggtgtccttggtcctgcctggctctctgtagtggaggctccccttggcctcaccttctctggcccttaggatctccccatttggagacagagccatttggatattttccccttgaacttctccatgacctgaagcgttccttccctggaggaactctggttgcagggctaaacttagaggctgctagagtgtagtggttaagaacaggaacttgggtaccaggcgcctgaattttaatcagctccctcatttattaactctctgacttgatgcaagttacttaacctctctgtatagaattttcacatctttaaaatgggaataatagtacctacctcatagggttgttgtaaggaataaatgataataagcataaaacacttcaaatagtggctggtgtgtataattgtttgcaattacttggtcccaaaggtgaccaggaactctgttcctaaagaactatggtgtgagaagtaagggactttgggataggtggacttttccctggcattgagtgatgccactccccactgttttttcagggtctcaatttcttagtgaaagtacacaaaggttaggagaaacatgcatggatcaagggcctaggaagtcattttgcctggaaaagaccagtgctctggtgtgtgcatagctacagaggtctgagttaccccgttcccctggcgaatataaggggctggtgatttggggggcgtacctacacctgtgactaagacccaggccttggggggttgtggggctttggtgatggctttagccagcaattgggtggtctctaggcggctgccgattacctctttttggaaggtttcattccatctgcaggagaaacatgggaaataaaaagccactaaatacataagtgcacatatccctctctctgtcttttcctgggagctatttcataccaatttcttgtaaagccctgaatttcggcttaagagaaacagtcaacgtctcctgtagagggaaagggcattcatttcctgggcatcctgagttatacgtgaggacttaagccaattggctgactgggtggaggagcaggtgggggtggaggagtggagcagaatgagtagtctgggatatcggtttagttcggaatctgggagctccattacccatagctcacaggttctcatcagtggggcactgtcctccctgtgctctagtgggtatcagctttagggcccgggctgaccttcggagagggttgaggatgttctctccggccaggttgacggcggcatcgcagctcggcagccccgatgcagcgagctcatcctgtcggagaaagcacacagtgcccctgccccgccctgcgccgcccaactctgccctcccacccgcttccagaggatggacttacccacgtgatccggccgggcccgggctttcgggagaccaacgtcacttcgtggcctctggcattcagcagctgggttagggctgtcccaatgaagcctgtcccgccacctgatcggaaaatacaaattgtttatattcccgtggagttggggtgggggcgccttccgtccccgctgtggcaccctcttccggcgccatcccatctgacaccaggcttctccccacttatccccctcctcgcgatgcagaggtgacacaggtcacagggattagggagattcggcttctcgggctaggaggccaaggccaggttgcctgtgcactagacagtgccctcccggaagcggattcccagtcctcaatctccgactaagcccgcccagcactctccctttctgccctccctcacccacaagcacacgcatagcgactaggacctaacgcgcctgcgtaaagtttagagtttacctcacctcagacgcgactacgacctctctgcgcatgcccctttcgggaagcgcgttccaatcgaggtcgcaatcctgtgcgtgacccttctcggcgacccggaaaaacttgtaaatataggctgggtgtttcaatagcaagcgaggtgggagggattagaccgatggacccggaaagggcggaggagggaaggctttagtgtagaaaaccaaccaaaccaaacccaaaccaacaaaacccttcacctaaaacccgaagctacccagacctcagaattttggatgtctattaagttggcgggtcagtaatgcaagagaacccttccaccggtaatctggatttctttccactcggccagttttttcttctctctctttccgctggagcctttctatcaacatttaaacattccaaagatccccctatattaaaataagccttctccagacctgtttttcctccagctaatattcttttttttttttgccttcatagccaaacttcccacaagtgtggtttccattttctacttcttacttcactcctatagggtttgtgcctttatcattcatttcctcactctccaagaacataagtttcccatgtgtcaccaaatctaatccctagttttcagttagttttcttgacctctcagtatcaatgggcacctgctgattccttcctccctttgaaaatgtttggcttcagtgaaagacattctcttctcggctttctcgtaccttttttcagtctctgatgcttgctccacctctgctaagttcttaaaatattggtattcctcagagctggatcctaggaccttctctttccaatctgcactttaccctaggcatctatgccttgaattcagttaccaggctttaacagaagacatcccaaatctcctatgcaactcggatctctcctctgagctcctaacccctataaaaacttttcactacacatctcttcttggacgtctgaaaccctgttgattttaaatactgaatctctcccagatttatctaagaggggtctttgaaaagttcatggaaaatgtgtattatgctaaaaaatacataggtttccaattttttttttttttttttttttttttttttttttttttgagacggagtctcgctctgtcgcccaggctggagtgcagtggcgggatctcggctcactgcaagctccgcctcccgggttcacgccattctcctgcctcagcctcccaagtagctgggactacaggcgcctgccactacgtccggctaattttttgtatttttagtagagacggggtttcaccgttttagccgggatggtctcgatctcctgacctcgtgatccgcccgcctcggcctcccaaagtgctgggattacaggcgtgagccaccgcgcccggccccaaattttttttacaccaaaataaacttgtactaacttgttatataacatgtctgaacaggatctgacgcactaagaaggctagacagtttgaaaagagcccctatcaaagcaacctgaattctgctaaaattgaagcaagaacaaacatggagtttctggtgaagaatgatgaaattgatgccttatgaaaagtttatgaggacaatgccccaaataaatcatcagtcta

SEQ ID NO: 1241650 - DNA, 4001 bp, Homo sapiens
gcgtgtagaatctccaggaagcctggctgcagcttcccatttggttacgaggttggagaaaaagtcaaagtcccctcctgggctgtcttcatcatactccgcagtcagactgggctggtagtaagctgccggtggaacacaatcatttgccctgggtgtccttggtcctgcctggctctctgtagtggaggctccccttggcctcaccttctctggcccttaggatctccccatttggagacagagccatttggatattttccccttgaacttctccatgacctgaagcgttccttccctggaggaactctggttgcagggctaaacttagaggctgctagagtgtagtggttaagaacaggaacttgggtaccaggcgcctgaattttaatcagctccctcatttattaactctctgacttgatgcaagttacttaacctctctgtatagaattttcacatctttaaaatgggaataatagtacctacctcatagggttgttgtaaggaataaatgataataagcataaaacacttcaaatagtggctggtgtgtataattgtttgcaattacttggtcccaaaggtgaccaggaactctgttcctaaagaactatggtgtgagaagtaagggactttgggataggtggacttttccctggcattgagtgatgccactccccactgttttttcagggtctcaatttcttagtgaaagtacacaaaggttaggagaaacatgcatggatcaagggcctaggaagtcattttgcctggaaaagaccagtgctctggtgtgtgcatagctacagaggtctgagttaccccgttcccctggcgaatataaggggctggtgatttggggggcgtacctacacctgtgactaagacccaggccttggggggttgtggggctttggtgatggctttagccagcaattgggtggtctctaggcggctgccgattacctctttttggaaggtttcattccatctgcaggagaaacatgggaaataaaaagccactaaatacataagtgcacatatccctctctctgtcttttcctgggagctatttcataccaatttcttgtaaagccctgaatttcggcttaagagaaacagtcaacgtctcctgtagagggaaagggcattcatttcctgggcatcctgagttatacgtgaggacttaagccaattggctgactgggtggaggagcaggtgggggtggaggagtggagcagaatgagtagtctgggatatcggtttagttcggaatctgggagctccattacccatagctcacaggttctcatcagtggggcactgtcctccctgtgctctagtgggtatcagctttagggcccgggctgaccttcggagagggttgaggatgttctctccggccaggttgacggcggcatcgcagctcggcagccccgatgcagcgagctcatcctgtcggagaaagcacacagtgcccctgccccgccctgcgccgcccaactctgccctcccacccgcttccagaggatggacttacccacgtgatccggccgggcccgggctttcgggagaccaacgtcacttcgtggcctctggcattcagcagctgggttagggctgtcccaatgaagcctgtcccgccacctgatcggaaaatacaaattgtttatattcccgtggagttggggtgggggcgccttccgtccccgctgtggcaccctcttccggcgccatcccatctgacaccaggcttctccccacttatccccctcctcgcgatgcagaggtgacacaggtcacagggattagggagattcggcttctcgggctaggaggccaaggccaggttgcctgtgcactagacagtgccctcccggaagcggattcccagtcctcaatctccgactaagcccgcccagcactctccctttctgccctccctcacccacaagcacacgcatagcgactaggacctaacgcgcctgcgtaaagtttagagtttacctcacctcagacgcgactacgacctctctgcgcatgcccctttcgggaagcgcgttccaatcgaggtcgcaatcctgtgcgtgacccttctcggcgacccggaaaaacttgtaaatataggctgggtgtttcaatagcaagcgaggtgggagggattagaccgatggacccggaaagggcggaggagggaaggctttagtgtagaaaaccaaccaaaccaaacccaaaccaacaaaacccttcacctaaaacccgaagctacccagacctcagaattttggatgtctattaagttggcgggtcagtaatgcaagagaacccttccaccggtaatctggatttctttccactcggccagttttttcttctctctctttccgctggagcctttctatcaacatttaaacattccaaagatccccctatattaaaataagccttctccagacctgtttttcctccagctaatattcttttttttttttgccttcatagccaaacttcccacaagtgtggtttccattttctacttcttacttcactcctatagggtttgtgcctttatcattcatttcctcactctccaagaacataagtttcccatgtgtcaccaaatctaatccctagttttcagttagttttcttgacctctcagtatcaatgggcacctgctgattccttcctccctttgaaaatgtttggcttcagtgaaagacattctcttctcggctttctcgtaccttttttcagtctctgatgcttgctccacctctgctaagttcttaaaatattggtattcctcagagctggatcctaggaccttctctttccaatctgcactttaccctaggcatctatgccttgaattcagttaccaggctttaacagaagacatcccaaatctcctatgcaactcggatctctcctctgagctcctaacccctataaaaacttttcactacacatctcttcttggacgtctgaaaccctgttgattttaaatactgaatctctcccagatttatctaagaggggtctttgaaaagttcatggaaaatgtgtattatgctaaaaaatacataggtttccaattttttttttttttttttttttttttttttttttttttgagacggagtctcgctctgtcgcccaggctggagtgcagtggcgggatctcggctcactgcaagctccgcctcccgggttcacgccattctcctgcctcagcctcccaagtagctgggactacaggcgcctgccactacgtccggctaattttttgtatttttagtagagacggggtttcaccgttttagccgggatggtctcgatctcctgacctcgtgatccgcccgcctcggcctcccaaagtgctgggattacaggcgtgagccaccgcgcccggccccaaattttttttacaccaaaataaacttgtactaacttgttatataacatgtctgaacaggatctgacgcactaagaaggctagacagtttgaaaagagcccctatcaaagcaacctgaattctgctaaaattgaagcaagaacaaacatggagtttctggtgaagaatgatgaaattgatgccttatgaaaagtttatgaggacaatgccccaaataaatcatcagtctacaaatgcataactcattttaagaaacgaggagatggacaagcatggtggctcatgcctgtaatcccagcactttgggaggattatgcacgagcctctctcaagcccaggagtttgagaccagcctgggcaacatagcgagacctcatctcactaaaaatttaaaaattagccaagtgtggtggtgcacacctgtagttccagcgtcttgggaggctgaggcaggaggattgcttgagcccagcagttcaaggttgcagtgagctatgattgcaccaccgtgctgcagcctgggtaacagagtgagaacctgtctcaacaaaaaggggaggagatgatgttgaagatac

SEQ ID NO: 1241651 - DNA, 4001 bp, Homo sapiens
ataatttatcataatagagctaaaagctaagaagcaaaccactatgtcactttaacctagtatatcaaatatgtgcccaagtcttttaaaagtaagacttccctggccgggcgcggtggctcacacctgtaatcccagcacttttggaggccgaggagggtggatcatgaggtcaggagatcgagaccagcctggccaatatggttaaaccccgtctctactgaaaatacaaaaattagccaggcatggtggcggtcgcctgtagtcccagctactcaggcggctgagacaggagaatagcttagcttgtacctgggaggcggaggttgcagtgagccgaaatcgttccactgcactccagcctgggtgacagagcgagactccgtctcaaaaaaaaaaaaaacaaaaaagactttccctatgatagtttttcaatattctaattttaagcccttttattcatatctaattgaaaatgtacttgccaagtaaatttgagttccttccaattacatgtatttgttagttgccaattaaatttgtctcctacttttcacttccaaaatcctcaatgaattgtcttcttatgatcttggacaattaacctctctgaatcctgtttttctcatcagcaaaataagagacttggactagaaaatcacaaggtcccatctaactctaaaattctgtaagtcaattaaaaatagctggactctggccgggcgcagtggctcatgcctgtgatcccagcactttgggaggccgaggcgggcggatcacctgaggtcaggagttcgagaccagcctggccaacatggtgaaaccccgtctctactaaagatacaaaaattagccgggcatagtagctcgcccctgtaatcccagctactcgggaggctgaagcaggagaatcgcttgaaccagggaggcggaggttgcagtgagccgagattgcgccactgcactccagcctgggcgacaaagcaagactccgtctcagaaaaaaaaaaaatagctggacttctgaaatgatgttcattcactaccagaggagaaagagaaggaaaactcaacatgcatttatatttaaatctaaaacctttttaaaccaagttaatttggctagttatccatggctttggacggtagaggttgagggagttcaagtgaaaacgagaattccacatccccacttcagtgattgatgtagatttactatgaccttcctcaggcagtacctttaccaccaaatcgggaaacactacctaccgtagaaagaaagcccagtgagatagggctggtcctgctggaaaactgaactctttgtaatcaaaacccaaggcattatctttaccaagctcttttcccctttaacccctttaacttccaaggctgaattacggtgacgtagtcaattgggttcaaagtctaggacactccatatctggcaaggaatgaaacagtaagtccaagggcccagaggcgatgatggacttgggtggaggtgggtggcccaggaggtgggggtgggtgctgggcgagatgctcgaaccaccgttttccacatctttccacctaatccaggggagctggaggaggccgggcccccggccccggcagagcgaagtgggtgagagggtggcaagctcagcactcaacgctccccgcgccggaccgggcctcagcctccagcacacctcgctggccccggggcaccgagagggcagagccgggaccaccccaggatcccagcccccagcccgccgccgccagcccgcccccgctccccgctgcgcacctgcggtcccccaggagcggagacgaggcggccctttcctcactgtccccctgcaggacccgtcgcagcctccgctttgcaaaatctgtcctctccgcccagcaggagcagtccgtggcaccgcaatcaggggtggcgccaccccgccccgggcctcagcgaagacctccgcccggccaacatggctggcgccgcctctgccacgtcaagaggaggggacggggcgtgagggcaggaagggggcaggaaggggcgggcgcagagttaccagggcaggccaccggacccctgagcttgcttaataaccggaggatttgagaaaggcgcgcggcgggcgaaggtaccgagaggggaggagggaggagaggtagcggggaccgagccagaggggcggaagaacccggaagacccaggcagccggacggccgaggggcgtgggaccgggcagagcgggaccgggagagagcgcctttcccagctccctaaagccacagcgtatcccactccctgcaggtcgcagaaagagtggagaactggtgccactcggacaccttagctcaccgagagaaatggagacggcctccaggacatcttaggaccctggttgattccgagaatcacaaatcacatctctgaaaaaagtgaaaagttcattctttcacttagtgcaacaaatgtttactgaaacttactatgtgccagacacaattgagatgctggtaatatgatgcaggcaaagtaggcccagatccctggcccgaaagaattcacgtactatttatgtattttagtcagcctgtcttttcctcctacattgcctctgccacttcaactctgtctccccccacccccaaaacacacacacagtacaatatttggctgattcatcttgatatgttcaatgtttttctttccaagaaaaaagttgaacaaaatgagaaagcaacagattggtaagacattagagcttggtggtctcagacaaccccttccttcagtgaggggaatgaaattaagtgcccatggaattaattgcatatatgacaacgcctaaaagcctgcaaagtttagccatatcaacattttatggaatggaaaaaaagatcaagtccctgtccttgaaagctcatattcatgagaaataagacagcagcaccaggctgggcgcggtggctcacgcctgtaatcccaacactttgggaggcggaggcaggcggatcacaaggtaaggagttcgagaccagcctggccaacatagtgaaacaccgtctctactaaaaatacaaaaattagccgggtgtggtggcacgctcctgtagtcccagctactcgggaggatgaggcagaagaattgcttgaacccgggaggcggaggttgcagtgagccgagaccacgccattgcactccagcctgggtgacagagtgagactgtctcaaaaaaaaaagcaccaaacatatttccctttctataatgtgtgtactaaagttgttttggaaggtggaagaggatgtttgcttgtcaaattgtaatacaatcctgaagagggcaatgggaatcgaaagccaaaaattagtgtaggcttccaaataaagtaggttcaaggtgctaccttaatgaagattcttaacagcacacagcagaggtgttgttataaaggtggaataagtacacccaccaaaagcgacaagatctaagaatgagtaggataaaaagatcttagtccatttaggctgctaacacaaatgccctcaactgggtagctcataaacaacagaaatttatttctgactgtcctggaggctgagaagtccaggatcaagatgccagcagatttggtgtccggtgaggacctgctttctgattcatagatggtgccttctttgttctcacatggcagaaggggctggctagctctctggggtctcttttacaagggtactaatcccattcatgagaggccagccctcatgacctgttcacctcccaaaggccctacctccctataccatcaccttagcagttaagatttcaacctatgagtttggtaggacacaaatattcagaccatagcaacattgatgagaagatccacagaaatcctggaatccagcgaggaataaatcaaagcatagtacctttggtagattcattcatttcatggttcccagaaaggcatctttaccatccagctcaatgaagtc

SEQ ID NO: 1241652 - DNA, 4001 bp, Homo sapiens
ttcatgtgagcacagcactgcctttattaccttttagcatgcacatctacattgttttagttctggctaaggcttctgcctttaccattgaaatgttgtggcacagctttaactatgatggaaatcagagcagacatttcttgaatacagtcctctacctacatcaatacaacccaaggatttaatatatcagtgttaagtcttttattacaacatcctgaaagccccaactgttgatcttcaaatatcttttccactggcatggagctctaagtatataaaatgcagtcaaagacagacagcacaattcctatgctttaattttctttaaactctgccaattaaattcagagggatacacaccgtgctctttcattactgtagttctctttagtgtgaagaatccctcatggagattgttaatctatgtatacctgagctgttccagacctaaaacccaatgtttaacaaacccataagaggaattctgatgcaggaggtccatggtccagcaggtactctactcattaagctcaacagcttcatttcatgctttttgatcaaatattaaataactgctaaaagtgcttcgagagttaagtatagtctaaagatctggtcattaactcaaaccatcactactactggagggaggggagtggacctgaaagaatgatgttggcagtaaagtaattagcatagggttggtgcttttgaaatggtatctcaaaccacatcatggatagaatttaggtttaagcctcttattttagaagcagaatgacgttatggcattgatttacaactaggacaggtaatttggggattcagataaccatctgggaaattttctgttaaaaaaaagctgacatttattaaaaaaagaaaaagctgacatttatactccgtgttgtccccccaaaacgtcaagccacagaacacctgtcctgttaactgaaactgattaaaattccaaagttttactgtactaatttttatttatcaacacttagaaacacgaagttttcatgaacactctcaaaatggaaattttcaaatgtaggcagattaaaacattaaaaaagggggaaaaaagcagaaccagaataaacattagctaactggaaaatcaattcaaaagcacacaaatttctgtatctatataaaacgcatcttataagaaccaagattttcccaaacatcataaaatgactgtcaacaaacatggggcaactcagaaacactgtgacaggtcaccgctttctcaggaaggtttcaaaaaagtaaaaagtggctacgatgagatcaaaagtcttcgtttttaaacagacagaccagggaccatctcaggtgttaagcaaactactgtcaacatcctggtctggatggatcctcctctgccccaaagtgacagctccaggtttgtcaattatttaacttacaattcccaagcccagagttctagaccagacccttcctctaccccagggtcgaggaagctccactcgggctcctgtatcaggattcattcctttggagtcaattccgcgttcgtgagaagagtcgcgcaaagtttgttacgtgggagagaggtgtgggcagggtgaccgccccttctttttccaccccactccaccttcctaaatagcccctttggcgcaggccaagcaaagccaaagagcgagtgacagcccagtgcgagatgtgcccagggagaacggggtcccgagcctggagtccccacggccccgccggctgtagaggctggggggcggaggctctgggccttcagcccgagggggcggatactgacccgaggacgccgaggccaagctcagcagcaccgcacacagcagcagcgtcagccctatccggacccgcatcctcctctcggggccggtgccaacccctagagctgtcgccttcgcctctgccaccacggactcagccaccaccgccgcctcgccgctgctcttcctgctctagtctccttcctccgccccttcccaggcttccctgacccagcgcgcagccaatccccgcccgccgtcgcgggcttctggtccaatcaccatggtctccccgcccacccccattgctccgccccgggggtcattcattggccaatcattgtacgaagctcccacaccagctttctcggttggaccacgactcacggacatggccccagctaattggtagcccctgggttcaaccggaatcagcgcgtgagtccaagactgggagaaagaggctcatccgagactacaattcccagaatgcgcttcatgtgattaactcggggggtgctcttgggaaacgtagtccatcgtagggcaagatttacaagtgcgggtgactgttgaagttagaatttaactaacacctgggctaaatattaactcaaggctatggattcacaagcctttttaaattgacccaaaataaatattaaggaataattttaagaacttgtaatgtgtttagcatcttttcctgttttatttaaaaaatttaaattgggcatagtgataagagcactgagaaaaatgccacagctagttgaatttgaggtgttttttaaaacttagataaaacagtaccgtgaagtacggaaaccagggtgcaactcagtacctgtcctcctttctccgacaaaacaaaaggaaataaatccgctcggcacagattatctcaatacagtatttattttcactaggttcaccagacaataatcataaagaaaatgtgccaacagctttgaaaaattattttaaacacttgtcctcatccttctcctcttgtgagttgcattgttctcttctttcctaactaaagtcaggagaccaggttcacgtgtgtggaggtagaggtgatagtgattgcatcgcaggcacggaaatactctatgtaataagcacgaaatccaggcatgttccaactgagtagcagagcagtgacttggtgtgcctgccctttcttttctcaaaccgtgtcattctgctttccctgtcatccacccacagtcagctctaaggcctagaacctagtccagccaagtgaaggactttggaaaagtctctgctggccatgtgtcttaacacttctgggcatttgtcttccttcctttttttttttgttttttgttttttgttttttgagatacagccttttattttcaggaagatggtaaaaaaccaaccactgtttctcattcacatcggaggagatgaaggaaagaattatctcctccaaaaacttgtcttttcagctacatcaccatttctgtcactaacaatgttccctctgagttcctctgattataaatcatagagtaaaatctggtatattttcctttctttttcatcttattgataatcaagttctatcagtttaaactatgtaacttttaaattgttttattttattatgtacctctgttctcttcctcactgaaaactcccctaatggctttcattttctctcacctggatgatgcacctgagttccagccatactcactgacatcattctccctttaacctgaatcacatatcatggccatattaattttccttaaacactgctttcatatgcctattgaaaattttcaatggctacacttttcacagaataaaaaaaattagaacttattctactcacaaaataggaactgtgctgacagttctactctgttggggaagtaccagggaagaaacttctgccttctacagaagagccagtgattatctgtttgattaaaactggggaaagtttgctgcttagttaagccccaacttcttttttcagttttgtctttactgagtacgtcttatatttaagggttgttctgggtgctgctgcatggaccaaatagccacttccgttttactttccagatttcacattaacacaatcatgtcttcctaagggttcctctaccctttctccaactgcccttgcttctttcacttagccataactctggcatccttcccaat

SEQ ID NO: 1241653 - DNA, 4001 bp, Homo sapiens
aacatcagcctcagcgtcaccatcattgccacacttactaacacctggtgttttacaggcaccgtatcatctaatctgtcctcaaagcttaccctataaggtgcaaattattagccctattttatagatagaaaaattgagccccaaagagcattaaataactcactaaaaatcacagagctacttgcttacaaaactgagatgtaatcctaaatgttttgtctgggattaaacagatttcactccaaaacctgacattgaatcatctctgtgtacaaagctgaagccagaagtcttgaatcagaaaacttcagaggcagcctggctaaatgaagaggggagcatcagtctgtggctaaaattaaaggctctgaggccagattgctccacgtcaacttgctattagctgtgtgaccttggacaagttacttaacctctctgaacctcagtttcctggagatgagaaaggtggactttgtcatagagctattgtgaaattaaatacacataaaatgccaagaagtgcctgctgcgcagcaagttctcgagaataccagttcttgctgctattgctgcaggtcttttagaggcgttctataggaaactggccaccttggccttggtcatctttttgacctgtctccaaaactcagtgcaggaaaaattaaatccttccaacacttcagagatcaaggtcgggtggggtgaggggaggggacagaagtcaaaggttatcatgttttgcccaagagaacagagaggttgagcaactgtctgaagtcaccgagcatcagagaggcctcaagtccagcccaggtttcctgttccccatccagcgcctgagacccaagagaaacagtgacactagggccaggttcaagagtttggggactggagccaggtgcctgagcccgaattatggatggtgtgtgatttggggccagttattcacctctctgtccccatcttcctcatctgtaaaatgggaatcacactagtaactgccttggagggttatgaggcttaatcacgcactgagcttagccgtggcctggtgcagagcgattattcaggaatgccagcttgagccctgggtgacagtgcccctcacagcttcctgtcctccactgggacaggagggcccagaggtccacggtgcatggggaggcccattttgatgtaaggctgaggcctggcacaggtctgttcctggtcatatctggaggggatggagaatgtgagccggcgttcctccccacccctctctggaccttaacctcctcatctatagaaggggagaaagatgcatgcccaagcagtaggagaggtggtgaggcttataggagacaacagacaggagcccccgacagacagaggagctgtgcaaacagaaagaaatggctgcgctttgttgctgttgctgtatcttggctggtgtcccccatcctggggtgccaggactgcagacctagacaccctcatccacttctgcttacaggaaccagtgtatccaccaggaggtaccgaggggggaccgggcaggactgggaaacaggacacaaccctcatggctgctgttattatgaaaataggagctcagctgcagcctctccatctgccctgcacctcagcaggcggatacccactccacaacccccctcctgccccagacctgctgcctgcctgggccatggggagctcagaagcctctccagaacctctcgcagtgaaaggcatacttacgattcactgtcccaggtcagtggtggtgcctgaagctgaggagacagggccctgtcctcgtccgtatttaagcagtggatccagaggggcaacgggggaggctgctggtgaatattaaccaaggtcaccccagttatcggaggagcaaacaggggctaagtccactggctgggatctgagtcgcccgcctacgctgcccggacgctttgcctgggcagtgtacagcttccactgcacttaccgaaaggagtcattgtacctggctcagaaaccacagcgtcctgtgtccaaggtggagggggtggcgtgagtcagacagtctctgggagagtaccacttagctggccctctgctctcactgcagaatccttagtggctgttccactggtagcaagatctaccatttactgagtcaccccaaaatgcctgatgctgaagacttactgccgccctgggagatcagagtgggttagagcccatttgacagatgaggaaacaggctcagagcggagagaccgctcatccaaagttacccagtcagccttagacacaaacaccctcttgatggtcccgatggaaaaatggagcatgactgaggcagacacaaccgtcaggctggcatggggggccgtgagacagggtagaggtggggaagcacatctgtaaagaagagctgtgctgcctcaggcaggccgcttcacctctctgaaccaggaactgtttcacctgcatcccaaagagttggaagtttcattcccaagcatgcttgtgaagtgcctcgggtgaagtgcctggcacacagtaggctctttatgtgggtctgcacagccctctgcttagtctgccccccaggctgctcagagcaggaggaggttcaattttgaccagcctcaggcctgtttctgtttttgctcctggaaaaccagtgtgatccgtatacagcttggagtttctttggatacatggcccccactctggggttgttggaggcctttggagactgctgggggtggaggggaggggaggtacagggttgaggctagtggggccccacttgattgcaatccctttaaaagcctaaatcagattgcatcgcccgctgtgcaacccgcaaacctgcttgggagctggcgtacgtgccgtagatacttgcagagtgaatggatgagtgcatttttgccccttctgtcattcaccagtcccatttatgcctccaccttggggctctaccaggcgagtgacccacaggatcctccagcacacacattcagaccagggaacccacttactggctgtgaggcctcaggtgagttgtttaaccgctccgagcctcaatttccctatctgtaaaatggggatggtgacggtatgtaccttgttgagctgctgtgaggattaaaatgcaacagttcaaggaaagctcagagacgggtactgggtgtgcccagaaagcccctcctgatgctgccctccctcccccgtgtcaggggctggtgtcactggggtggggtgggccacacttgaagagctttcctccaggcagtctctcattcagttaccctgtgaagggagtaggtaccaccctcctttcaggcagcgggaaactgagctcagactcccctccccttctctctgagctcccttccctgcagctccatcccctggcttcagggcccctgtccttcccctgagctggctgaatggatattccgctgctctacatccactcacagctccagcactgggctgtggttgaggtcgcctgccctcggtagctcctgggcatttcttcccctctctgggcctttgttttcccatctgcacaatgacccccactctaagccctgctgtccctcccacctgtggaactgagtgagcagcagcagcaatgtcccacctttcctgctctcctcaagctctcctcaagctctgtctcttctggcaggcacaggagagtggcctgaaggctggcaggaggttgccgcccctccaacctggaattcctggcagcagcagcggctaggccttcctcggaggcccgaccccctcctccttcttggttcagctcaggactctgagggttgctgcgtggaggcagtgcatgccctgggcacagtgcccagttcctgcccacccaggaagtagacttcgggtggaggcagtaggctggggaggggcggggagcttggacaggaaggagccttgctcattgcccggcagacacaagactgggccctcataaactcagacagcccggc

SEQ ID NO: 1241654 - DNA, 4001 bp, Homo sapiens
ttatcggaggagcaaacaggggctaagtccactggctgggatctgagtcgcccgcctacgctgcccggacgctttgcctgggcagtgtacagcttccactgcacttaccgaaaggagtcattgtacctggctcagaaaccacagcgtcctgtgtccaaggtggagggggtggcgtgagtcagacagtctctgggagagtaccacttagctggccctctgctctcactgcagaatccttagtggctgttccactggtagcaagatctaccatttactgagtcaccccaaaatgcctgatgctgaagacttactgccgccctgggagatcagagtgggttagagcccatttgacagatgaggaaacaggctcagagcggagagaccgctcatccaaagttacccagtcagccttagacacaaacaccctcttgatggtcccgatggaaaaatggagcatgactgaggcagacacaaccgtcaggctggcatggggggccgtgagacagggtagaggtggggaagcacatctgtaaagaagagctgtgctgcctcaggcaggccgcttcacctctctgaaccaggaactgtttcacctgcatcccaaagagttggaagtttcattcccaagcatgcttgtgaagtgcctcgggtgaagtgcctggcacacagtaggctctttatgtgggtctgcacagccctctgcttagtctgccccccaggctgctcagagcaggaggaggttcaattttgaccagcctcaggcctgtttctgtttttgctcctggaaaaccagtgtgatccgtatacagcttggagtttctttggatacatggcccccactctggggttgttggaggcctttggagactgctgggggtggaggggaggggaggtacagggttgaggctagtggggccccacttgattgcaatccctttaaaagcctaaatcagattgcatcgcccgctgtgcaacccgcaaacctgcttgggagctggcgtacgtgccgtagatacttgcagagtgaatggatgagtgcatttttgccccttctgtcattcaccagtcccatttatgcctccaccttggggctctaccaggcgagtgacccacaggatcctccagcacacacattcagaccagggaacccacttactggctgtgaggcctcaggtgagttgtttaaccgctccgagcctcaatttccctatctgtaaaatggggatggtgacggtatgtaccttgttgagctgctgtgaggattaaaatgcaacagttcaaggaaagctcagagacgggtactgggtgtgcccagaaagcccctcctgatgctgccctccctcccccgtgtcaggggctggtgtcactggggtggggtgggccacacttgaagagctttcctccaggcagtctctcattcagttaccctgtgaagggagtaggtaccaccctcctttcaggcagcgggaaactgagctcagactcccctccccttctctctgagctcccttccctgcagctccatcccctggcttcagggcccctgtccttcccctgagctggctgaatggatattccgctgctctacatccactcacagctccagcactgggctgtggttgaggtcgcctgccctcggtagctcctgggcatttcttcccctctctgggcctttgttttcccatctgcacaatgacccccactctaagccctgctgtccctcccacctgtggaactgagtgagcagcagcagcaatgtcccacctttcctgctctcctcaagctctcctcaagctctgtctcttctggcaggcacaggagagtggcctgaaggctggcaggaggttgccgcccctccaacctggaattcctggcagcagcagcggctaggccttcctcggaggcccgaccccctcctccttcttggttcagctcaggactctgagggttgctgcgtggaggcagtgcatgccctgggcacagtgcccagttcctgcccacccaggaagtagacttcgggtggaggcagtaggctggggaggggcggggagcttggacaggaaggagccttgctcattgcccggcagacacaagactgggccctcataaactcagacagcccggcatgtcacctgttgtacctgccctttcagctctgtgacccgggacaagtcaccctctccctttgagttgccgcaagaggtacagtcacactgcccagaggattactagaaatgacaggcctcgccctcctggcacagacctggcaccaataactggcaggtttctggggccagctgcagagggaagaggactgagccacctatgaaatgcccagtgggcagccccacagttgggcaggtctgtgtgcactggggaggtgtgtgtcataggacctggctgggtgcagaagggattgcagtggggagctggggcttttggaggaggaatgaagaaagcatgggtgggagcaggtgaggcaagtaaggggctcagaatttggggtcctgctcttttggcagggctctaggctcagcccccgccctgctctggacatccatcctgggaggaagggctaggataatctggaaaaacgcaccaggacaaaatcccgggggttgtggtgggaggggtgggagtactcagtggccattcacaaggatactgtgcccccaggaaccccaggacatgagggggaaagtcttgtccacctggttacttccacaattgtctattgcagcatctgggctgatccccccagaggaaatgcatcatgggaagatcctgtgagctggtcatgagtaaggggcatctgggggaggccctgccccaccacagggccctgcctggagatgggagcctcgtggtatgggctggatagggatgtgagagtcgagatttggggtctgcagcaaggaatcgggtaagggggtgaggtgtgccagtggccctgggccaagtaaatcaagactgagtggctggtcaggagaacaacagtggacttcatgggagctgaactcattggcaaagtgcccccggagagtgctggccaccccacaaacacacacaccccatgcacaccctcactatgcaccctccttcccaggcaccagcttccttctttgagagtcagtgcaggtcactggttaaggcgtgggttcgggatctaatatctggggccaagccttagctccatcgctctttttgtgagctcttagacaagccacttaacctctctgtgcctcggtttcctcatctgtgagataggaagactctaagaagagtcacttccatcaggactgtgaagatcgaatgagataataacatttaagcacttcgggcagcctctggcatgtgatgggccccaagtcaatgctaaccaccaaaggccatgacctttggggatgtgtcctggctctgaaaaaccatatagatgggtctcaggggtctaagtgggggaacaactgctgcgtttggccccagatttggggagcagcacctgttgttgagggacacctcctcagattcaaacttccattttttccagaaaaggctgtcaatcccctctttaggggccgtgctcattttggctttccgaaggtgaagggccaggtgccttcagcatctttctgagcacctgtgacatgcagaggatgtggggtgactgcagctaggtggacttggatccgggggaggccctcagttctctgagccttggtttcctcatctataaaatagggataaaagtttctttcccacatagctcttctgaggcttagatgaggcgatgctggtggggtgtttaacacagagctctgttagcataatggacacttgtgtctgtcttcttataactcatttaatgaatgaatgaagtttgcaccattttttcacctcctccagtcacctttcaaattagccaacttgcaaaaccccagcagacacactttccttctgtgtgtaatctcctgagccacttcctgtgtgttggggaggggagg

SEQ ID NO: 1241655 - DNA, 4001 bp, Homo sapiens
ccgcaattcatacaacccacttctgggctccctccactgtggcttcatagagccctcagccacctgggctgcatgccggttctcactgtcctaggctgcagtgtgggagctacacttcttcaccgttagctgtccccttctctgtcgccttttaggctccctccacatccttggacacagagcctggctcctgaatacttccatgttttccatccaaatacatggcttgggactggcctgggccacctggctgtgtccaaactcagttctggtgttcagccacactgcaggcctgatcccagaggctggctgggcagaacccctgggacacctgccctccctcatcctctctctgggcccactgccctgggagggtctgggtggggtaggccacccagcccagtgagcgcagggtggatgctgccggcctcacagtagttcccatcagcagagacccttattcttgaccaaggtcacctgcggcaaaatgtattgacaggcggtgctgccaggcctcttcctgatgcaggggctgagtccttatctatgcctgggacaaaaccgcctccagcgccagggcccagcatgttgccccttgctcgggctgaatggcaccccggaattcagggcctcactctgcagtctgaacggcactaccctctcccctgtagaagcagtgaaatacttccactgtgtttcccaaaggacactgttgaggaagctctttttgactctaaatggcaagcctgcattcaacaggtcacccaagtattgtaaacgttgggtaaatagctctttcagtgtaaacgcagcccagtttcacgcttttattgttatggactgaatgtgtcccctgagaattaataagttgaagcccgaaccaccattgtgatggcaatagagttggggcgcttgggaggtgattaggtttagatgaggtcgtgagggcaaggcccctgtgatagcactagtgctgtcataagaagagagcagagtccccctccgcacctcctctccatgggaggacacggtgcgaaggtggccatctgcaagccaagaagacagccctaccagaatccggccacgctggcaccctgactcggactttcagcctccaaaactgtgaaaaatcaatggctgttggagccacccagcctgtggtgttttgttagaggagcctgagctaaaacgattacgtggcatcatttagtgctactttctacattaagaccacacagaatactcctgaattcaaggttacttctccctgtacaatggtcaggaaattagcccagcacgccaactagatgtcaccacctccaaatgctgagtcttaccttcctgttcttggagcttgtcctgcagtctgcagtggtagcccagtaattcctgggtgctcctggacatatatcgcctaaggtctttgtaaagtctttgctcatctacccaaccctttggagtctaggccaggagctcagggggtgctcctggactaggacaccatccagcatggtgaggacgcaccttcctagacagaacctgggcagtaaggaatcaccagctcacctgccacttctcagccctgggacagcacacatccctgcctcccctcagccctgggaaggggagacctgcttactccggcagtgagtggtggtgggtgaaatatcaagcctttcaagcctctttcccttggcctccttcctgcagaggagccccttgtgtctataattcgcctcttaccccactccagctcccaatctgtatgtacagtccctgtggagtgtaggatggaggtctttgcactgctcagccacacagccctcacgttggagcccgcccagggatgataccatccttcccggtccctccctgattagactcattgaaggtctcctgtaacccactgcctcttaccagtgtgtggccttgggtcctggaaaagtccttcatttagagcagaaaccaaagcttcagctttgcagcccagaaccttcagcaaatatttgctattccaaagtatgatcccctgtgggacggttactgattaacatcctgcttgtgatggtggagtttctggaaaaccaaagaccaagtgggaggcttcccatactccccagctcctcctataacccggaatatgacccaaatcccatcacgagagcttctgccttgcaactcaaggcttcgccccagtaagattcagctctgtctgggtggggtgtggggaatttgtcttgagctgttctaggtgctgaacacctcgagaaagaaggcactgggggatcccatggatgcttcctgagtccccagcctggtactggacactatgaggatgtgggttggggggcacagcagaaatgttcaggacctgttctctcagcccccaaggaactggtcaatccagtgggggaggcagacaggtaaatcactacttagagtacatagctcctttcaaggtaaatttcctgcttcacaatgttgctggacttgagactgaatcctcgggcactcagagttgaggctggtggagaccgtttatggcaaaacttttcagacttctcagactctcttttttaatatatataagtaaatattttgttatgtgccccttactactaccattgaagtgaaacgtatagctaatataatctacccacaaaattaaaaaaaagataatgctgtaatgataatatggaggcataataaaagagaataatgtgtccctgaatatggcagtgctgtggcctaagggcctgggcaggtgcagtgaggctgtccaatgtggagcccacgggaggtcgcttgtgtgctgctcactgctggccggtgaacaagaaaaccaatggtactaccagggatagagcttttgaaatggtaaataatgcttggtaaagtttcaaacaaaataaaatatagatctttccctgatttacacggtcattgtcttcacagaaaatgcagtgtgtagtaaaaccttggataaatattatatttttatatgaaataaagcagccccaggactgacagtctaggctcagataatcccacgtgaacttgaggtggacatgtgagtcctggggaacccggcggcctcttcatcatgggagactgccctgcgtgttctggtatgtctggcattgctaaccctcaatccttaaatgctagtagtactccccccaaacgtttgtgaaaggcagaagtgtcccaacaagtttccagagtgttccttttgggcagtacctgctctgttaataggcagttctttaagaggtgaaagtgagggtgtagaggggccaggctggactcacaccacgcacaggagtcagcctttgcctgcccatccaggtcgagctctgcagctgcgggcttgtggattcccaaaaagcaggggctgtttcctccaggcctgggaaggtgtctgctttgctaaatgtctgagcggagccagcgagtgtgcaggtcttagggcacagggtttctttctttttttttttttttttgagacggagtctctgtctgtcacccaggcactgtctgtctcagctcactgagacctccacctcccaggttcaaacagttctcctgcctcagcctcccgagtagctgggattacaggcgcctgccaccacgctaatttttctatttttagtagagacggggtttcaccatattggccaggctggtctcaaactcctgacctcgtggtcctcctgccttggcctcccaaagtactggaattacaggtgtgagccaccgtgcctggccagggcacagggtttcagaaatggatccttataaaggaaggcagcggagtatattgggaagattgtgaaggcttcagccaggccattgcctcctgccctggtgtgaatctgaggtcctctgctcccggttcctagctgctgggatgtaagttaacctcaccgagccagcctttcttcctctgttaagtggccagaactcagactctgtcctatgaatatctctgcagcaccgag

SEQ ID NO: 1241656 - DNA, 4001 bp, Homo sapiens
tcactgccctgaccatctggtcgtcaggctgcccatccagatgggtggccggccttgcccagtgccctgtttggctggggattggagtgcctgcatgcccgttaggcaaggaagggggaaagtattggagctttcctggattttttatcaaaattctctttgcactgcacctctgctacacagttccttggaggtcttccttccttccttccttcctatagctgcagctcccgggtagcaggaggccccgcaattcatacaacccacttctgggctccctccactgtggcttcatagagccctcagccacctgggctgcatgccggttctcactgtcctaggctgcagtgtgggagctacacttcttcaccgttagctgtccccttctctgtcgccttttaggctccctccacatccttggacacagagcctggctcctgaatacttccatgttttccatccaaatacatggcttgggactggcctgggccacctggctgtgtccaaactcagttctggtgttcagccacactgcaggcctgatcccagaggctggctgggcagaacccctgggacacctgccctccctcatcctctctctgggcccactgccctgggagggtctgggtggggtaggccacccagcccagtgagcgcagggtggatgctgccggcctcacagtagttcccatcagcagagacccttattcttgaccaaggtcacctgcggcaaaatgtattgacaggcggtgctgccaggcctcttcctgatgcaggggctgagtccttatctatgcctgggacaaaaccgcctccagcgccagggcccagcatgttgccccttgctcgggctgaatggcaccccggaattcagggcctcactctgcagtctgaacggcactaccctctcccctgtagaagcagtgaaatacttccactgtgtttcccaaaggacactgttgaggaagctctttttgactctaaatggcaagcctgcattcaacaggtcacccaagtattgtaaacgttgggtaaatagctctttcagtgtaaacgcagcccagtttcacgcttttattgttatggactgaatgtgtcccctgagaattaataagttgaagcccgaaccaccattgtgatggcaatagagttggggcgcttgggaggtgattaggtttagatgaggtcgtgagggcaaggcccctgtgatagcactagtgctgtcataagaagagagcagagtccccctccgcacctcctctccatgggaggacacggtgcgaaggtggccatctgcaagccaagaagacagccctaccagaatccggccacgctggcaccctgactcggactttcagcctccaaaactgtgaaaaatcaatggctgttggagccacccagcctgtggtgttttgttagaggagcctgagctaaaacgattacgtggcatcatttagtgctactttctacattaagaccacacagaatactcctgaattcaaggttacttctccctgtacaatggtcaggaaattagcccagcacgccaactagatgtcaccacctccaaatgctgagtcttaccttcctgttcttggagcttgtcctgcagtctgcagtggtagcccagtaattcctgggtgctcctggacatatatcgcctaaggtctttgtaaagtctttgctcatctacccaaccctttggagtctaggccaggagctcagggggtgctcctggactaggacaccatccagcatggtgaggacgcaccttcctagacagaacctgggcagtaaggaatcaccagctcacctgccacttctcagccctgggacagcacacatccctgcctcccctcagccctgggaaggggagacctgcttactccggcagtgagtggtggtgggtgaaatatcaagcctttcaagcctctttcccttggcctccttcctgcagaggagccccttgtgtctataattcgcctcttaccccactccagctcccaatctgtatgtacagtccctgtggagtgtaggatggaggtctttgcactgctcagccacacagccctcacgttggagcccgcccagggatgataccatccttcccggtccctccctgattagactcattgaaggtctcctgtaacccactgcctcttaccagtgtgtggccttgggtcctggaaaagtccttcatttagagcagaaaccaaagcttcagctttgcagcccagaaccttcagcaaatatttgctattccaaagtatgatcccctgtgggacggttactgattaacatcctgcttgtgatggtggagtttctggaaaaccaaagaccaagtgggaggcttcccatactccccagctcctcctataacccggaatatgacccaaatcccatcacgagagcttctgccttgcaactcaaggcttcgccccagtaagattcagctctgtctgggtggggtgtggggaatttgtcttgagctgttctaggtgctgaacacctcgagaaagaaggcactgggggatcccatggatgcttcctgagtccccagcctggtactggacactatgaggatgtgggttggggggcacagcagaaatgttcaggacctgttctctcagcccccaaggaactggtcaatccagtgggggaggcagacaggtaaatcactacttagagtacatagctcctttcaaggtaaatttcctgcttcacaatgttgctggacttgagactgaatcctcgggcactcagagttgaggctggtggagaccgtttatggcaaaacttttcagacttctcagactctcttttttaatatatataagtaaatattttgttatgtgccccttactactaccattgaagtgaaacgtatagctaatataatctacccacaaaattaaaaaaaagataatgctgtaatgataatatggaggcataataaaagagaataatgtgtccctgaatatggcagtgctgtggcctaagggcctgggcaggtgcagtgaggctgtccaatgtggagcccacgggaggtcgcttgtgtgctgctcactgctggccggtgaacaagaaaaccaatggtactaccagggatagagcttttgaaatggtaaataatgcttggtaaagtttcaaacaaaataaaatatagatctttccctgatttacacggtcattgtcttcacagaaaatgcagtgtgtagtaaaaccttggataaatattatatttttatatgaaataaagcagccccaggactgacagtctaggctcagataatcccacgtgaacttgaggtggacatgtgagtcctggggaacccggcggcctcttcatcatgggagactgccctgcgtgttctggtatgtctggcattgctaaccctcaatccttaaatgctagtagtactccccccaaacgtttgtgaaaggcagaagtgtcccaacaagtttccagagtgttccttttgggcagtacctgctctgttaataggcagttctttaagaggtgaaagtgagggtgtagaggggccaggctggactcacaccacgcacaggagtcagcctttgcctgcccatccaggtcgagctctgcagctgcgggcttgtggattcccaaaaagcaggggctgtttcctccaggcctgggaaggtgtctgctttgctaaatgtctgagcggagccagcgagtgtgcaggtcttagggcacagggtttctttctttttttttttttttttgagacggagtctctgtctgtcacccaggcactgtctgtctcagctcactgagacctccacctcccaggttcaaacagttctcctgcctcagcctcccgagtagctgggattacaggcgcctgccaccacgctaatttttctatttttagtagagacggggtttcaccatattggccaggctggtctcaaactcctgacctcgtggtcctcctgccttggcctcccaaagtactggaattacaggtgtgagc

SEQ ID NO: 1241657 - DNA, 4001 bp, Homo sapiens
agcctgagctggagggggaactgcagtgcaaacagggttgtctctactcaccctgcccaatgttccatgctctcctttccctttcagtcccatcccccgaccctacacccatcttcaggttcttgcagaagactcatgaccacattgctactgggaccctcccaaatcttgattttctcagtaaggaaggcagccttctcttctcccttcaaatccaactcttccaccgttccattcattgcgcagcagctgtgcactgctgaccacctctatcactcctcatcagtttgtcctgataacatttgtgtcttaactggcacctttaataattttttgcctaaaccaatgacttctggatcaattgcaaatgctgcgacagtgaaagagagattatatttttgcaaatgggtttgtagcccctggtgccctaagtagcctgccaaacgacaaaggccaggtgtcaggagggacgaatgtggtctcattatctgctatgttgaaatgcgtttgctggtcaaagtactgtgggcacgcccccaaggctacgtcctccctttctccagcacagtgtgggttcacttaatgacagccccagtgaactcccaatgtgggttcacttaatgacagcttccatacacttcagattttcttttgatcgaaaatttggaagatgcaaatcaatttaaaaattgttctacccctgggtaaaatgaagtgcctgtaatgaaactatttctggtttattctttttatcccattgaactcagcaccattttctactccactgcaccccagggactccctgacttgcaaatgacctatttcccaaaggggattcaattgtaaatgaggggaccttggaatcaaggctgtgcagtaactcactgcctcatactgtgcaaaagcagctgtctgaaactcagtgtctccctttgcaaaatgcaaatgatattgcccacctcctgggtgtggggccatttcgggattatatgacagtcaaagtacaaagctccaggcatgccgaaagtactcaatggcagtttttttccctttctatcaagcctggggtaatgatgcccaattcatttcttaattcctcttccagaaagatcccagaggaaaattaagaactatattcgtgaagtataatattctcacttattaagggtttatgaagtgataggatattacatgcattgtaacactggctcctgacaaaggcagggggagggctgtgtgtaaaggagatagaggtgacattttggatcagctcaatgcctggtggagggatgctgctggagtttagttggggaacagctgggctcccgaaagctcttgaagcacccagaatagtcacattcaatgaagagtggtcctgcccaaataccggtagtgcccttgttgagaaacacttgctttgtcttatttaatttaatccttatgagaacctcaaagcacagggattattagccctactgtacacagggaatgactgatgcagggttaggacaagccgcctggtgagagcaggagcaagactcagattccagaccagagctcctaagcacccttttcacaggacagcttctagtaaatttgctgcagcatcattgtcattgtgctttgggttgtattgtttcattttcttgtctaactggcaggaatatttgggattcttctctcaaaattcttgaagttttccataaaaggagattgaaaacctgaagtctctcctttaagactcagagggagtacatggttgcatttcttcttcagggacttacttctcccatccttaccatcaaagccaggaacacacacacacacacacacacacacacacacacacacacacacacacacagagacagagagagagagagagaagggagtgaggcagtttctgcccctgccctcattttgggcacaggcaaagtacttacagagcaaaggcactgagcaggggcccaggtcttcagcactgcatcacctctacccacaggaaaatggtgtttgaagatgacagcaacctggtcaatatttgtcaggtcaattctgggaactggtatgaagacaatgcacagcaaacaggaagggctcttttttttcaaagtatctgccctgactgcctgtcccacaaacaaatggtggattgtgacttaagcccaggctcgctttgagaatattctgatgctggcagcaggtggtggtgtggttgtggctgttgcctgtgtctgtggttgtatgatccaggctgtattctttttttttctaacttttttatttccataggttttgggggaacaggtggtatttggttacatgagtaagttccttagtggtaatttgcaagattttgatgcactcatcacccaagcagtatacactgaacccaatatgtagtctttcatcccttaccccgctcccactctttctctcgagtccccgaagtccattgtatcattctcatgtcttcccatcctcatagcttagctccacttatgagtgagaacatacgatgtttggttttccattcctgagttacttcacttagaataatagtctcaaggtccacccaggctgatgtgaatgcaattaattcgttcctttttatggctgagtagtattccatcatatatatatatacaccacagtttttttatccactcattgattgatgggtatttgggttggttccacaatcttgcaactgcaaattgtgctgctgtaaacatgtgtgtgcaagtatctttttcatacaatgacttctttcctctgggtagatacccagtactgggattgctggatgaaatggtagttctacttttagttctttaaggaatctgcacaccgttttccataggggttgtactagtttacattcccaccagcagtgcagaaatgttcccttttcaccacatccacgccaacgtctattattttttgattatggccattcttgcaggagtaaggtgatatcacactgtggttttgatttgcatttccctgatcattagtaatgttgagcattttttcttatatttgttggccatttgtatgttttcttttgagaactgtctattcatatctttagcccactttttgatgggattgtttgttttttcttgctaatttgttggaatatctctggatattagtcctttgtcagatgtatagattgtgaagattttctcccactatgtgggttgtctgattactctgctgactgttccttatgctgtgcaaaagctctaaagagcttaattaagtcccacctgtttacctttgtttttattccatttgcttttgagttcttgatcatgaaatccttgcctaagccaacgtctagaaggatttttccaatgttatcttctagaatttttatagtttccagtcttagatttaagtccttgatccatcttgagttgatttttgtataaggtgagagatgagaatccagtttcattctcctacatgtggcttcccaattatctcagcaccatttgttgaatggggtgtcttttcctcactttgtgtttttgtttgctttgtctacgataactgggctgtaagtatttgggtttatttctgggttctctattctgttccattggtctatgtgcctatttttataccagtaccatgctgttttggtgattatggccttatagtatagtttgaaattaggtaatgtgatgcctcattttagtctggctttggctatgcaggctcctttttggttccgtatgaattttagcattttttttccagttctgtgaagaatgatggtgggattttgatgggaattggctctgaatttgtagattgctttttgtggtatggtcattttcacaatattgatcctacccatctatgagcacgggatgtgtttctatttatttgtgtcatctatgagtttttcagcaatgttttgtagttttctttgtagagatctttaacctccttggttaggtatattcctaaatattttatttttttgc

SEQ ID NO: 1241658 - DNA, 4001 bp, Homo sapiens
tcccgaagactctttttactcgtctgctgaatttggataaaaccatccacttcctgggatatttggaaagaaaagagaggaacccagccccacagagttttgcaagtggggaatgtaccagcccgcagcatccaaggtggcgccgagagagtggggttcagggaggcctcggatgggagccttggcatgatgccgccagaactttccatctgcccttgcctttgctccaatgtgtgtgctggctctgttcttgctctctctgcaagctggcttcctccacatgagctgggcttccaccagggcagcaacactgcaaagagtgatatgagatagaggttactgcagggattaggtctcccagtggtgggagctggggagaagtctgtggaaggctgtcatcctgggtctggtggtcagcccagaacctctgcaggtcagccaggtggggagggagaagaaaacctgggtatgagttggggcagaatgaggcctggtcaaagcttaaaggacagaccagaacccacatctgtcactccagcctggctgacacagtgactcgaggaaggggccggtgttcctcacctgacctgagacctggagaactgaaggaggaggcctggtgagggctggaagagcccttggcacagatgctgttcacaaacaccaggtgcaccagcaggtgaaggggggcagcgcctagcaccccacaccaacctcagagtgttcctgcttaacttctgccttccaaaccagaaatacctttctctcgtagccaactcttacctggaaccacagagggtgagaattcgtcactacactgacacacctggctggaactatcacccccaacatcttccaaagcttataccttacagtttctgtccccaagacctattgcctttgcactctctgaccccaggtcctaattccaaggctcagaccatccaaacctggttcaggtgcccctgtttgggtcaaacacttctgaacacaggggtcagggtagaacaggtgatgaaatgacagctcccacaggcaggcacctagggaggggcagtttctataggaagggcaggaaggaaaaactgcatgtgtcaccgcagctattgcacacacacacacattaaaatagtaaaatagggataccaagggggaggaaaaagcctcgggggaaaagcagtgaacttgctgaccataaatgtgaacgaaactgccctttgggggcacagcacatggctctctgcgtcccagcagccaaggaccacacgtagttccacagctctcagcataaatgtgtgtgagtgtcacttcctcactctatcacaggcatcagacagtgggaccatgtgtagcacagccttgcacccaggcagtgcctgtcgcagcagggagcacagtggagggtttcaaatgtgtgttttgggggctttttgccagcagcgtcttctcgctactcacctctgtctcccaaagcaagcatggcggctttcctgggttcttccctacaagaggtacctcctagatttctggttagctccctctataacttcactcaccttattcatttacaaacgcgggtttggcaccgactgtgcaccagcatggtgtcttccctgtagggccgatgagtcagagggagtgatactgatcaccatcgtcccagtgtgtctacggatctggacgcttgacacctggggatgcctgcatcccatattttcccatatgttgggctgatatttttaaaaaacctctccccacatccccagtactggaagcttttgctctttttttctcctggggatgagtgatttcccaacttaagaagaaggcccagcgcctgggactgtgggttctgttctggagtagagcctgctcggtttcagatgaagaaactggtttcttgtgctgctgttttgcttcttgccatgttcagtcccctcagatgccagccagacatccggcagggggctggtgaggactctctgccaggcacctgggagtctccctaattatccagtgatcctcccagcttgtgacacctccagtctcccagagatagttcaggctgaaaggctgcattggaatgtgtggggaagaaatggccctttgaatgtgttcaaagcctccgtggcccctggctggggaaagccaagggcagttgtgctcagcaaacttcctggggagcctgtggttttctcacggggaaatgggaaaatactggcaagagagaactttgtcattgttccctgcatttaagcaggagggaaaagaaaagaacatgaaagcatgtccctggcaagcacatcaaattaaatgtcaaaaatatcccaatgctcataattcaccagcggccgatgtctgaagttacagcttcaggcatttatcacagacagcactttgaaagggaaaagtcacaagttttgatgtcagagcagcttggctttgaatcctggctatattcctgattagctggatgtgtctggatagtatgtttaacctcttcacacttcagttttttctgtgaaatggacttcgcacaccccacaggagaccaccatgaagaatgtgaacatcgagttagggcttagaagccttatttgctaataataccaaaatggacattctaggtttatagtgagggttaatgagattatttaaacagatttttgtggttttgttcttaactatatcccttgaaccttgaaccttgcacataaaaggcactcaataaatacctgttgaataaattaacaaataaacatatgaatgaagaggtgttatttccctctctaaactcctttgcctgtgacagaaaattcaagtttgttaaatagcaacagtgaaaaaatgttgggattgtaatggaacgtctaccactcacctgttcagcctctcttacctttgcattagggaagggctcattcttagccttttccaccccaaacaagcccttcttgtctttacacactgtggaccttgggtttgtaatacctgcttcttgtccatctgggaaattctgacccagcttcaaagtttagtttacaagtcactttctccatgaggagagggtgatggtgccagcagtggtggtaatattagttctggtggtgaaggtggtggtggtggtgagagtggtggtggttgtaatggtgatattagttctggtggtgatggtggtggtggtagtggtgagagtggtgatagttgcaatgatgataatagttctggtggtgatggtggtgctggtgttggtggtggtaatgaaggtggtggtgatggtgctgctcgtggtggtgatggtggaaataatagttgtgatggtgatggtggtggtgagagtggtggtggaggtggtgatgatggtgatgatggcactgtggtggtgatgaaggtggtggtggtgatggaagtagtagttgtggtgatggtgatgttggtggaggtggtggtggtggtgatggtgttggcgggggtggtggtgctggtaataatggaggtggtggtggttatggtgatgatggagctggaggtggtgatgcaggtgatgatagttgaggctggtggtgatagttgccatagtgatggtggtgttgatggaggtggtggtgatggtagtggtggtggtaacggtggtgataataattggggaggtgatggtggtggtagtagtggtgacggtggtgattatagttatggtggttacagtgggtgatggagaggatggtggtggtggtgatggaggtagtggtggtgacagtggtgataatatttgtggtggtgatggaggtggtggtgatggtggtggtgctggtgatggtgttgatggagctggaggtggggatgatggagatgatggtggtgatggagatggtggtggtgatggtgatgataatagttgtgatggtggtggtgatggtagtgatggaggtggtggtggtgatggtgatgataatagttgtggtgatggaggtggtgatggaggtggtggtgatggtggtgat

SEQ ID NO: 1241659 - DNA, 4001 bp, Homo sapiens
tcatctgtaaaatgggattcaaatggaactatctggctgctggagagcttttgtgagaatcacctgaagataaagaagaatccagagtttctatatacttgaactaattggcaaaatcctggtgccacagaagaagcatttatatttggctctgtttattcgatagcggcttggggatggttaatgaaagttaatgagtaaaatcggaactccttatgccttgccacctttggctggaggcttctgatctcatgcagagggctggttctgttgagatacgaggacagcattgtgcttacttctcctgaggcctttccctggatgagcaggggagatgcagatgcctaggcagactcccctctgccgtaccaagaaagcttcaccatcgaggcatgccaagtgggcaggtgcctcagggacccttgagctcagctttctcattggacagaaggaggagacgggggctggagaggggcctgggcctgccctaaggccacagcagagcccggacctcagctgtgctgactgcagcctggctgctctccactgccctcctttgcctcaagagcaagggagcctcagagtggaggaagcagcccctggccttgcctccacctcccctcccctatgctgttttcctgggacaataggagctggcttagaatgccctggggcccccagcaccctggcattttaacccctcaggggcaggaaggcagcctgagatacagaagagtccatcacctgctgtatgccacacaccatccccatggtatctgtcacttgtttaatccttaaaacaacctgacagcaaggatgctattttgtccatgctaagacgggaaattagcacctcagagaggtagaatgcattgtcctttatcaaaagctagtaagtggtagaggcaggatttgaaccccaatattttagacggcaaagctgacactgcttctgggacactagggtcgtctaaagtatgttccatgaaactattcctttatgcatgtgccacaaaatatttttctggctttagcatgtgggaagcatttcatattctgccccctccctattagggatttccaatgagtattaggacaataaaggctctgacaaggtctgtagagaagatgatggtttggctgtcttaaactcatcattcttcaatcttgtttgatcatggaaagtattttattgtttgtgtttggaaaattgcagaatccatgttaaatgccctgccatatctcatagtacattgtctaggaaagcttaagaactagtaatttgagaatatgtttggattatttcagtggaacgggcttggacaggtagtgctaccttaccgtgaaaggaaatgtaatccaccagggcaagacttgtgtcttttttcaggtgtttgaccaaatccactacttttcttccagttcttttctccacataattgttgatctgctctttggcctcctcggtgtccctgaagttgatggaagaggcttctgagtggtacagcttcttggtatcctccaaaaacgtgtccactagcttcatactcttgttaacaaacaggctactgccggtggtcagctggagccgggtgtctggcctgctgagggcttggagaacttgctggaagcattcgtggatcttggcctcaggcgtctctgtgaggttgacattcaggccttccaggatctctgtgcgagtgtcagccttggtccccagggagagcattgcaaaggccatagccacgcttgttggggtgactaagacattgctggtttgtgatagatcagccagctctttgtacaaatcaaaggcgaggtcggtgacgttataggagatcttctggcaagcaaggtcctcccagtccccttgatcatggtgggatgtatccgtcttttgggcagcatcttcctggggatcctcaaccagggagctggggaccaggcagcacaggcctgccagcaggaggacgccccatgagacagagaatggtattgtcctgcaagacagaggcagagggccaggccccaagtcagggcacatgatgactcccagtgaccagggactgacattgtgtgattgcaaccatgaattattaaacatccaccatgtgcccagcccattgcaaacactttcctacaccatcatcattgaaagaataagaaagatagcaagcacgtgtaaggtacttagcttatgccaagaactgttctaagcacacgtgtgttaactcattgctttcttgtaacaatcctgtgaggtggtaatgctactatcttccttttacacatgaggaaaccaaagcccagagaggtgagactcaagcccaaggtcagcaaacaggaaaagcaagcatccctcagcctggccggctgggtcttgagtccttgctctctgcagctccacttacctctgtaatgaccttgaggtgcaaatgccacagccccattttgttttattttatatttttggagacagagtctggctctaccgcccagggtggaatgcagtggtgtgatctcggctcactgcaacctccgcctcccgggttcaagcgtttctcctgcctcagtctcccaagtagcggggattataggcgtgcacaccacgccaggctaattttttgtattttagtgaagacagggttttgtcatgttgccctggctggtcttgaactcctgacctcaagggatcctccctacttggcctcccaaaatgctgtgattagaggcatgagccacagcatctggcccccattttagaaaataggaaactggggcacgggaagcataagggacttgcccagggttactaaggaagtgggttaagtcaggatcagcaatgacttccacacaccacaacagtccttggagatctccactgacctcccttatttaatggacagagaagctctgtccccagagggacgggatactgtaccgtgacacacagccagggctcagaggcgctgtgtaaacccagcctacctgaattctgcctaggctctccccagattccacacacttcatgcatctccctctcctcccaactgtgatagccttcactttataggaccctggagcctggtttgattattgtctgagccctgtgacattcctggcctggggaatgctgctgattaaagcacatgacagccctgtttctaggggcaatcgcagacattgcctttcgtctaaagatatgtcttgtaatttccattttcataggatgggaaaggtgaactcagagtggttcagtaacttgttcaaggccacatagctggtcaggcagaaccgggagccgacaagccaccagctgctggccaagtgctttgcgtagagctgtagtactgcctcctcagaggctggggccttggatgctgctcttggccaggcccggaggacgtcagggctcctgatcctggccgtttggacatattgggctgggcagtgctatgctgtgggggactctgtggtgcatcctaggatgtttgacaacattctcaagaaaaccacagtcatgtagtgaccctcaactcacagggatggtgataaaccatcccctggccttgctgattgcccctgtggagcacccctggggtgggggctcagatcaccctggctgtcttgaaggtctcctcttgcctaattggacagaagcttctctccttcagactggacttaagtcaagtgaggcccatgtgaatctgcctgggcccaggccgtgtgggatgtccattcctctgggatgggggccctgtttagggtccccaggattgcactgcgtctgctgtcccaggtctcaggaacctatagccgatctcctcactgacatgatggagctctcacatccataaggttcctccctgacccagggcttaatgccagcccccagggagactcaggggctgtgcccacagaggagcctgtgccccagcccctggagcctgtcctggagttgccccgctatgagtcggaggtccctgccacacacgtgggct

SEQ ID NO: 1241660 - DNA, 4001 bp, Homo sapiens
ccactgccctccacccagcctgcgtcctggtccctgtcctgctgcctcttgctagctttggagcctccctcaggtaggtgctctctggggcacccgacacacatcactctgcttcatttcaccctttgaggtaggtaccataattgttgccattttcttgcagtggaaaagccgggcacagagcggtgagggggcttgcccaagatcatacagcaaacaggtaaaggagcccagtgggcagccaggtttgcctggctcctcggtctgtaagctgatggggggtccgaggttcagtccaatcagaatgcctgctcctctcctgcttggtgagcagatctcatcctaggggattagaaagcaggggctcccttccttcattctcccaactgccaccaaagtagaacccagggatgaaggagccctgggcagagatagaggccacagtgactctcccagcctctagatgtcacgtggtgtggcctccacaggcctccacgatgtgatgctgggtggcagtgagggtcgactgagagagggaaatgaaagtccctggtacagtgtctggagcctcgatggccctgataatggttggcagcaagaccaaagaaaggcaaatgttcttctctgcccctgccaggttgccacgtggtgtctgtgtccaccataagcctggaagggcctcttagtggggagaaggcagagagggctttggagtctcccagacttggactgggattttattttggccacttttgattgctgtgtactggcaagcaggtgactgtacatctctcaacctgtttccgtctctgcacaacctgttaagtggctcaggtgagataaatgatgaaggcacctggttcatattagacgtaccgagcagtcaccacctcccatactacccctttcctgaaactacaagccagagaagagccatgagctactgcacaagagaccctggaagggctgagttccaagccggtgaccgcagcaaacaagattattcaccttcagcctccgcccactcagtcctagaattcagaagagaaaaggggcagcttgggtgctggggagaagagtggggaagagaggcgattggaagggaggggaggggagaggggtagagagaggagaagaaaaggggaagagagagtggaaggaagggaaggaaggaaaggaagggaaggaggggaaggaggggaaggaggggaaggaggggaggccagtggaaatgcctttggccaagcccagggacagaggcaccttgtttgcttcaactgttcactctcaggctgatgcaatcatttctctggataaatgttagacaatatttttctccagaattatttcaggggcaaaggcttgtcttttctgtttgggcaagttggagggctggctgtttcccagcagtttgtcttttctgttgctggacagagacacagcccatctgtcgacttggccaggggtccttttggggaagtggagctcccgaggcagccccatggagaccctgaaatcatggtgaggcctgtggcctctgctcagagggacctgctgcaataatcacatctgccacatgttctgagagctgcaccctgctccaggcaaggggacagcacctcttccctgagggtcagatgcacagctgactcaaatccgaatctgtaagtatcaaggcagaaatgaccatagaggccccagggcacctccaccctttgcaggtgtgaaaacccagacacagaggatgcctctaaaaaaggcacagggaatcagtggcagccaagaacagacccctggcccctaacacctgagtacacctcctcctggcctctgcttacccctcacactccacacactccaggctgctgcctaaaactctcctggaaaaacagattcctccgctcccaggatgtaaaacatcatggattacctgcctcagggagctggatgtagctggtggattccaaagccgtctgtctggagtagtggattttcatgaatgctgaggcttatttattcctgcagagaactcctccccctgcttgggaaatgccaggacaaccaagtgttctgttctcggactggaaatgaccagatgataatttctggtaatacgggcttgttagacctactcaaataacctggttatgggactagctctaatctcttcctccaaaggtcaaaaaagcacacagaaaaaatcctttgttgtattagtttttatctgcttattaaatactcattgaagaacatggaaaaactcagagaatgtaaagaaggactttggaaaatatcccccagcactttactacccagagaagaccccagctaacattttggtatatttcttttttatttctttttattttttatttttattttgagacagagtcttgctttgttgcccaggctggagtgcagtggcgtgatctcagctcactgcaacctctgactcccgggttcaagcaactttctgcctcagcctcccgagtagctgggactacaggcacacaccaccacgcccagctaatttttgtatttttcgtagagacagggtttcaccttgttggtcggactggtcttgaactcctgacctcgtgatctgcccacctcagcctcccaaagtgctgggattacaggcatgagccaccgcacccagccacattttggtgtatttctaaagcacttttctttggtgtctctgtgtgtgtgtgtgtgtgtggctgcatgtgtgtctgtgtgtctgtgtgatgtgaatgtccatatacaaacctagatatatttttaaaatacaggactctatttttctgtggatcagtttgcatttttggcaccccttcaccaaccccagagagtagggcacctagagaggggtgtggaggggagctttcggggagcacaggtgttgtgaggaaccccttgtcctcaggctctgtttctctgtgggggcctcctcagccttggcctctgtcctgctgagcctctgcgattggttcaccccaacaagtggttgtccctcctccccggccttcaggtatccttgggcctctctcttagctagtctggggtctttctttggctcatgaaaaaggaaaaaaaaaatcctgggcgggactagtggctcatgctggtaatcccagcatcttgggaggctgacgtgggcagaccacctgaggtcaggagtccatgaccagcttggccaacatggcgaaaccccatctttactaaaaatacaaaaaaaaaaaaaacaaacaaactagcagggcatcatggcgcatgcctgtaacccagctacttgggaggcgaggctgaggcaggagaatcgcttgaacccaggaggcagaggttgcagtgagccaagatcacgccactgcactccagcctgggcaacacagagagactctgtctcaaaaaaaaaaaaatccttcctcttgattcctcatggtcacagtccccatccggggtagccctgacaggcctctctagagggcatgctttggaggccaccagaccagtggcgaggttctagctctggcatgagctgacctggcttgaatctctgatgtctgactcaccaactgactcacttcaaacaaatcatgggaaatctctacagcttaatttcctcatgtctaagatgcaaggcaatattccctgacagagtggtaatcaagatgaaatgaaatgatattaaatgtacactctacgaggacaggattttttgtttgtctgttgcgatagtgctgcatctttagaggacttacatatttgttgactgtaaggcactaagatgaccaataactgtctgggcccatctttcttaaatgactttcaggctcccagttttggaattgaatgtgtgtgtgtgtgtgtgtgtgtgtgtgtgtgtgtgtgtgtgtgtctttatatatatatctctctctatgtgtgtgtgtgtatatatatacatatatacgtatacacatatataatatattatatatttttatatatatattata

SEQ ID NO: 1241661 - DNA, 4001 bp, Homo sapiens
cctggccctactgagaaggctggcagtgggccagcacccggagatcgtgagtgacaccctcaactcctgcagatgggcttgtgaaaggcaatgtaacacccaccaccttccacatgtatggtgacagcaacactattggatggcaatgttttagacttacaaggcacactccttgtgtccatcatgtcattgtgtttcccacctgtgtgagctctgcacagcactagactccattctcacccaacagagcaggaaatgaagactcccaaagtgactcacccaagtcacctacctagcacatatcccagccagaacccacatccccagactcaggtgctgcttctcccacacttgtctttcagatgagttgatttcattagtgcagtgattttgcatggaggatggctatcctcagagtttattttagggtctgttccacaaacatctgtggagtgctttatatggtttacaaaccactttcagccatttagtttgaccctcccacccctgtagaggtcagtagaactggtctttgtattgttaccccgtacagacaaggacatggatgtttaataagtgacctgcccaaagttgtggggatagaattggtacccgtttcataatgaacatctgtccaagaaaggatactccagtttctcccccaaatctgctcctgccccatcaaatggtcccaccagtatccggttgtcaggccaaaaagcttctaggcttctatccacccaaaatccatttaatccacttccatgacctgcagggttgggttttttttgtttgtttggttgtttgtttgtttgtttgagacagggtctcactctgtcacccaagctggagtgcagtggtgtaatcatggctcactgcagccttgacttcctgagctcaggtgatcctcccacttcacccttccaagtagctggaactacaggcatgcacccttccaagtagctggaactacaggcatgcacagccacacccagctaattttttatagagttggggtctcaccatgctgcccaagctggtctccaactcctagactctcctgtaggttcttcagcctctcgccccctcttttgctatgatcctcaaccagggctcagaaaactttttctgcaaagcgccagatagtaatatctgtggttttgcagaccacacagtctctgctgccactacccaactctgctgtggcagctggaaacagccacagaccggacatgcatgaagaggcgtggctgtgtttcagtgaaacttcacttacggacactgaaatgtgaatttcatattattttcctgtgtcacaaaatgttgttcttctattgatttttcatagctttatatatttatcttttatacttatcacttatattttatatttatattttacatcttgcattcttagctcatgggcggtgggccggatttgacctacaagctgtggtttgttgacccctgacctagacccttgcagaaagcttcctagtctttctgctctctgttctccactcagcagttggagggatcatttagaaacatacataggaccgcatcactcacagacacacctcccctccggcatgagctccccaagatcacctggattggcagccagaagaccttggccctcagtcagtgccgccctgtaccagctgtgtgtccctgggggaggcttttctgggtctccgggcatagtcacccaccagtgcccatggaccctaagtcggggcctttctagcctgagtatttctcacctctagcaagagtgacaaagtgtcccagcttgcctgggactttcctggttttagcactgaaaatatatcccagaagaattatcagtcttgggcaaagtggaacagttggtcaccctccctctagagtctctcgtctccattgtctcagggggttactcacggcacagtctgtcctggagtggaccccctgggtggctgtctcagctctgtcttatcaagcccaggaggactggtcaaaccaggccttctcagtaccacccactctctcccgaccaggtaattattaacaaacaggctacgggtgcagcattgcctcaacaaggaaaactcaccagaagttggttcaccccctcccaagaagacaccccacttcccacctggggaaccccaagagggttcacttcttcatgtttgtgcagtgcatggaggttcgcctggcccttgctgctccccgagggcccggggaaccacttggaaaatctggtctccaaccagcccctcactagctgtgtgaagttgagctcatttactccctctctgagcttcagtcgcccacctccctcctacaacatgaggggctggatcagacagggggcagcaagctccagcgccgccttcctagatcaggtaaggaagactccatggtgccacggtggggaatggtggggatgtgtggaagtgagagagccagctctctacaggccaggcaagacccacctgtgggcagggcctcacagcagggcctccagtttgcaatcctggactctgtgatttctgaggatagagtccactgagatctcataggtcagaccataaggagagtacatcccagggcaagggtggcatggggtgggaccaggaacctccttgggccaggtattcaatttgcatttttcttctttaaccatggaattgaacttgttctctccccagtaatcagtgaacccctgcacccttgcacccttgcaccctcctggggcagccatttctcaagctatgtggggaaggactgcagggagcaatgtggccctgggtgccctgactgagatgaccttgaccattcaggcatcctctagcagactttctggatgtgtttccaagtcgttgggccttaaggtaagtgaaatatacaccactgagcagcacagtgggctgggagccctgagcgatgtagacatggggatggcagagcaggcacaagcacagccctggagccagctggcctgaggtccaaaatgggtcaacaccaggacaagagaggaagctagcaggtcaggcaaagtgagagctactgtctcagtggattctcgctttccctcactcatctctctctttcccttgcctatacactctaggtatactaagcttggcccattttacacatgagaaaatgtaagcccggagacattgttagctcagattccagagtcagggtctgctccgtggccactgaacatgaagcccatattccttcccagcatctgctgcttctccacttggacagacttttcctgccaccggaatagcagctgctgctttgcttactgctgtaccacgcgctagagcagaatgtggtgcaggggacatgctccatggatgttgactgagtaagtcaatgagtgaaagatggccatggatttttgctctgatgaatgtgaaaatacattattccccttacaatggtctacagtctggggttttgcttttttagtcttgcttcttcagtgagtttggggctgatgccacagattccaggggttagcgtatgcttggctgcagcccaggggatggacagcttgtccctgccatgagcacacagtcactgccctttagtttctggcgcctgcccctggtatgttctggacagaggctgggctttggcgtcagacaagctccctcactgctgagatttgtgactttgggcaagtcactccacctctctgaacctcagtttttcacgtgtcaaatgagaagcaataatcactaatcagaaaactgatattaagggcaggggggcagcactcttaaatgttctgagccctgtatcagtcttaatgggtgcttccttcttcccttcccatcccagcagtggtggacagccagactgtctgggttgaatctagactccaccactacttaagttacttaactctgcctcagtgtcttcatctgtaaactgtgggtaataattgcccctaaatctcagggttgtcaacaagatcagtaaactgacat

SEQ ID NO: 1241662 - DNA, 4001 bp, Homo sapiens
aaaacaggtcttaaagctgccgcctttccctggctttcttactgcccccagtggaagctcccttcatctcccccagggctaccccagtagcttcctttctttgccctgaaaggctttctatatacagcatataaaagaatctccttcaatcataaatatggtcacagcgcttcctcgcctaagaaactcatggccaactcctgtgtttcagataaatgctaaactttgatttgtgctctaacccactagggctgctgtgacctggctgcacctggcctggacctgctctgccctggatcacgtgatacccccaggctcactcttcttttcccagtttctcaaacacagcaagttctgtcctaactctgggcctttgcataccttccctctctactggaaccctcccccaacctttctcactgaggccaacttctgcataggctgcaggcttttgcttaaatgtcacttctttgcaataccttatcacactggaccttttccccttccatggctattctctggaacagtcccttgactctttctctcaaagctctttcaattacacatgtgcctttatatatgcatttgtcattgacatttttcattccggcctctctctccatgggaccctcatttgtgctgctctcaccttcaagagcttgcagtcaggagagatgctccataaacctttgtagaatgaatgaatgaatgaactgaccagtctccttctctgtaattcagagacattagactgcaagctggacactgagcagtggaaaaagccaggctggccacccagagctgagctctccccgccccggagctcacttgccaggtgaccttgaacaactccctccctgtctctcagctctggcttcctattatttctttattaaaaccacttgattgagacatgactgctattcataaagttgcacatatttaatgtctataacctgacaagtttggagatgagtctacatctgtcacttatcatcaccgtcagcaccatgaacacgtccgttaccttcaggcatctgccgcctgtattcttcatgcttcggtttcctgatctatgagcaaggacactggcccaaggaagcagtttgctcttttattgctgcatatctggccaaaagccctaccttcagaaaaactaaaaattctgcttactttatttctacattttgttcatttaacaaactgccaaattgttactgtccttcatgagcagctgccatgaccggcctgggtggcagcctccaggcaagatgcccttatctcacggaagccgataatattggatcattgttcctgatttctaaaggcccaagactccaggcacagaaaacaacagaagctgccacttactgagcacctcctatccagccgacattttgtccccatggccttatttcagggtctctcaaccttgatcctgttgaccttttgaacaggatgatgctttgtgatcttgtcctgggcattgtgggatcatcagcagcatcgctggcctctagatgtcactaacccccaccccccttccagttgtggcaaccaaatgtgtctgcagacatggccagatgtgctgagtgagagcacccgctgtatttaatcttcagtcacaccatccagagggtgtaattatttccatcttacctatgaggaaacggaggctctgccagagttagtgtggagcataaggtcacagagctcgggggacccactcacctctgctgccttggatacctgaaactgcagagatgagactccttcagagctttgcagaccccaaaccccaaaactctagagtccatcctctcctcgcctcacatgccctcaagccctggggacctccctttgcggcatcggtacttactgtgtcccgtagctgagtgtgcacacagtggaggtggcagtccctcgggctcagaaagggcagagggctggctggattgcagccagcatttgtcactgaccacagccggccctgtctccacccctccctggccccgccccgggacagccccttcctttcctggcaggtttccggccagcaggcctgcctgcagacgcagctccctgatcccgaggctttcaccacgatgcccactcgctgccccccaagccttacaccaccagctgggccatcattttcctggaatggcatgggcactcctgagagacaagaccaaagagcctccctattgttggcattccagagacagggaaagggacagctctagcaaaccctctctttttccaggttctattccttggttttctgcagctaatttcttgtagattagggggggcatatgcttgaacctgagagctccccacaggcctgctatgctgactgggtcatagatcccaacagttagattctagtggaaatgagagggattgagagactcaccatgcctgcaatgaatgggtcactgtagccaagcctgtgattgcaccaatcactgaattggggctcagaagaatgaggggaattttcaaagtcatgcatttaattaggggcagagtggggttggtgcataagtggctgactcccaggccagtgcttgttgctgagaaaggagtggattcaggatttctatgggcttgggtagattctccctttctactttgaaatcctggttccctaactcagccatacactcttaagagcatttccaagacaccggtgcagagtgctgtctcaagcctggttatgtttctaaggtccccttgcctgggggacatggtgtgttgtgcatggccgtgatcatggaaggttatgtggctgcaggtggggtgtggagttggtagagcaaatcagaggtaatacctggaaagtgattttgatgttcagcaaacactgtccatcgacaacctttaagacatttcctcttccttcttcatggctttggggcccaattatgtggctgttggatatccacagaaataataagaactagtatttattcacacttttaaaaagaccacctactacaccaagtgctttaaacgcattatcttttttcatccttacaataacccttcaagggagacactgatctcagcccagtctagagatgagcactgggtatctagagctaagtccagctactactacatctctagaagcaagcacaatacctactgggtatctagaggaaacacaatcactactgggtatctagaaccaggcatgatcacttctgggtatccagaagcaggcaggatcactactgtaggatatccagaaacaggcgggattgctactgtaggatatccagaaacaggcaggatcactactgtaggatatccagaaacaggtgggattgctactgtaggatatccagaaacaggcggcaggatcactactgggtatccagaggcaagtcccactactactaggtattgagaccttagtttttgctcagtgccctcacagttcattcccattgaattggagagaagacagaacacagcaggtcagggaatcagcccctaatcccacagttagtaagaagaggctctaacaagggaacctgagtccctctttttctaggtttggctttcttcccattatgccatgtaacatgagcaagagtccattatctcattgacctagagatccctaaaccgtacctacaggatggaaatcagcactgcataccagttatgggtgagtaatggaaccccgaagttatccgtgtcctaatacccagaacctgtgaatgttatcgttctatgacaaaagggactttgcagatgtgattaagttaaggatcttgaagagattgtcatggattatccagctgggtcctaattacaatcacaaggatccttgcaagaaagaggcaggagattggagtcagaagaaggtgatgtgatggtagaagcaggaagggaaaagtcaatgtgatgtcggagccaggtgccaaggagtgaggaagcttctagaagctggagagggaaaggaatggatcctcccctagagcctc

SEQ ID NO: 1241663 - DNA, 4001 bp, Homo sapiens
cactaatgtagcccagggggtctttgtgacccagtccctggtgacagttctgcctccagcctcaaatctggccctttggggtctcagccacagcaacactgggtgccaggggttcttccagcacacatcagccttttctcccactgtggggcagggcagggcatgtcacatcactatagggcaggttacagcaagacaggtcactgcagttccccagggcaggtcattttgatttttccatgtttgctgagcccagctctggactgggagcagggaacaaagatggatctgcctcagtcctgcctatgtggctccagtctgtaggtccctcatctccctgcctcatctggctcactccatcttgtcctttgagactcaggtcccaggtcaccgcctccaggaagccttgtatctgtgcttctctatggccttgccccatgacaggcagtgaaatctttgcttagctttggtcactgccatacctatctgggatctcctctcaggcacaggccctgtgcggtatgatgccaatggtaggatgggctcccctgccagctctggggagattgcatgtctcaccttctcctgcgttaattctctaagatgagggtgaaaactccatccaccccacaatattgttgtgaataccagacgtggctgttatcagtgcttggcttatgtgacctcacttaatgggtcatcctggggcccattttacagatgagaaaactgagatccagggagacagagtaactccccctgagctggaattctaagcctagatgtctgacatcggagcttgtgccatgccattctgcctatctctacagagagcaaaatgatgagtaaagcagctcttaagagtacccagccatggtcaggtgtggtggctcatgcctgtaatcccagcacttttggaagctgaggtgggcagatcatctgaggtcaggagttcgagactagccttgctaacatggcgaaacccatttctactaaaaatacaaaaacattagctgggtgtgatggtgtgtgcctgtaattccagctactcgggaggctgaggctggagaatagcttgaacccaggaggcagaggttgcagtgagccgagatcgcaccattgcactccagcttgggcaacaagagtgaaattccatcttaaaaaacaaacaaacaaacaaacaaaaaagtacccagccatataaaaatgcagagtatcaatattattcatgcatttcatgtcaagtatgccctctttgttcctcatctctgaagagactcacttagtaaatattcactgtgttctctgttttcacaaatgccctatgagccaggcacagttcttgaccttctgtagtgaaacctcatgacatgtggtacagtgcagacagttctgttctctgtgcattatctctgccccaggtcactgagtgaggagccatggtggagacaggtctgcgtgactcagaagaatacccctgcactgggccagctgagccctcccaggccctgacccgcggccagcatccttcatcggtggtgccgactggagcagatgcattgtagcttgcaggctgcgactctgtggctgttgtggctgttgtggctatctggctgggcttaggagcatcaatcatggcagtggacgagaatggttcttagctacagccctctgtgtcagccccctgcatggcaggaacccaggggacatcggaacccctgtggatgactcacagactccggggtctggaaaatcctaaccagattgcctcataacactgctggctgccctaatgttcaatgtgccctttaaaaaaacaaagcatctcaacaaaccaaacaagcgagctgcagccatggctttgctctggaggctgggcagggggagggacagagggttctcaggtgttactcacagtctgcggtgggctcaggctgtttctgctggcttggtcctgctgtcctggaccctagcatgtgtacagtaagcctgcggtggatgctgcctgttaaattttgtttgccagcttcctgggtggttaatggttagaggggccagtggccttcaccgcttggtagtcctctcccccgagtcattaaccaatgggaggctttgtcaggatagctgagtaaacacagaaatgctgcaaattaactttgctctgcgttcaattctatgaagtctttttttaataccaaaatgtggctggagttgcatcaatgtggttgccctgtgtcagttggcagagatgtcttaggtgcccttaattagcaccaaggtgcagatacttgtaaaaagaaaaataggtgtttagctccaattggggatgacttgggcaaggtcctgccttccagtggtcttagtctggtgggagagacagacatggaataatatctgccaagcgcttcctctggattatctcacgaaatcttcacaatgactctgtgaagtgggtaccattgtcactcctctttagataggaaactgagctgcatggaagttaagttaaacgcccttgagattcaaatccaaggccattcaattctaaagtctagcaccttcccctttccccacattttatttttcatcagttttctttggattacaggtgacagacatcaaatttgaactgctttaaagcaaaaaggaatgaatgagaggtccaagggtggaaaggacttcaggcatggatctacggagttctaaatcaggcatcagatctctccttctctctctctctctgtcttttttttttttttattccttcctagctctgctttcttctactttattctgtctgcattggggacaaatgtggccacagtagctctgggttatttagttctaactggttagttgatatcagaaggagagaaattctcatttttctcaatgttcataacagttccccccaaaagtctatggcgtggttgccccccttaggactgattgatcacagtgtggagaaggatgaggcattgtgaatgcctcgctagggttctttgctctctgttgggttgacagcatcattgcttccatccagagatgagggaatctcttcccaggggaaaagaggagagtagagcctacaaatgggtctgcagttttggagacaccttagttttgtagatgtttattggtcttttcaagtttcctatcctataaggcaagtttgaactttatatctaggaatttatctatttcatctagattttcaaattaaatactacagttattcattaggcctctccattattatttttacattattattttatatcagtaattcttttttctttttttgttctgtattttgtttatgtcttttctccctttgataagtcctgttacagagatctatatagctaattaatctttccaaagatccaccttttagttttgttactggttttttaaaaaattgatatttcattgatttctgtttatatctttattttttaatcacccctttaaattctctgggttttggtctgttgtgcttttttctattttcttgagataaatgcttagctttcttacattttaatatttccagtctccacataaatgtatttaaggttacaagttttcatctaaatactgagtgagctatgtcccacgcatttttgataattactattttcattgtaatttttttctaagtattttaaaatttcttttctggtttcctttaaaaccagagtgtagtttagtaatatgtcactgagtttatttagaattttaggctattctcttgttattcacttccaattttatttcactatggtcaaagaatattgtccattatgatattgaacatttggaatgttttgaggtttgtaatagccatatatggtctttttttttttttttttttcgagacggagtcttcctttgtcatccagtctggagtacggtggcgtgatctcggctcactgcaacctccgtctcctgggttcaagggattctcctgcctcagcctcccgagtagttgggactgc

SEQ ID NO: 1241664 - DNA, 4001 bp, Homo sapiens
ggttgagtaggggagacccacctgaagtcggggagttggctagtaaatgtcctgagtcatcgatggtactggcctccatgtgacttcaggtaagtctctgcttttcacaagacttcaggaagaggtggtctcaaaaggccctctcttctgagtctgggatctatgtctgagggcccccaggtcattgctctcttgggggaaaaccgtggccaaagctcattcagtcagctcttaaaatccaccacactccccactttgcttctccccaccctgaactcctgtcctcctgtggccaccccttctctctcccagccctgccaaggcccttgcccctcttttggctgtggcccgggtttatgtgagcgttcggccagggggcactgctcgttggggtgacagggacactctgccgtccccagggcttgcctcttctggacctctccctcccagctaccacagcctgcattccaccttccattgtctctcactcactcccatctccaagcgctcctccaccctgcagacagggtgacctttccagatgctgatctggtgtatcactcacctcacctcgaattcctcaatggctccccattgagctcagaaaaaatgctcaagcccctgacattcaagagctttatttattgggccctgactcacctccccagctgcatctttgaggacccagctgtttgcattcctcaattccaccccatcccctatcttcgtttgcctctttatccagcttgggtgtcaagggcttcattttaatctactgtgcttcacccccaggcctgtgtcttcatgtcccagccctgtggcaaggctccatgtgtggtagaacctacctgtctgctccttccctgccaagtgctgctggaagaggggttctgcaaggcagcctcgtccactgtgggttcccaaccaccagcctttatccacccggcaacatgtaactcatcagctcactctcccattttcagggaaaagcttcaccttttccatgtccttaacctttttattccagggtggaatggatgcccaccctgctacatgtgtgctacatatgcatgtgtgcctacatgtgcacacacacacacacatacacacacacacacacacacacacactgagcagacaaccttgcctcctatctcacataaaagagagatcctatgaaaaggaattgtctcaacttccctcaaagggcatcctctctgcctatccctactttcccagtcgcccctctctctcccctacacctccactccaccaataaagcagaggatcggccctcctttgaggtccagtcccccttcctgggccttagaaagtatctcttctctccatctcaggacccttccacctctcttttctgcacttaaacactccctctcaagctgatccttgctgttagtttggaaactgttcaagtcttgctcgttaagacaaagaaaccaacaacgacacaacaacaaaaacactcctttcaccctctcatttgcttctagcagctgccctatttcaatactcctccccttgtggcccaaattttcaagagctgtgtattcatggtctctgtggccttacctccaactcactcactggtccactccagcctggcttctgtatccacaaaaatgtgacccagatgctactaaaagccaactaatgtgtctaggttctcatcttatttgacttcccagctgcatttgacactgaagaccatgctctgatccagtccttccctctggctcagtgacaccacattcccgatctctctgcacctcctccttacccacctttgcaggttcctcttctcctgccctgtccttgcatggttggtgagccctgacacttgcttacttggttgtagctctctcctcactttaatctctcctctccctccagctgatctcatgccacgacacccatgacttcattactaagacatgcaaatgatatattatttttattctccagctagacatgcaaatgatatattatttttattctccagctcaatcctttcctctgatctctacatgtctaacttcctacttgatatctcctcctgatgttgcaaataaaccttacatgcaatatgaaccacagtgaactcagactccttcccaagaaccatctcccagcaacagccacaaccgaaacctcttttcaacatttctgtcactgggtccaccattcacctggttagttgagcctaggaggggcatccttgcacttccttcttcttcatgtcaacttatgcccagttttgtcaactttacctcctgaatgttgctcaagtccatccacttttctctgcctccactctagcaggccagttgggctgtcattgtgtcttgcctgggctaccacagagcttcctaacagctctctctgcataccctgtcctgctcctccaattcactctgcacatgacagctagaatagtcttttaaaactcaaacctgactgtgtcacttagtatttaaaatgtctcaattgcctcccgtttcccaaagtaaacactgaagtcttaacttgcattgcctggcctctgcgggctcctctaagttcatcacagatcatgaagccccttgcccttgacatccatgttagcccattctgctgatttttttttttatgctcacatgtgatatttgttgtttcctactcctggaatatccttccaactctcttcatctgacttttcccctaattaatttttattcattatttaggccctagtttgtgtgatttcctcaaggaaactctctttgaccactgaaataagaaaactttctcccagcagctatttttatagtaccatcaacttctcagtgaaacacttatcactgtcatagtttcacatttatttgtgtgactgaacaattcatgaatcagggatcctgtctaccttaattttgtctacttgtgcacccactctttggccaatactcacggttcagtaagtggttgctaaaagaataaatgaattgaaataaaatgaaataatccatttatctttgaagagtaatcctgactggtaataagcaaggggaactcagggtgatggaaagtcctgtagctacttaaggtaaagttacacaggtatatatgtaaagtttgagttgacttacacttttggccaaaacaaagtaactgatattggttgcaaactgttgtaaacagaaaactagacaaaatttatgacactattgagatactcgaaaaatacatataacaattcagacattagagaacaggcagggaaggtaaaaaatgagataagctctacaattgtcccaattttctgcctaaggatactttctggacgtgtggaagaaaacccaaggagggcatgggaggcttgctgagcttaggagacagacattagagtttgagaaaactgaggaagctataatttgtgcagtgaagtactagaggagagctttagaaatgttcataggggtctctttaagtccaaagctaagtactaagctctgcatgcataaagtgaaattccacatggctggtccacacacacacacacacacacacacacacacacacacacacacacacacgaaaaaataaacctactgtgaaggtataagcaaaataatttccagagttcacaaagcataggatatattaaggttatgcacccaaagtggagagacctggaacattcagtagagacccagaagtgtcacatcttggcattagggctaaactaactttgaattaaagctgcactagacccaccctaacaaagtttaaaaacatgccttgacaagctcaaacagatctgtaagtaacgtattgcctgttaaaacaaatgtcaaacactgtaaaggaagacaacaaaattgtaatattatgatgtccagcatccaattaaaaattgctagaccttctaggactaggaaaatgtgacccatgaccagaagaaaaattaagcaatataaacaggctcagacataatagagattaag

SEQ ID NO: 1241665 - DNA, 4001 bp, Homo sapiens
ttctcattatccagtggcttctaaagcaaaagcttaattatcatttaaaatgtggcctaaatgtccacggcacggaagagcagcgcagcagccatcactttcttactgacagtcactgtgctcttacgagaagctttcgctataaccgtacatacagacataagatgttctaatcttcaaatccaacaccactccaattccaggaaaaaaaagcactgagatgttagcacactggagaagcaaccattttactccttcagactacagttccatttcagatattaacttacaatcacttggagggcagacaggaaaggggtagcagaaggctaaaatccaaggttgtctggggtcccaataaagaggttctgtagctgtttgagaacttggctttgcaaactactttcttaggccgaagaaaaactcctcggtaaactgttggaatttcaccaaagtatcaatcacggcagcccttgggactaatccagtactgctggactttcacgcatggtagcccgtataaacacagtacatacagcaaggttcaagcaagtcttggcaaattttaacagtggagaggaagactgctttattttgctatattcttgggttaaatgtattcgcttaaaataataaacacttctccgagattattactggttagttcagttttgaaatactggcaaggtcatttcaagaagaaaaacgggagagggagaggtatattttacataagataaaattcacacttttcagtgtccggttctgagttctgacaaacgcatttatagtggcctcatcagcaccacaatcaggctacgaagatggggtaactcttcgaggattcttaaaagcaaaattgatttgtcagcatactttaaaagtatttttgcttttgaaacatcaccttatttatttagaaaagcaaaataacacggtccgagtggtcctaacccgcgaatgcctttgcaacactgaaatgccctcctcccaacaccggccgggcaggggtgagccccgcagccaggggcgcgcgtcactgtcagctccttttcccaagtggagaccgggaaaagacaagagttgcatcgccgggctggagccacgaggaggaagagttaacgccggaatgacaaactctaaagcaccgaattgcctctccctagtagggcactgcgcgtgtggagcacggccaggggcgcgtgggaagaaagacgacctatttcctacgtccgtcttcctaactggacggcgcgggaggaggcgggggctggtccccgggcaccctggtgggcaccgagaactcgcagagaggaacataaaaccgcacagccttccccgagcagcggggtgacgggaggaaggaaggaaatgggagcgcgacccggccgcgcgcagagccgagccgactagcgcgaggggcccgggccccacccgagagcaggcgcgagggccggggacagcggggcaagctcggggagagcgctgcctgcacctggcaccacctcgagaccgggtggcgcggggcccgggagcgtgggcgccagaggggacagggcagcggcgagcgcgcgcctctcgccccgcagggcgcccgggcagaggccgaccggcgccctccgaccccgccgggccctcctcgccctggcccccgagcgcacacctgccccttcaagccccggggccacagcggccggcggggaccctggcgggggcgcgggccggacttcggccgaggggcgctggccagggcgagggacggcctcgcagagctcggagacgcggcgcgagtttcccccgcgggccgcgcgggcgcagagaccgccgccagcactcacctgcccgcttcccctagcgcagcgggaacgacgtactccggcccggaccccgccgtccgcctcaaccaacccccaggcggtggcggcggtggcggcggcggcggccggacgggaggggcgggacggcagcctgagacggccccgcgaccgcggcccaacgcttctcctcccgccccggaccccgcccccgggccgcagccgccgccgttcattggcccacgcttcggacgcatgggcgcggccccgccccgccacccagccggcgttccgttcggggtcctccccagccagtgggctggcagctcccgggggcaagagcggccggctcagccgccgccaaccacgatgtcgcaactggctgcgttcgcccccgccagagctttgattggacgaatctcgacccgggccccgcctacgcgcccaagttccgttagcaggttcggttgctccagaatgccttttcgccccgaggggcgggaccgacgggatgggccctgtggctggctcctccctctgtaagcagcagccactgacccgcggggcgggcggggaggagagcggcggctcgttcctcttttgagagctctgctttcttcccattggttgacaggcatcctactctctccgcccctccggtcgcttggtggcgtctcaggacgcagcgtgatgacgtaggtccccgacattccatatacaagatggccgcagtcggcaaggagagacgtcgctgaggggcttgcctgaagcgaggggtgagtgacccaccgactgagggcagcgccgcccacctcccgcgtatctggaggtcggagtaggttatggccaaccgccgctatccactggcggagtctctctttccggattctgcctccctccgctaacctccggtacacattgaactttgcgggcgacgcggggttgtggggcgggcgtgtagagagggtctgaggcgccggggcggggcagggaggccggactcaccctagaactggtagcggccctcgcactggggggcagtcagagttggggaactttctaggggttgggcaaaaggggcagcggtgttaaccgcgcacagtctcacagccacagacttctcatatctccccgattatttcgcggcgtattagtcccaaccttggctaggcctgaaactttttggaggttgttccatgtctagggtactccgactttggagttttggagagccacgtaacgagggtgcggctaagatgaggaaaaggcacttccgggattagatttcgttcttgcccagacatcgtctttacggacccgctcctggtggttgatttggtttgttatgagagaaattgttctttagaaaattggagcgtaagtctagaggttatgtgacagctcctaaacgattgtctgcccaagataggctcggtaatgctccctaaatttagactgccagttaaacggagctttcgctaagtcatctgaggttaggaactatttctaagagcatttcttaagggtggtcttctgtgtttttaagagaaacttggtgatgtttgtgtatctcgatctaaatcgctgtttacagatacctagcacaatgccttgcagttgtaggtgcccgctaaaggtttgtatgaatgatgttgctagaatgaaagcgaggagctttcagcgcctagaacactgcctgacgtttaataagccctctgtattgctgaatgaaagaatggatggatgatggtagtggtagtagtattgatagacatttggattaaagtgcccttaggatgcttacctgttaaataatcttgactatgaatataataattatccaagattgtcttattcagagtgaccaccgctggtgtcttttagggtttttttccctcttttatctcatttcgattatattgtgatgcattattcaagcatattagttgatttctgggcaaatcctgtttaaatttgttccattttgaaaatgtagtttgcactaacaagcaataaaaactattcgagttgttaatgaggttcttaaattttaaatgctgtttctaaaattgaatgtcataaagaaaaattggtcatagctgtggcctataaaatgggctagttcatttcaggacattatatttgaaagcagtgactctgctgagtgtctgaaagggaggacagtgt

SEQ ID NO: 1241666 - DNA, 4001 bp, Homo sapiens
tatatatacatgtgtataagagagacacatatgtatatatacctctatacacacatacatatatacatagaaatctgtgtgcaatcacttacaaagtaggcagaatcagatgtggattttaggtgggaggcaagagttttctttaacaagtcctttgcctgccacatttatgttatgttttatttatatttcaggcagagcactaacagtgatcaatttatgttgaagggtcctgcaaataacaaaaatagataaaacaggaaaatgaatttaaatctcaccctttccaaaactttgctacaactcataataacaagggtaataaatgcttacgaagcagaggtcaaacgggaaacattagcaaacgaggagaggcgcaggagcccaggatcatgcctcgatgcccaccaagttgggcattaggtcactatcagagagaaatgcagccagccacttcagctatggcttcagctgaggcaaaagctgtgctgccaagttgctgaacctgctctttctccgttcctttgagattcattaaagaaagttcagaaacacaactacatgaggtgaggataagggcatatgcagacccccttcaataaaacttactttcatctactcccatccatatccaaatccctcagcttgggtggacaaactttccagagagggtgactgaaaataagatactccttctagaaacaactggccgaaggggcaccagaaaactttctatgctccaagttgaggtaagctaccaaattgggccccacagagggtggcctgaagtctcagaaacacagctgcacaaggaggaacgcgtcagccagaaggcagggagagccagaggaacatggtgtccagcgtctcctaaccaggatctagccgagcagagaaaacattcagcctcctccctcccaatacccgtgtctgtcactttctttccattcaaaaagaaagtcctagttgaactaaacaagccagtaacccatgcctaagaatcatatcatctcagattctcatctcccaatgggctttctagttctccacaaataaaatcgtctactctgcttcctcgcgctaataattggggggtggggagcagggaagggagagcgatgtctggagacatatgatcagaattcaaggcagcttctcacaactctcttgtttatagaaaatgaatgtctgcctggcttgcttttagttcagaaaaggggtcagtctttatcagcacggttcacacagatcctggattttttttcccttatcttaaattgacccgcttttaagataaagacataatagagaaagcattgaccttacctggtccctaatgagttggaagtcagaaaacccggctctcatttcctcttatctggatcgcctgagaagagactcgcgctaccttttgtgcactcgcgcctcgagatagcccctcactgacgcctggacgcggtgagcgcgctgaaggctgtgcggcctctaaagtctcagaattcctccctgcggcctcaaaattggagagttggattccagaccaagacactgtcactagagctccctagccctggcccaggaagatttaaaatcccttaaaatcccttagacttgctcccgagcaagtctttccctatgaaaggccaaactctaagcttcgtgaagaagcctcctacaaggacactggtctggagcgcccgggcctccgcgtctccaggagtgcgcgcccagagcgtttctagcggagactgcccaggcctggctcggatttcagtcgcggggccccaggctacttcccaccgggccagcagcagggccgagccgctgccctgttggctgaggcattccctgcccccacccccctcctggccttgaggaccgcagtgtgtacccttgttggtagcggcagcagcccgggatccctgtctcccctgctcagagcatctctgtctcgctcttctccccgcttctgagcttggcccagtccctgaccccctcgctagctgagagagctgctttccttcctctcctgcccacagctcccagttcccaggctggggccagggtggggagcagctttgggatgctaaacatcaaaaaagcccagcctggggtttcagggcccgaagccactagagcggctctccaaggctctcgagaaagtcctagtgtttacatggcgaagtgggggtggggagaggaggaaggggggtgcagtgtgcaaaatctcccccactcctctcagccgttggggcctagggatgggtagggtactttggcggaggcaaagcttcgcggtgatctcggggtgaaccgtacttgctcccaaacctcggaagcttccaagcacctcagcgccaggggcatcctcagaatgctgatttctccgagaggggaggccagaaattgggcacgagttgatgcaggagattcccagaaaggaggactgtcggctttccagaagccgacggtgctgtaggggcggagggtgtccccaggttgcggaaccctcttgcactgctcccagcgcgcacctatttccctaatgaaacgcttcagattgcgttctaggtctcttcccgcagctgcgacaattcccccagccgggagcgggagcggatggagccagcgtaattgatggcaagaaagaggctgaggtcctgtttgtctcggtccgcaaacccgattgagttcacctttccccgggacaagtaaacagacttcaaactatgccgactgtagacggcgaggagaagaatgtatttgatggaaactccatccaatgcaaagatgataaggccgagggtgccacagcctactaaaattgtgactcccaaaggcttcctcccagctagaatggggtgcggggcagccgccagaaccacagccgggcaccgccagccaggtccccgcccgggcttgggctaggctggggcaggttaagcgaagctccaattccgtgggatccggacctagagccaaacagcagctgcagtatccatgtcccctgcccggccggcctgagctgggtgccttagccacctacactcccggtcccggaaccacagctgaccattccaacgcaagtggtcaaatttgtttgttttccaaaacgtgagacctgttaaaatctcccttccccgccttccaacaagcactctcactagacccaaccatcctcttgggaatcttcgagtccctctggctgttggaaactgtgtctcagcagtgaggcccaggtttctgagggagaaagcccggcctagcccacagtcttaaggcaccacgccagaggaggctccaggaagttaacaaagaggactgctgggcccggagcgaggactccggccagtctgctttcctcacaagctcttggtgggggagcgggagagagggattgggaagagatgcagacgaataacgaaatgagagaggggaagagaggaagaaaaagaaagttgaaaacctgggcgagaagtgagtacatgccaaataagaatcaattgcccataatccaatacttccaggcctagaggaaagtgctgggaggggcgtctgcccgcagctggctcagctgcctttcgaccggagatttggcaagggtgacccggaagggctacagcccatccaggggactacaatttttctgtgttcaaaaccattccttctcccctctctctcatccctaatgggtctcccaacacaaacactgagcgctgaggaaaccaggaaattagaggttggaagaaaggaatcaaaaatgatttattatttatttattttttttgcttggcgtgggaggtagtggctgggaggtgaagaactgtaaacaggagaaagattcattactacaaaaatttaggatcccagagataaaacccagtacaacaaagagtgaaatctcagctcccaaagtccttcctgggatgtcctcaggcctgtcacccagtgttaccccgttggaggccaaaggagccaaaagcagcaggggctgaaggcgt

SEQ ID NO: 1241667 - DNA, 4001 bp, Homo sapiens
ccatggtactctttcctcctaattctgccattcttactatgcacaatgcgtattttccatgtactgtaagagagatgcactacacagaagtatccatggggacgaaattttatctacactgaaatttaatgtgggataagtaagcttatcataatggagttttacacagaatgtgtatttctcaatgtaaaatgattttgtgaagtaaagggggaaaaaatagaggaagtttgtttccttagaatctccacaattacgcactttattcttaaaataagggactggtctgcaggattaacaaatcttacagttcaaagacagataaacattggaaggccaaaagaagtaagcaaaataaaaacgattaccattaaaaactcttcccttggcagttttcagagagggttaaaaaaaaaaaaaattttcctgattgtcaggctgaccctgctgtcatatttgccatttttataaacccactagtttgatcaagagccctatctttaagaataacttttaaaccatgcatttttagagttaatgaggcaataacactatagtattacagttgtagctcaacaactgttagatactacagattagtgatccagaagataatcaaactttatcagcaaagtagcaaccacaccccttaaaaacagaactcaccctgtgctccattaacttccataaagggaacttcgatgaaaatcgattacttcattgcttggaactagcatgtttgttttggaattacactaacgttttgtaaacactgtctcacggtaaagctaatgactttacctctttctgaaacagttttagggaagaaggcaccatatattacggtgaaactgggtcttagtttacatagcgattatttaaaaaattcacttccactgtgcattacaagaattaaagccgtttaaaaaactcaaccaaagcccaatgacaatgtattactctaggaaaagtgtgtcctttgggttctaaggcattaaattggaatttaatattaaaatagaattcaacggctaagtatccagtttcccccaatcacttaatttttcaaaacccagaaagggcctgtttgcgagtattgtgaaaacctgtggaaagagaggctttggaggggaacggtcgaattaaaataaatgcagagagcaaagagaactccgagttctttgaactcccccaggctgaacaggacgagaaggaaccctacctgccagcggccataggtgaggaggaccatagaaatggggatggcggtgccggacatggcatgggtggagggcatgctgtactcagagttgtagaagacctccaacttgaccacgggcggcgaggcgggcctcggccagcggatgatgtccttggtgcactggcccaggtacatgaccagcacccagatgaccacgagcctccggcccaccagagggtccaggttccagatccagaaggggaagaacaggatgtagaagagttcgttgcccagctccgtgccgaagcagaacaggcagtagagcggccagttgctcacgcgggccagctggccctcctcgcccgtcagcgagttgcggcgcagagcgcccgcgcgccgcggcgaggccgggcccagctcggccgccagcccgttccgcacgccgttgggggcgccgccgccgtccggcttggccgggcactgattgcggtcgctcccgggaggctgggggcctccaggcgcccctggctgccgccctcgcagtcgagggtctccggcgagaggcgcctccgctttctcatcctccctccggtctgctgagcggcgcggcggcgcttccaccccgcacagccgctggaaacgggccactttctgcgggtcctgcagacggccaaccagctgggccaggcgctgcctcagcgacatgataacggaacccccgggaaggcgggccggcctccggcgcagccccgaactgtccccgcgctcctggccagcggcagcggaaccggcacagcgctctaccctccggagtctgccgggtgacggcgccacaggccgcgcgcccccgccccgcgcgcgccgcgccccgccccgcccagccccgcccccacccgggctccctgaggggccgggccgcgcgggtccgccctgagcgcatccggccgtggcttggcgctgaggatcggcgggcggccgctttgaggtcccgggtaatatccaccagcaggcgtcgcggcgtacgtctggtgggacgcggcgtgtccccctgctccaccttcagcccttcttctccgcgggctagtgtcgccggattccctcagccagaagttgacttaaagaggccacgatcccggtgccagcttgcgcaatgcctgtgaccaagcagccgggcatcctgctggcacagaaccaaatggtgaatgatcaatgaaggcgaagcaactaccatgagttcggaatcattcgactcaagtaattaacaagtaattacagagctgtcccaggcgactgatgttcggaaaaccatgtgccaattgaccagtggtgacaagactacatgtagatcccaagacagggccaggtgatattaacaggtgtggtctgcaaaagaaaagccagccacctacaaattcaaaatactgtgtcatttatcaaatattttggtatatgttaagggagcacaggtgttcttaagtgtaaaatttccttttcctagattctaatacctagagggcttgcacagaataaatgtagagaatgaatgcagtgtatagatttttgagtttggtaacgttaatttagacgcttaacttccgtgtctcacaagttaccaacttgacttctagctagagcagtttataaggtctctgaactcctcaggtcaggtgaatgtcttttatatatacctagagagagagagatgagacagggtctcgctatattgcccaggctggtctccaactcctgggctgaagtgattctcctgccttggcctctcaaagtgctgtgtttacaggcgtgagccaccacacccgccatgatcaggtgaatgtctgtaattaaagaatgtgaactacttccaagaaacaggcttgaaattgtcccatgcccttaaaacagtagaaatactttccttcaggcgtggtagttcatgcctataatctcagcactttgggaggtcgaggagggaggatggcttgagtccaggagtttgacaacagcctgggcaacatagggagatcccacctctacaaaaaatgaacaaaattagccgggcagggctgggcacagtggctcacgcctgtaaccccaacactttgggaggccaaggcgggcggatcacctgaggtcgggagttcaagaccggcctgacccacatggagaaaccccgtctccactaaaaatacaaaattagccgggcggggtggtgcatgcctgtaatcccagctactcggaggctgaggcaggagaattgcttgaaccagggaggcagaggttgcggtgagccgagatcgcgccattgcactccagcctgggcaacaagagtgaaactctgtctcaaaaaaaaaaaaagaaaattaaccgggcatggtggcccacacctgtagtcccagataactgggggactgaggcgggaggattatttaagcccgggaggtcaaggctgcggtgagccctgattgtgccattgcaattccagcctgggtaacagagtaagaccctatcttaaaaaaaaaaaaaaaaaaaaaatttcatttcgcagggacaggtactctcctcctcccactccacttgctaggctgtggccatagaaagaggaataaatcatcacccatgctctcaagttgttcacagtttaggggagataaagaaagacaggactacttctagagtatagagaagatggcaagtgtaaaacagacataaacagcatgcctcagaaaggaggacaagtttgactaggaacaggaagaaaggtgttaggaggtgatcctgtagagctggattgttttacaga

SEQ ID NO: 1241668 - DNA, 4001 bp, Homo sapiens
aaaaaaaaaaaagaagtaaattttgtaggcataatggcgaattctcacaatgcagaaaaatgatgccagaagcatcatttggactacagaatgaatagagctatttaaatgaaacagcaaccaacacactctgaaaacctcattaatgacacaattgatctataagtatcctgcacattccacacctgcacaggagtgtagaagtagatacagagagtgaactcaatggtaggccaattaccagagaaaagtgcttcgtattagtagataagacagaaagctatcagcatgttggttcaaactcattgaccattcaaaacctaaaacattctatcacagatcactaggatacccaataatagatcttttcacaagtacctaagaacagatttatagcctctttcagcgatcctcaatttattctaaactcccttacgattttgagtaataaatgcacatagcatctacatttactcaaagttaaaaagcatccaaaaatcatacaatacactatgtgggaagaacacaaacaaatgcatgggaataataaagaccaaaaccaggatagtggcttcttggggattaagaaagggaactgctgttagagagaaatatcctgggttttttaatgttcaatggaattggtaaacattcgatttctctatagagtgttgaggagaggtaacatggattttgtttttctgctaatcaaaaaggagctggggtaaggatatttgtgttatgccttatatgctttttatatttgaaatattcctactaatttttcaagaacaaaaacaaggaattagaagggtatagactgttctaagaaaacacaaagaacaagtctgcactgccaaatatgcacctacctatgcaaagggatgagtctgccagtatccaagaccctttttagcattcacagcacaagttggtcgatcaggacgcaaaaccttctgggggtgtgggggtggggtagaatctgaaagtgatatattttattctcatgtctttgaatactaaatcactacctgctaactgttaagagtgaagagtatgccagtcaacaccaacacactctgccagtttaatttaatggtattattttgccttgctttgcaattactcctacatttccccagggagaaactaatggattactaaaaataaaatggagactaagtgaatcacttaggctgttttggctcctaactcaaactggcttaaataaaaaggaaatgtattggctcaaatgcttggacgtcagagaaagggcaagcttcagggctggtttccttgtgattctggactccgtcctccaccctgtgtggcttctcactcagtccggaagccacaatgctgcagctacaccagacctcacaccagcgcacaacaacatccagaagtaagaggcagctctgtcctaaccatgagaagccttctgccagaagctccaggcaaacccacattggagccacgctgggtagaaaaggattacaggaccatctctgaaaccatccccctggccaggtaacactcagcactcactgatgtagccagagttcatgagtcaatcatggacaaggcagaaatgagactgctcctaatcagggcgagctgcagtcagttcttcaaccccataacatgaggaatagatgcaacgcatgatatggatccaaccctaatgttcagtcagtactatttacaggcaatagcctgagcaatactgtatcagaatacgaaataaatcactattacactgtatttgtatataaagctatagattcaaaaagcagatgacaaacgacttcatctctttgagaaaagtagattttttaaaattttgtttctatgttttcatttctctaatcagaaatttaaacacagaaaatcaacactttgtaaagcaggtaggtcataggaagtatggcatagtacttactatattcttgtgccatggctaccgaaatttagacaacgtccacaccaataaggtataacctgaaataaaattagaaaaaaaacctggttaagtgcacaataaatttcactaaaatacaatagctgtataacttacacaggtcttatctttgttctagaagaggcaaaccagcctttctaaggtaaatagttgcttttaaattagacattagagaaaaatgtctctagtattatcatatttctttctttttttttttttaagatggagtttcactcttgttgcccaggctagagggcaatggtgcgatcttggctcaccacaacctccacctcccaggttcaagcgattcttctgcctcaacctccctagtagctgagattacaggcgtgtgccaccacgcccagctaattttgtatttttagtagagacgaggtttctccatgttagtcaggctggtctcgaactcctgacctcaggtgatatgcccgcctcagccgcccaaagtgctgggattacaggcatgagccaccgcgcccggcctgtctgtagtattataatatttctaaatatttttaaggtcacatgcatctttgtagagctgaccataacaaaccaaaacaaacaaaatacctttttatcaagtactgttgccctggactgctatttataaagctgaaacaaaaaggggaaaaaatagaattattatttttctctttttgagatggagtatcattctgtcacccaggctacactgcagtggcacaatcttggctcactacaacctctgcctcccaggttcaagcaattctcctgcccagcctcccgagtagctgaactagaggcgcgcaccatcacgcccagctaatttttgtatttttagtagagacaaggtttcaccatattgcccagacaggtctcgaacccctgacctcaggtaatccacctgcctcggcctcccaaagtgctgggattacagacgtgagatactgcgcccagctgaaaaatagaattattaaacagacctcaaaaatcatgtagtctactcactacaagacacaactaacctgttcaacccaatgcaatttaaagctagataaataagcttcgatttctaaattccttaacttgaagatctgaggagacagttctcaggagaaaaaaatgcaaaaatatgattccaatatctgatactgcatcatcttacttagtaaaatctatgaatattcagcacactatggagtgctgaacaaacacacccacagaacttgagatttttaagatgctggaattgcttttaatattcaaaagggaaagataatagccggtacaatggctcacgcctgtaatcccaactactctggggacccaggcacgaaaatcgcttgaacctgggaggcggagcttgcagtgagctgagattgtgctgctgcactcctccagcctggacgatagagcgagactcggtctcaaaacaaaaaaaaggaaagataagaactctgtccttatccaaacctcagaccacataactatataacaaaccacactttcaattaagagggactgaaaaacatgaaagtctaactaagctttaagacaattaagtttccaggtagtatgatgacaaggctgaggatcactgtccatgtatccacaaatacagtgtctaacttcacttgcctcagtgtgtgtgagattcagccatgttgctgtattcattatagttaataagctttaaaaaaaaaatttttaagcattaaaagaagaaaagtggacgcctcaaaacagaaggaaatatttgcaatacatatatctaccaaaggacagattcagaacatataaagaactccttacaaattaataagagggctgtgcacagtagctcatgtctgtaatcccagcattttgggaggctgaagcaggaggattgcttgagcccaggagtttgagaacagcctgggcaacatagcaagaccctgtcactacaaaaaaattaaaaaataaaaaaaattcaacatcttccttggtttaaaaaataaaaataaataaaaataaaaaatta

SEQ ID NO: 1241669 - DNA, 4001 bp, Homo sapiens
tctgtatgcttttcagcatggctgagtcattggaattgaggctaacagaacttccctgactcacaggactgcttttggaggacaggctatcaaggcaacttgaggtttctatttcctggcttgaacggctagattcttttatgttttcctttcttgggggccaatctgcaatccttgcccttacccccatttttgggactccgggggttgaggttatatggtgagaaccttcacttcgggggggtcctacaggagccataactgatgatcctaagctgccattttgggaccggaagcgccgcatgtagaaatcatcagtgtggactttgggggtgccgtctgtgccaacaacagaggccctgtcagtggcaagaggcctttctgtctgtgaccgtttcaagctggtcatgatgtaaaagcaagtagacttaaatccctgcagcaaggaccatcatatctgtgttttaaatgtgcacttcccttttggagaatggcttccagaaaatacaacagttgcatgagatcttaatctttttcatttaaaaggttaaatgatgctttatttgtaaagcactgaaaaattggaacttctaaacgttataatccacaacagtttctttgcttcactttaacagagggctttctttcagaaaaaactgaatggaacttgtactactgagattctgtggttgccataatcccatgctttctctaaaagagaaaaggataatttgaattagcagataaatacatctaaaaacaaacatgcaattgtcaaaaccagacacatgaagataaaagactcaataatggattaggattcacagttccacaatccgtatttttagtaaagcaggtttgaaagaaaggaagaaagtaaaaaccatttgataaaatccataatttatattctaaaaaaaaaaactattaagacttcatcttaattgaactgtttcataaaatggggggcagggggaggggtacatcttgttctggatatcatggctcctacccaaagtacagacttttgctccaatgacctctaaaaatgtagaacatcatgagctactgtgatgaccagaagtttgagatgtaaccaagtgaataagataattagagcaacagagttttttgacaaaagtaaaaactgaaaaatgactttactgaatatgctgcaacaatcactttttaactcctctattccaaaatcaatacatgttttttgtttccttacaaaggcttaacatagttggcaaaaacaaatacagcaggaaaaaataaataaaaagagttttcccagagccattatatccattagcactcttttgtattttcctctactttattacttaccgagacgaggatattgcagaatgaatccagcattcaccaccacctcttcccaagctctccttagtttcttgtactcttaaaagctagaagtatctcactaatgaacaaaatgcctgcatttcctcatgcagtacaacctactccaccccatcagtgctaatttatgaagacggcagaaacaaaacacagctctgggtggccctctccatatccccaacagattacagagaactgttagcatccttccaggtgacgggcatggaaacaaacttcctcatgagcacgtcaggcagaaggcaggagacacagattctgagtacaaaattctgcatggttgcgtacattctgaaaagaaaggcagaggctccttttccaagactccacaaattacacaagaggtggcctttaaattcttgccaaatacatgtttggaaagatgctgctgaaccagcactgagctgacagggcggcattgtctacaaatcacggctctgacaccggaggacgacctgcacttgctgcactctccactcaatggtaacaagcacctacttccacgataattaagcatctccctagtcggcttcctgcctccaaggcaggcgctttcatttctcttgcagcacacagcatcactttagaagactcgctgctatttaaaggctggaacatgtaggggtgtttcaaaaaaaaaaaaaaaaaatgcatgctgcctgcagaatgcagggtgaggcgagctctggctgggctcgtgctggctgagtctgtggagccattcagataaatgccatttgttttcactagcactcctcttcaccatcttttgtaaaagggataatagttttgcactgctacctaattaaacatggcttttgagctttctagatacttctactgtcagactgctattattccctttacattccagaactttacatgttcctctttcaatgataacccttcaagtgacaaaacatgctaactgttgcttccgaggatatcaaaggacagcatatatggccatagcaaaggttcaagaagtgattctcataaaatggaaggaaaattgaacaactgaaccaaaatgcaaacacctgttcaacatctccccaaaagctgattatttcaatgaatactctacatagcataaataatacttctaaagtagattttataaaaattagatgctttcaacatttctcacaacctcacagaaatccaaataaatcatctttcattccccaaacattcattctctaaaaggacaacacaccaatcccaccatgataaaaactcttgccacatttcatgtgccttagaaaatactttactgcacagctgtctttcccaggatatgtgaagttatttccattagaggaggaaactaaaagctggcagtaaaatacaagaaataaaactgacttggaaatgctcagtctccaccatcagtatttctcttccaaaccatctcatatacttccaatatttttaatgagtttataaaatcttatttttaaatataaaaatttcttaccaattcaaaagaaatttcaagactcccattacattatataacaacgactcaatgttttcttttcatttcaaaatataaataagcacatgggagagagagaagccacgttttaatggcttgtaaaaactgatgaggttcgagatgggcaattatgttaaataacagattttttttcagtcataaggaccttccttttctatgttttttttttctccctctcattttccatctccctccctccctccctcccttttctcattcttatttatagcatcaaacccctttggggtacaatataaactttgggcactgactagcatatatggaaatatacatgctttgcacttattaaactaccagtcaaaaataatgctgtccatcgatgtgtatcatatgatgacagatcaataataccttcacatctattccttagggttgactgaaacagcaaacctatgttgacaatgatcagcaactctcttaaatatcagcaaacctgcctaagtaccaatatggtaaaaagcaatagaattaaacagaagagcaatacgaattcacagcatgtcacctccatctgttgaaagagcaggctatataaaaattttccttattacatgtttaattttacagctctagatactatctaagtctatggtagatccaggtagctagaatactaattccatctagagggcccacagtttagttcaatgagttcaattcaactagttgaaagtcttttcatcactcaagatctctcacaacctaacccaccattcttccagaagaaatgcttcctcctctcatccaaatcaccccctgtgtttctgtagtgtcttcagagcatggaccatacatccaccagtccctccttcaaggaaagctccaggtgtagcagggagacacagacaagtaagaagatgacgggggatgcatgggtcatgcctccttcctatacactttccattttgattgtaagctctttaataacagagcttacaatctcctgctgggactaattgtaccacagtaggtcagccatttagaatatcaagtccctgagaatgctgaaagcagaacctcttatgggatctcttgattgccaaaaatccct

SEQ ID NO: 1241670 - DNA, 4001 bp, Homo sapiens
ttatatatctgaaaggagaaagtaactcaaaaaatgcaaaaagaaataaattgagcaaatggttatttagctattttaccatcaagaaagataagacatgcaaatcttatgtcacattgttaataaatatcttaatatacagtacttttcttcagaaagtactgcaaaagaaaatgtaagaaataaaggatctctacttacccttctggtagaaaaattttctataatagtatgcacccagatctacgtgttccacgatgtatcttttcactctatctaggtgcaacaccaagttctccttgggcacttcaagtactgccactcctgcatttgtgcaatgggaactaagggtagactcaaaggaggcactttcacatccactaaaggagccagaatttgattttgaaaggctgattttcctctccccttctccacctatctcattccgaaaatatggacagctcattacaagctcattgcttttatcatctccctggtccatgctgaggcttcctttggaattcaggtcctctgtgctgcccattggggagctaaaactggctgaatgagacagaggtccagagaccaaggatgccacggcagctgcggaagctccagtggtggtgtttctcctcttaataacattgtgcctgttcataattgcctcattcaaatcaaataatatactctggacatcatagtgggcaaagcactttggacatgtccagggcctgacagagtcttctgatcggttatcttcaagatctgatgacttcccaagttcttcacctttggcattgcgcaatttacgaaaaatagatgagtctccagtttcagattttgaacgtcgcttgagtggtttttccctttccttaaaaagcctgaggttctctctctgtgagataggcccgtctattacatccaaagagaaaccagaacccttgccaccaccagtaatgagaaagtcactgagcttggttggagttggacctcgatcagatttgtcatctttgtagccctttaacaaatcaaaaaagctttctccagatgttccctgtttatcaattgaagatgtgctaccatattccctgtgcagtgatggtccagtcttgtatgtaggtgagatacattcatcaaagctatccacatcaagttcacttatggtgatatcactgttgcttcgctggcgtattctgcgaagagcttttctgggggagctggggtaggcttcaggcatgagaaatctggagtccatgttctccgacggtcttgtcttgtttttcagcgtgttctgtatgcttttcagcatggctgagtcattggaattgaggctaacagaacttccctgactcacaggactgcttttggaggacaggctatcaaggcaacttgaggtttctatttcctggcttgaacggctagattcttttatgttttcctttcttgggggccaatctgcaatccttgcccttacccccatttttgggactccgggggttgaggttatatggtgagaaccttcacttcgggggggtcctacaggagccataactgatgatcctaagctgccattttgggaccggaagcgccgcatgtagaaatcatcagtgtggactttgggggtgccgtctgtgccaacaacagaggccctgtcagtggcaagaggcctttctgtctgtgaccgtttcaagctggtcatgatgtaaaagcaagtagacttaaatccctgcagcaaggaccatcatatctgtgttttaaatgtgcacttcccttttggagaatggcttccagaaaatacaacagttgcatgagatcttaatctttttcatttaaaaggttaaatgatgctttatttgtaaagcactgaaaaattggaacttctaaacgttataatccacaacagtttctttgcttcactttaacagagggctttctttcagaaaaaactgaatggaacttgtactactgagattctgtggttgccataatcccatgctttctctaaaagagaaaaggataatttgaattagcagataaatacatctaaaaacaaacatgcaattgtcaaaaccagacacatgaagataaaagactcaataatggattaggattcacagttccacaatccgtatttttagtaaagcaggtttgaaagaaaggaagaaagtaaaaaccatttgataaaatccataatttatattctaaaaaaaaaaactattaagacttcatcttaattgaactgtttcataaaatggggggcagggggaggggtacatcttgttctggatatcatggctcctacccaaagtacagacttttgctccaatgacctctaaaaatgtagaacatcatgagctactgtgatgaccagaagtttgagatgtaaccaagtgaataagataattagagcaacagagttttttgacaaaagtaaaaactgaaaaatgactttactgaatatgctgcaacaatcactttttaactcctctattccaaaatcaatacatgttttttgtttccttacaaaggcttaacatagttggcaaaaacaaatacagcaggaaaaaataaataaaaagagttttcccagagccattatatccattagcactcttttgtattttcctctactttattacttaccgagacgaggatattgcagaatgaatccagcattcaccaccacctcttcccaagctctccttagtttcttgtactcttaaaagctagaagtatctcactaatgaacaaaatgcctgcatttcctcatgcagtacaacctactccaccccatcagtgctaatttatgaagacggcagaaacaaaacacagctctgggtggccctctccatatccccaacagattacagagaactgttagcatccttccaggtgacgggcatggaaacaaacttcctcatgagcacgtcaggcagaaggcaggagacacagattctgagtacaaaattctgcatggttgcgtacattctgaaaagaaaggcagaggctccttttccaagactccacaaattacacaagaggtggcctttaaattcttgccaaatacatgtttggaaagatgctgctgaaccagcactgagctgacagggcggcattgtctacaaatcacggctctgacaccggaggacgacctgcacttgctgcactctccactcaatggtaacaagcacctacttccacgataattaagcatctccctagtcggcttcctgcctccaaggcaggcgctttcatttctcttgcagcacacagcatcactttagaagactcgctgctatttaaaggctggaacatgtaggggtgtttcaaaaaaaaaaaaaaaaaatgcatgctgcctgcagaatgcagggtgaggcgagctctggctgggctcgtgctggctgagtctgtggagccattcagataaatgccatttgttttcactagcactcctcttcaccatcttttgtaaaagggataatagttttgcactgctacctaattaaacatggcttttgagctttctagatacttctactgtcagactgctattattccctttacattccagaactttacatgttcctctttcaatgataacccttcaagtgacaaaacatgctaactgttgcttccgaggatatcaaaggacagcatatatggccatagcaaaggttcaagaagtgattctcataaaatggaaggaaaattgaacaactgaaccaaaatgcaaacacctgttcaacatctccccaaaagctgattatttcaatgaatactctacatagcataaataatacttctaaagtagattttataaaaattagatgctttcaacatttctcacaacctcacagaaatccaaataaatcatctttcattccccaaacattcattctctaaaaggacaacacaccaatcccaccatgataaaaactcttgccacatttcatgtgccttagaaaatactttactgcacagctgtctttcccaggatatgt

SEQ ID NO: 1241671 - DNA, 4001 bp, Homo sapiens
gccagagcacacccccttcacctgctacagagttgctggcaagacaagcatcccagaaccttccagacctcttgttctagaacacccacccatccctgggagcagtggttttccatcaggccacagttcagtcacctggggagctttgaaaaatcagatgcccagggccagacccagaaatgctttgttttttgttttgcacctcaccataacacagtaaaggcagagatcccagaaactctatgtggctctacatgaagtgggcagcaataatagtgacagggtaactcacatggagtagctgatgccagcccacaacaccctgcaccttcctcctggccccccacaccttcccccatctataaggggaaaggaatgggacagacacgtggtgaggctaatccttgtcctcaaggccttgtggacaattcgaggttaagagatcagggtaacagctgtggcctggaatttggaaactgtcacacagttcaaagtaggtgtcctgcatttaccatggaaggcccactgcacccagcagacctccctgacctgacccggtgagtggcacacacctgccaacgcccaggtcaggacactcgggaagaataaagggccatactgagccaggccccatttccatcttcctcttcttgcctgcacagtgtttgaatttttcaactgtcctgagagggcacacgattgcggtcctgccacagttcccacggcatcattccccttacctccccatggcccagaatagcactcgctttcacagccctagcacactggagacaccgcacagaggaacctcgggaggcagagtctttccctcattcccaaggcacaagcggcaccaggtaaatcacacaccccgggtcatcctctaactgctctacaggtgcagactttgtgtcccaatcactaggcaaggtaagctccactttttacctgccccagggtattaatcaccccagtcagagtgatgatcaataagatcaacacgcctgaaatccacaggagaaagccagagaaggcctgggagctcactgccctcacatcccacccagaactggacactgcagccacacggagtcctatttcgctctcctgctgcctggcttctgcctcgccctcttccttcccttcctctgcctggctaactcctactcgcccccacaggattccgctcagactgttcttccaagaagccttccgtgccatccctgcaggtgcgcctgcacaaacctgtgcctgccccgaccacctgtggcgactcctcctgctggtctccccaactaggctggggagctcccgggagacggggcacatctgtcttgcctgcctttggtctcccgagaaagccgccgtgcctggcagggccgcgcgctccatgaatacctcttgggacaggaggggcactcttcgggttgactccatgcaggacgccccgctccccaacctctcccaggacatcctgcacgggacagtcctgagaaagcaccaggcgggtgccgctcactgcagggcggcgactaaccgggatcgtggaagagggcgcgggggctaggggcagggacccttttctttcaggctgttggacagggtgggcgaacgctggggtcctcacatccccctcactgaccccagccctgggcgtggccagcttgtgtccccgcggcctcccagcttccgggaacgcggggccagaaagcagggccctccagccccccgctcaggcctcagaggggacgctgaggcccggcccgttccaggccccgacgcagcggaccctcggcagcccgcccgacactcaccgaagacctcctgcgagtagcgctcggcgcacacgccgcggctcaactccctctggctcacgcggaccttgagctgtagcggggccacgtccgcgaaggggcagctccgcttgggcatggccgcggggccgggagctacgcagctccccggccgccagccccttaccaacgacgccgtgacgtcacagctgcgcgcccatccgcgggcgagagcgggtttgaggagagggagcgacgcggcgcgtcataggctgcgggcgaagtgggaggcgggactcctgcgcggagcggcgcgggataggccgagggagagatcgggggtgggactcgtgcgtcggtgtactggactcgacgccgcgggaaaggccaggggccaggttgaggatcagggtgggcgggtccgtgggagagatttgtgcgcgcgccgctcaggataggcgggaggagagactaggggcggggttcctatgcggcgcgaagcgacgaagggtgggagccaggtcgcggcattcggctgcgcgggaagagccagggggcgggggcgaggccgagggtcaggacggtgcaacgagggcggagcttgtgcatcgggggcgggcctcgtttgaggatcggcgtgggataggccagggcgacgtcggggcgggtctagtttgaggagcggcgcgggataggccagggcaaagtctggggcggctgggtcggtggcgggattcctgtcagcttttgtttggttcctaaacggtagacactggttatagttcctcatttacttctccgaagttaagaggcagcccgcttcttcctagctcttttttcccctttagagacagggtctcgctctgtcacccagactgagtgcagtggcagtctcggctcactgtagcttgcgcctcccgggctcaggcgatcctcccttctcggcctccccggtagctgggaccgcaggcgcgcgcctccgcgccccgctttttggttttgggtaggaacgggggtttttctgtgttgcctcagctggcttagctcctcactgtggcggtctccgccttccagaagtaaaggcgtgtgggggctgcgctctgagggccgcgtgcggctgccgagcgcccccgggcgggggtatgcgccgctgtgtggaaaatgttcttgcacagcgggttcgtctgacttggtgtccccatgccgcgaggtgcacccgcgtcgtcccttctccggggttctgctcaccagaggcggctctcccctgccccggcgggtacagaaccgacccgtcctgtggcgtgggcttcgccctgtgagagatgacagcgtgctggcagccctcgctcgctctcggcgcccactctggccgcgctcgaggggcccttcagcccgccgctgcactgtgggagcccctctctgggctggccgcggccggagccggctccctcagcttgcagggaggtgtggagggagaggtgcgggcgggaacccgggctgcacgtggcgcttgcgggtcagcgtgagttccgggtgggcgtgggctcggcgggccccgcaatcggagccaccggccccaggcagtgaggagcttagcacccgggccagcagctgcggaggatgcgccgggtcccccaccagtgccggcccgccggcgctgcgctcgaattctcaccgggcctcagctgcctccccgcgaggcagggctcaggacctgcagcccgccatgcctgagtctcccccctgccgtgggctcttgcgcggccccctgctccgcggcacccggtcccatcgaccgcccaagggctgaggagtgcgggcgcacggcgcgggactggcgggcagctccacctgcagccccggtgtgggatccactaggtgaagccagctgggctcctgagtctagcggcgacttggagaacctttatgtcaagctaagggattgtaaatacaccaatcagcactgtgtttagctcaaggtttgtaaactcaccaatcggtaccctgtgtctagctcaaggtttgtagatgcacccatgggcactctgtatccagctaatctggtggggatttggagaacctttatgtctagctgtgggattgtggacgcaccagtcagcactctgtgtttagctcaaggtttgtaaatgtaccaatcagcactctgtatctagctaatctggtggggacttggagaacctttatgtc

SEQ ID NO: 1241672 - DNA, 4001 bp, Homo sapiens
gcactcggtaccggttaacttcaggatttcgcttccctcgccgcttccgccttccgagtgctcgtcagtcctcccgactcctagcgcctgtctgtctcctttctttccccttatcctcacagtctctgtctcccgacaagcccatttcagcagaatttatcctggctctggttttccaccaagacaagaaagggagcaagatcttcggcccctagtcttggaagcgaacaaaggaaaacctaaccggcccctgcgctcaggttttcccccaaactctttggcttcgcggagcgctctccccgccacagccacctccccaccgtccttctgaatctctgtccgaaacgctatagagaacagaaggagcctgcccaggtggccgaaggtgttgccccgaggtgggggaaagtagagaccaatttttaaaatattgccttgtgagctccagtgcgagagagggctgcgactggagaccctttcctcgtctgggcatgcggcgcggtcagccagaccgacgggctgcagtgccgggccacgcgcgagcgagcacggcgaggatcaaccctttcttaatttggggcgccggggagtaaatgcagcgccaactctccccaaagctctctttttgttgtatctttaaaagtctcctccatttgtccagctagtgagaaatgaagcaggctacctctaaaccaaaagactatcaagagagagctgtggagaaccaggcgggagtgggggcagagccaatgtctcaggccagcttcacccctctggggagcaagaggagagaggttcgcgaacctcagctcccaccaaacccctttccttgcgacaccaatcaacatttcactgcccgttgatttagaaactcactctccacccaccactcatagccgcggccagccagggaggcataaagaccaaatctagcgccaatatttcccgacactcacatcccagagaaacccacgcgcgggtgctcaaagcaaatgaggccccatccttagcaaggaacctcagagttcatgaactttcgctgcagcgccgcggagggcctgcgcgccgccccgtggacgggctccggccggcggggaggacttggtggctggtgcctgcgggggcgggagggggcggaggagaaaggacggcttcctagggtcgcccgagtcgcgggaagcacgccgcgtacctttccttggcctccgcggcccggtctctttgcctccggttcttaaaccagttgctgacctgggtggtggtgaggccggtggcctcggccagctcccgcttctcacgcggcgatgggtagggattgtgcgcgtaccactcccgcaggacacccctcgacttctccttgaagcagtagctggtctcctcgccgtcccagatggtgcgcggcagtggaaattttcggcgcacccgatatttgcccacggcgcccaggggtcggccgcgcagcttctcggcctccacgtaatgcgccttcagccacagttgctgcagtttggggtggttgtgaggcgagaactggtggctctccaggatcttgtagagctcacggaagttgccgcggtggaaggcgaccaccgccttggccttgagtacgctctcgttcttgtgcaggtggtcgcaggcgggcagtgaccacaggaacctgcccaggcgctccaggtttccgccttgctgcagaacctcgcacacgcacgccacttgctcctgcgtaaagccaaacgacggcagcatcgacatggctggggcctgccggggcgcacggcccaggcgcacgcggcagggagcagagccgagaggcagggggcggcggccgcagggaggggggcgcggctgttcctaacctcctccttaggctttgcaaaggcgaaaaccggagtcggaacttggcggtgggcggccaaggaagagaaggcggaggagtaggggaggttctggacacggaacggccggcgcactcagtagcctttaaggccttgctgcctccgacctcccgcccggtggatgctgctagttgccggggaacttggtttctgttctccccgcagcggccttaaagcgcgcagcgtccccggcacgctgattggctgccggcggcgcctatccggggctggccagccagcgcgccgcccggctgggcagagaggccgcaccgcccagagcggggagggcgaggctgcggagctgggggttgggggtgttgccggggctgcgcgggtagggagtggtgggaggagaaggaagaggaaaggtgggaagccagttggggtctgagggagctgcgctgcggaggtgtggggaggtagggagtgggtgagcgcgtcaggaccctgcaacgcgggacccgtcgccagtatcacctaaggggagtcgcgcacaactccgcacaaatcaatgactccaaaccttaattcctcccctctccctccgtactcttgtcctcatcccttgcagacttgccctctcccggtgagctcatatttaattactttaatgttggaatgaataaataatggattgatgaatagcttatggaacgcgataaataattcaagagcagaccagggtccgcgcatgcagcctctggaagagtggcttcgggttggcttcagctcgaggagtccaaccctatttcctcctccctccccccaccaactaccactgtcctccccccactgctgcacaccaccctccaaagggcacaagtactcccagtcggacagcgtttccctcgttcacaaaagacctccatgatttgagaccaggcagagagctgtttagagcatacttgctgagcacctagagactccgagcgttcatttgtgatttggtatcttaatgttctgcgattgaaaccagcaggttcctgaagcttctggactcaatttccccatctgtgcggttgtgttttgcagtgccacctctgctactgaggaatgccgagaggctttacttgctattagcaaaaatgctttgggaacctcgtacgaaaggcgctggatgtggtgtaaattaaataaaactgtgcccggctccaataaccgtccggttgtaatataatccttaccctgctctgagagggacactgccctcaaagcgagaacgacagcggctccaagaagattaaataaagaggtgtgtgtgtgtgtgtgtgtgtgtgtatgtgtgtgtgtgtgtgtgttgcaatgctggcctattttgctgccagggaatgagagatgcactgcaatttaagtcccatcatctgctgttttgtttatgtgtggagaatgcttagtaaaactgcacaaacaagtgaagttgtaattatcttaagcctcatttgcacacctagttccaaagcaataattaaaaggattttgaaaacaattagcctctctaaacaaagataatctattgtcagtagctgagactagcaggagataagaacaatgcgtggagataagggaagccaaatggtggaaggagagtgactttatgactatacttatctctgattagataagttcaaaacagaattctaagtacacttcaaaaatgcttttgatttcaatgtgccctcttagtgagtggtgaagaacaaactgtaggctccttaaactggcttgtcttcttcaaatatgttttgattcctttagccaaagagcccagcactacagaaccttttgcatattgagatgcaagtgggagaaggagaagcatgtcttggtttcctcttttattattaatatggttttaaaatgatgcacccagtacagtgcaccctgcaacatacattctaaactcataaagggttcccacctcagggctgccacatgggagattccaagtagacaggaagctgcttctctgctgaacataatgttttctgcatccttgaaactcttgcttattccatgcaattagatcttggaagcagatgctgatatttcattaccttaggctttttttttaaaaaaatgcatttaataggtgtgcatgctttcaaa

SEQ ID NO: 1241673 - DNA, 4001 bp, Homo sapiens
ttctttctctcctatccccgcggggctggagacaccaggtctttaggcgaccttctccttactttgtttcgtccaacaaaacacacagacgcacacaccaagtgtctgactcgggaggacgcacaaaagaggtggaaaatccggtattttttttaccagagggggaaagcagtctgccaggcaaaaagctcaaacccagtggggtgggagcgcccccactcctttgctgccgcccgccgtaagccggcctgccccccacccataactaccgtaccaggagggagccaagcagcgttcgggggccgagggaggaagcagcccttcagccctgctaccccggctgcgctgaaacccgatcctaaggagttcagaatcaggtttcaaaacatgacagagccgagctgcaccagcaccccacgttgccgcggccgctaagggaaccataggggcagggtgaatgattaactctgtcatatgaaacctcgacgttccgagaccccttctgcgccgccagtcccacaacactctcttcccttcaccagagcagccaccgcgacctccagcgcaggcccggggggcggctgaaccctggggatccgggagcgtgcgcgcgcgccaggcccggtgtgacctcgcggaggtgcagaccccggccggcgccggcagtctctgcgggcctcgggcggcagggagagctacggtgccggtgtccacatttgcttcgttagcccctccagaaacggggagagggtggcaacttcaaagccagcgggatgggggtgggaagctgggcagcagtgaccagccgaggtgggggcggggactgagacctaggcgggcgaccagaaacttctggggggagagggggagggtaaggagggaggttcccccgccccccgcctccgccgccccctacctctgccggccggggagcgaggtagggggcggggagaggtgggcagccggaccaggctggtggggaaggtaagcgccatgtttgcgagcacttggaggaaaagaaagccgggaagggggtgggggagaggaagggggaggaggaggaaagttggcgctcaccttttggactgggtctcggaggggttcctgtcgcgctgccggcggttcttgaaccagttgctgacctgggtgagggagaggccggtgatcttggccaggtgccgcttctcggcgggcgaagggtagcgattctgcttgtagagctccttgagcgcgttgcgcgacttctccttgaaacaatacaccgtctcctcgccgtcccagatggtgcggggcagggggaatttcctgcgcagccggtacttgtctacggctcccagcggccggccgcgggctcgctcggcctcggtgtagcgcgccttgtaccagagctgctgcagcagcgggtggttggccgactcgaagctgtggctctcgaggatgctgtagagctcggggtagatgccctggtggaaggccacgagcgcccgcgccttcagcaggctctcgttgccacgtagcaggtcgctctggggcagggaccacaggaaccgggccaggcggtccaggttgcccccctgctgcagtgcctcgcacacgcaggcgacgtggtcgggcgagaaggccagcggggtctgcgcggcggcggcggcggcgtggtggtgcctgcccagaagttccgagtggagttgtacctgatccgccgccgctccggccgccgccgccgccactgccccttcctctccgctcaccctggcggcagcggtcgcggcgtcccccggctccaggggaaaaggggctggagccggggggctcagccctaccgccgcgccccccgccacttctcggtgcgcctcctgcccttccgaggcgctttccatcccattctcttgcttgatgtccgccgcacttgcgatctgcccggtgggggaggaagaggacattttttgttgtttattttcctccctccctcactccctcgcactcttttcctctttctttcctcctctcttactcctcctccttcgtctccctccctcctctccccctccggaaagcccactccctccctcctggtttcggctgtatctggccgatcaggtttccccccggccacgcagtcaccattaagatagctgttagagcaaagtagtgtaaacggatagctgctttctgccgttcccccaacgtgactcctccggttgctgcatactatatggcagtggcggccgggccggcccggcctagccacctcattggctatttcgcattcagagggaggaggagacacagtttctatccctgtcgatcacccgcctcccactccacccctcgcctttccctcccctcctgacccccaggcacctatacctgaaggaaaacaccgacattctttccaagccacgctcctgggcgggaaattacctaatgtggcctgaaaactggacaactctttcaaacagaggccctacaattccagagggaatattaattgtgtggccttaaggtctggatggttaaatttttaacaaagagaccaccctcagcatctagatgacaaaacttcagaggacaattcagaagccccccagtatgtccctgttccccattctccctctttttggatgtctttatcaaggattttgtattcaaaacggtcaaaaataaaatgacactaggaaatgttctaaggggcaagcatttacagtaaattaaaattccaaagagggaaaaatgcttgaaaaccttataattagcagcataaatagcacactgagaagacaaaaacaagaagccttcaaaaaatgtacttaaccttaagccacgtggagggctggcaacccaactgagttgaacatggtataattaaacatgtagaatattaaaccataagtttatcctggatgagtcgtgtggaagagatctaagctttaaatatggaaatttaagttttctacatgaactttttaatgtaagtatatgagtatttcttttttaacgatgataggctagaaacactgaatgtgcgggtgtcatccagatcagtgcaggatcagaagcccttttccacagcatagacagattgccctctggtttgatgctgaagtgggggtagagtcttttgttgtttgcagttgtgtctctttcctttgtaatttgcacaagatcttaattccaaaagggatgatccatttctgcttctttgattactgtaggtcagttgggtttgcctgctgctgctctttctcaaaattcaactttttttccccccgagatggagtctcgctctgtcgcccaggctggagtgcagtggtgtgatctcggctcactgcaagctccgcctcctgggttcacgccattctcctgcctcagcctcccgagtagctgggactacaggcgcccgccaccacgcccagctaattttttttttttttttttttttgtattttttagtagagacggggtttcaccacgttagccaggatggtctcgatctcctgacctcgtgatccgtccgcctcggcctctcaaaattcaacattttaatgacatcatcctaacctttgcttcagggtggccttgtattgtgtatgcttcccagctactcatagctgcctacttcagcatattacaaagcagctgtctaggtcacctgccgtcatgataaacttggtgagattttctttttttttgtagacaggctttattttattgctggtcaatcaagatgtcatttgatgtaggatttaacttgtttttgcattaccctaatgtgttgacatcgctggtagatttaaaatttataacaacagaaaaggccatattatttatttgcttatttatttatttatttatttatttattttttgagatggagtctcactctgttgcccgggctggagtgcagtggcgtgatcttggctcactgcaacctctgcctcccgggttcaagcgattctcctgcctcagtctcctgagtagctggcactacaggcgcgtgccac

SEQ ID NO: 1241674 - DNA, 4001 bp, Homo sapiens
tggagatggctgaagtggccgccttgctggatagactggcggccgggctggtggcgacgcccagcacctctggcgtgccgtcgccctccgcccgtagtgcccgcccggaaccctgtgacaggacctgctgctggagtctacggggaagaaagggaacacgggtcacagctcgtaacacagccgcccgtcgcccgcccccaccacctcctgcgtccctccagcccggcggctagaggttcttccgaagaccccagcagttaaggcgaggattactcggcaaggcgacagaggtcgggcaggagtccgcggccgcccctccgcgggtccctactgttgtgccccaccatgattcgcgccctttctcagcgccgcagctcccaggtcttttatatactgggcttgcagtgtcctccctgtttgttgtgcacttttgggagatttacaggactgtcaggaaataaacgaagtgtgggtgacaaggacagatcggtcccagggacatgggataccatttctaacggtgcgtctgcctggggcttacgcctgagcaagtgctcccgcgatcgcgttggatcgggtcggcccgacctaaaggcaaaaaggattgtaaggagcatttgggcctgggggatgaggccgggctcttccgcaaaatgtttggctaatcgagatccacactccgggaaacgaaaagcctcggcccacggactagtttgctgttttgagacaagagtggcaggcagcgcatgggaagaggaaaactcgacttcccatttctcaaaagtccattgaaaactgttttcaaagcattagggagggatatacctgggctttgaaaatgataattaacatgaaaccgacacattgctaataagccaggcttcgattaatagtaggagcctgtgcccaggctgacaagaattagctttgggtcttggggtccctaactgtttgtaggattttaattttttatttctcttcccctctccgtcccagtgaagccttggtttggtgaccgggaccagctgctgcagctgcccgcaggcgtggggagccagcgggtggggaagcagagccggcaagggaactcccggccaggagcccagaacgcagggctcttaacccaagacagaccgcgctcccaactcctgctgaattggagtcgccagggactgggtaagggcgccagaggtgcctccacccgcctcctccccggtgcgctcaaagcgcggaggcctctaggtaccgacctgttcttggctgcagccgctcggtccctttgtcggcggtttttgaaccagttgcccacctgcgtaggggtcagtccggttgcctgggcgagctcacgttttttgctggggttagggtatggatcctgcaggtaccactcgcgtagcaggtgccgcgtgcgctccttgaagcagtgtgtcttctgttcgccgtcccaaatggtgcgcggcagcgggaacttcttccttactcggtacttgtccacaggtcccaggggtcttccacgcagcttctcagcctcctggtagtgtgcttcaagccacagcgcctgcagcttggcgtgcgactccttggtgaacttgtggttttccaggatatgatagagctcgcggtagttgccaccgtgaaaggccacgatggctcgtgcgcgtagcaccgactcattcttgttgagggcctcgcaggccgcaggggccacgggcagcgaccagaggaagcgacccaggcgctccacatcgccgctctcttccagggtctcacataccccggccacttgctgggggctgaaattcaagatgggcagctggaacatcgaggcagtgccggcggcggcgagggcactgagcccggagcgggacacgcagcagatgcccgcgggcctggctgagtgtgccaggcgcttgttgatgaggcggattggggcagcgggacacactaccgggtggcggcggtggctcaacggccgggagcggacgaccccgactggaggaggtgctggctccgcggcttggggttcgggctcggctcggctcaggcacgccggcaggcgagctggctccgctattggggtgggcggattggcggcgcgggcgccatggagaccccctgtcagtcaccgggtggctctgccaatcaaagcttgaatcagcacgccaggactatttcagcacctccccgtgctcgacagcgcccgccgttagctcctggacttttcttcagtattttgcagaacctggaggttgaaaagacatgcgagtgtctgggagaaaaagagaggcgagtgcggcagcgttcactactcctccctcccccaccccgctctacccctccctccctttttcccaccaaataggcagtgatgccacaggaattcaggaattcactttggggcgatgcgttgtctcggtcgagaggtctccagaggacaaagaggactgggccaaactgaaatgctccgagaattcgcaagtttagttgtaacgaaacagcaaaccttgcggtgggagcaggaagccggtggggggaagcgatcttctcatttttcccaagtacccatctctgcatgcctccctcttcccctttccagttgccaaagcagctgagtgggaagcaaatctggagcagcaggaacaggaccagggatctgtagaagaggtcagtttgaactctagccttactcccttcaaagcccactaaaataattttaaatgccaacaaggacatgttcacgtctgataacgcagatgcagaccacgaagtcagacactttaagaaaagaagggtgggctgtagggacctccaaataaagggggagaaatatactttctccccctcccccagtttaatggacttgaacaaagtgcagcatagccacatctagagccgagaagtcattggtaggtcaggacagcaacttaaaagcttatttcctagatcttttttaaaatatcgacttaactcctttccttgtaggcttattttgcccctaccttgtgttagaacttatacctcttgagctggggataacaactctaaccttggcattttagctcaaaaacaattcagtaaaaatacaatacagaagggcatccacgacaatgcgggggcccagaaagcacttcctaagccgctgattattgacccctcctgtagtgaggaaggagtggcttggtggctctgactttgggctagtggagtgaattggcaacttttattgattcccaattggcagtccacatcataccattttctgaggcctgggtcaaagaaaccatgatctcatctgggcctgtggtaggggtttgtttagtttgaagaaaataactggtagggggctgtataacaaaaacgccaggaaaaccgttttggggaggtccatccctagacagaaatcaggtgagaacgttcacagccgaactggactggacccgactgtcttttctttagtatcaagtacaatttgtatgcggcttgtacagatctggtaaatcagaaggcagatagatagcacagatggttggaggtgtcgggtcagatcacgccacgcctgagtgcagggcaaagctcgttctgacggaaaaccctgatattattttcacagatcttcacagttcactcgaaaaaaatagcagaggggaagaaaaaagccctgaaaccatttacatcatttctgtgagattgccaaccgcctcaacggagaggctttcttttctaagagttcattttcttgaaatacgacaaggcaggggcaaaataaagagggcgatgaagataatgacaaagcataaaccttctttcccttggagcgacttccgaatcagccggaaggacaacttttagaaagaaacatcggatacaagggccccgaacacgcaggcggaggagaatccgcggtgcagaaaaagagggcctcggtggccgggcagggatgaagccggacccgggagggctgcgatcccggagcttctggccaggggaggaaagcaccccct

SEQ ID NO: 1241675 - DNA, 4001 bp, Homo sapiens
ccattgactactaaagtgagggctgaatcatatggaaaaagagcccagagcttctcagatggcagatcctgttaaaccccaactctcattcactctcacttttttatttcctttttttttttttttttgagagagagacagggtctcactctgttgcccaggctggagtgcagtggtgtgatcatgactcactgtagccttgaactcgtaggctcaaagatcctctcatctcagcctcccaagtagctgggactacaggcatgtgccactatgcctggctaattaaatatatatgtatatatttgtagacacagggttttgctatgttgcccaggttggtcttaaactcctggtctcaagtgatcttcctgccttggcctcccaaagtgctgggattataggtgtgagccaccgtgcccagccattctcacttttttcatttaaaaaatctgtcccagtgtcattttgcatcactaggaggggcttcttgactgggttagttttcctaggaaagtttggctaggagtagggtgctgacagacacaagcagatggactttctgggttctgctgctatacctggcattgaatagcgtctccacggaggactaaaccaggggggactggcttgagactgaggtttcactgaaagcaagagcttctgctagtgagttttctttagcttcagcacaggctgctggagctggagcaggtctgaagtagctcctctggcagatgttcaagactagagtctccccagtttggaaggatgagcatcaaccagcccctgtgtgctgcgtctccaggagcgagcccttgctgatttctgcttataatgctttgggcagggggttagggggtgctgctgtcttccccttatcagggtggctgagatggggctggcctatctggagtgggtgctgggaaactctaggatctccctggttgtgcctttgcatggaaatgtcattgcatctgatggggaatgagggactttaaagagaaaacatcttagatgaccaggtaattgggaggaccttttggaaattcttgcccgctttgcaggaatttgaggtgctcatttggttccaagtcaccttgatctccctgatgatgtttggaacgaatcacactaccttttaaatctctgggctcaaagcaggcaacttgtccactgttgtaggtggatgcagttctccagaggttcctttggctttaatcagtgctcctttaagacaatccttgagacacctctggaagcaaggagatcaccacgagcttcctggaccagtatggtccctttggcttggtgcctaaaccagacgtaccccaactcctgcccccatcccagcataagctcttggcaataaatgccagacttcccctgccctagcctccacccagcctgcattcactccttttcctggctttagcccagctcttcccctcaattgtgacatatctaatgtagctcctgtcccaggctgttccctcctcacccccaggcctacctgaggttcatgtcccccttcatggccagactgaagacattggacaggttccctccaggtgagcagccacagaccaagatggccagtgcctcaatgttcttcagccggaagaccttgcccagcacaaaggccgtgaggggcatgatgccatactgtgccaccagggcgatggccagccctttaggcttccataagtgagccttgatcttgctgaactccatggtgcagcccagcgagagcatgatgaagaacaacatgaacaccaggatgacgctcagtgccaggtctgtggggcgcttgccaaagttgggtggcagggtgaagttgaatggggcagacgcgttgtgggcctccatcctcctgtgaggcagtggaagaccactccttgttctccggctgactccgtttcttgtgcagttcttgctggatgccttctttaatcacctctcaggacagagagtttctggacaaaagctctgggcaaatagaagggttatgcaactatctgagctatttctctggctgtcgccccaaagaggaacagcccagaaccttatctgcctgccctagctctcccaagctccctgacctctgctggattcctgggtgctacttgtactcctcccttgtcactttgctgcttctgggcttatttctcccctttgccctccactgagtgtgcctcatgggcattcattcagttactggggacctgcccagggcccacctgaatctaggtccagcccatctccttccctgcagctccttttcccagctccgctcttgattccttagtttcttggttgggggaaggtgccctccccatgtccagtgggttatcatttgtccccagaacccatgagagtgaaaggagctgggtgttgcctttggttcctagatacaggtagcatagtccaagggggtgtgggacaggcaatgtcactggcctccaggaggggatgtgtccatgacccttttcctgggagctgagaggatgccagtatcctccctgcctgttctggggaaatgtttgttttatccccaaactgggactgtatgagtcccagggaggaatactggtggtggctgctccacactacctggaatgcttaccatcagagggaataaccagctgggatggtgggtgggctctcaggaagcttggaggctctttccccgaaaagcaacctgagagaaccctggctgtggagattgctttgtgcccgaggaggcccattgcttgcaaaacttgctgagaaggaagcaggaatgcagtcttttcttcctgacttcctgattgctttacttttgcactgggcctgtgtgtttcaggctgggagccaggcttggggcgtggagcagaagcagagagaggtgggcatgccaggggcggggccacctagtgtgtgaggttatcctaggccttgctctttccatctatccccactgcagaggtgggacaagggaggaggggtctccttcagaaacacaattgcttcttggcttggttggaacctaggaggcctgggtggggtctgaaacaggtgattaggctttgtatgtaggactccagagggcagaatagggaccagggtgtgaaccactgttgggtggaggtggggacagattttggcttggtgcaaggaaccacctgaaaatgagagctctccaagaatggccttgaggcctctggaatcctgcttggataagggttggatggcaggatccatacatattgcatcatatccatgaaaaggctgctccctgggcttgcgcggtgggcagcctgcggggccgtatactgtggccctgggtgacatgaacttgaagcctcttttcctttgagagtctctgctaatgatttcctggtgcttgagttgggctggtatcaaagggagggcaggcagaggactgggcactggatgtgatgcctggactgagcgttcccacagggtagggttgagtctcagaggaggctgcttcctctccctggggctaatcagaagggaacagagttgctaggggagaattattgatcactaactgagtaccaggcaccatgggaggcaaaaaaaataaaaataaataaataaaaaaaactatataattcatgttcctgttctcagggacctgatggtctgtacaagaccacagatggccagatggtacacaatgcaatatggaagcacgtgagggtggaggccatgcagggctgccaggtacacctgttcaggttgggcactacacaatgctagggacgccactctacagatgtcttgtgcaaccgtacatgaggccttgaagtcaaagggagacgttaggtttttacacatttgcctgatgccaaagggtgaggaggaattgaccaatatctgttaaagatcagggtctgggcatgtgtctattgtgcacatccaaagagaagaagagttcctatgaacacatttgtaacctggattctaaaccacgtagtctctatcaactcttcctc

SEQ ID NO: 1241676 - DNA, 4001 bp, Homo sapiens
accaggggagatgagactattggtaagtgattatggtcactaactatgagttagtgaagacatggttactgattcttggaggctgggctattgatctttggggataagaccattgatctatggagatgaagatagggagcctctggtcattgcaaaaggggcaccaatccctgggagttaggctattgatctaatggggtggggcatttttccatgaggatgggcttattggttaatgtgctgaaggctacagattttagaagaccaaattattgatctttggggatgaaaccatggttccataggaatgaggctactggtctgtggcaatgaggccactgatgcatagggatgggctattgacctgtgggtttcggatcattggcccacagaggtgtgtgactattgggcagtgaggatgggtattgattttaaggaactggactattgaatgttgggatggctttgatccacagaagttgagttattaatccacttggatggaactgtggatcaatggggctgagtctaatcggaagtttagtgcagtgagagcatctggtcagtggtgaaggtgaccagaatcagagatgagatttttgatctgtgggaagagttattggttgctgggattgggttgttgatctctagaggtgaagctaccgactcatggaaacggggatttcggtgagaggatctcaaagccctgaggatccatgagggtatgactgctaatctatgggctattcccctacagagcgttgggtcatttggtggcaggcatgggactgtgggttactgggtctgaggatattgtctttggagatagttagttgacttgtaggggaggggtcgctggtcagaaatggggtaatttgtttgtgaagttgaactattgatcagtgggaatggagctgttggtgtttaggaattaacatattgatcttcaggaatgaggtcactgagatggagcgaacagtccatgtgggctgttagtggggatgagactattctctttggagatgaggccattgattcacggatagggggccactaattagtgggaatgggactaatagtccatagaggtcgagtcattcccttgcgcggaagaggtagggaaggggtatttcttgatggagagtgaagttgagacatggatagaccattgaatagaagtccagagaagactgcagagtccagcgaatcgtcttcgacctcctgtaaacgcccgctgcttgggttagcttccctagcaccccctcctttctaccagccctgcccccacgacagccctcacctgtctgcggggtaacccaggaacaggtagccggaggcaaagcccaagatgaagaggatctgctccaggatcacctgccagcccaggtcacacaccagatcccactggggatgtgagaagggtgcagcgggcgtgaggccccgccctcgccgctctctgcccgcccccagacccgcggcccgcctggccgcctcacctggccgatggcgttggtggtgagcacaggaaggccattatagtcccaatccttgaggcaatggttgaagtccggcggggcgaagccgctgcacgaggggtcggtactggtggcgacacggctggcggcgctggctgctagggcagcgctggcgacgctgacgccgctggcattgggaggctgctcccagccagaggcattaggggggaaggccccgtagtggcaatgcagcgggggcgccagcgtgaagatggggtccgaggccatgcccagagccacgaagagcaccggcaggcagcagaggccgagctgcagctgctggccgccgcccagcgcccccacctgggcgagcagcgcctcaaagctgagggggcctgggggcacggccagcgacaggctgctgcccagtccgtcgccgcccgcgtctccctccccctcccgctcgcgctcccgctcaccctgcagctgctccgtgggcaccgcatctccgagggtcccgacctgctgttggggggcagggggtggcaggagaagggtgaagcggaggaaaccgcagagcaagggcagggggcaggtgggagggagggctaggaaggcagtcaggggcgagggatgcgcaggaggaaaatgccagacgctccgcgggggcgggggtgctgggagaggatggcgtcgccacctggggctcgggcacttactccgttggaggtgggggtgatctctacagtgttgtcgattttgccgccgcccccgccattgggctcgggggtcccggtggccacccggggagccagcttgccgaccgcaggggccctgccggcccgcgccgaaaggatgcgctgtcctctggctcagttgcgcgccggctgcccggacacagacagctcgaagagatcccgctctgcagctctgcagccgcgggcgcctccttggtctctgcgatctctgcgctgctttcccctccccttcctctagactctcctccccttcccacgtcagcagaaccttcggtccagactcttcgtcagagagaggaaggggggccagggcccaggggagggagggaaggggggctctgtcgtctctttcctgggtctgcgggccattgcggtaaaaaagaaaaaaagctgaaggatagtagctagtccaggcagatgccagagattcttcctctgcttccaatcatttgccatcattcattcattcattcattcacccattcactaatcagtaaaatttaagtgtccactacgttccaggacttgcactagactttaaggataacagggtggacaagttccactttggagacctttactccagggagacagacatgtaaactggctattacagtacaacttatgcatatggaagactgtcttggccctgtatcagccctagcttcagtcctctacaaggagaccactttcttgggtttcatcactcccatcctgtttgaatctccatttctcaacagcatttggcactgttgacccctcttcctctaaacactctcttcctttgctgctgagtctctcttgctccccttttctccattgcagaaatcgtcttccagctcatggcattggtgctgagcatgggcaggccattatcctcccggttcttgaggcaatgattgaagtccagcggggtgacgcaactgcaggaggggtctgtattggtagtgatgaggctgtggtgctggcttctagggccattcccgtctgtatcatttagacaccatggttcagtgtctggaatcctcacagacttagtcctaggccctcctctcatctcacactgtctccactttgggatcttacctatgcccacagcttcaatcaccacccatacaaacaatacaaacctgacgcccagactgacatctccagcttccacctctgttctgagctccagacctatgaagccacctcttatttgaccttcaccttggatgactcacagggacctcaaactcaatatgttcaagacgaaatttttgcttttcccccataacttggttggcttccactgcttttttctgcagcgaatggcaccctcaacatcgcattgtggccaaatgctcaggcaacagcctttagagctttctcttccttatccatgttgaattctttacaaaattctgcccattttacttcctatatattctcagacatcccacatctctccatctctaccattattagtcaagctacctgttgcaaagaccactttagctccctaattcctaactggtgttcagcgtccgctttgtttatacctccttatcacccatatgtcatttatagtcagatagaatgatcttttcaaaatacagatctgatcatgtatctttcctgctaaccagccttcagtggtgtctcctcactgtcaaagtgaatattaaaaatctagatacctcatacatggttctacatgcctggtcacatgctgtctgtagttccatctcacttctttccccaaactctctgcactccagccaca

SEQ ID NO: 1241677 - DNA, 4001 bp, Homo sapiens
ggctttgatccacagaagttgagttattaatccacttggatggaactgtggatcaatggggctgagtctaatcggaagtttagtgcagtgagagcatctggtcagtggtgaaggtgaccagaatcagagatgagatttttgatctgtgggaagagttattggttgctgggattgggttgttgatctctagaggtgaagctaccgactcatggaaacggggatttcggtgagaggatctcaaagccctgaggatccatgagggtatgactgctaatctatgggctattcccctacagagcgttgggtcatttggtggcaggcatgggactgtgggttactgggtctgaggatattgtctttggagatagttagttgacttgtaggggaggggtcgctggtcagaaatggggtaatttgtttgtgaagttgaactattgatcagtgggaatggagctgttggtgtttaggaattaacatattgatcttcaggaatgaggtcactgagatggagcgaacagtccatgtgggctgttagtggggatgagactattctctttggagatgaggccattgattcacggatagggggccactaattagtgggaatgggactaatagtccatagaggtcgagtcattcccttgcgcggaagaggtagggaaggggtatttcttgatggagagtgaagttgagacatggatagaccattgaatagaagtccagagaagactgcagagtccagcgaatcgtcttcgacctcctgtaaacgcccgctgcttgggttagcttccctagcaccccctcctttctaccagccctgcccccacgacagccctcacctgtctgcggggtaacccaggaacaggtagccggaggcaaagcccaagatgaagaggatctgctccaggatcacctgccagcccaggtcacacaccagatcccactggggatgtgagaagggtgcagcgggcgtgaggccccgccctcgccgctctctgcccgcccccagacccgcggcccgcctggccgcctcacctggccgatggcgttggtggtgagcacaggaaggccattatagtcccaatccttgaggcaatggttgaagtccggcggggcgaagccgctgcacgaggggtcggtactggtggcgacacggctggcggcgctggctgctagggcagcgctggcgacgctgacgccgctggcattgggaggctgctcccagccagaggcattaggggggaaggccccgtagtggcaatgcagcgggggcgccagcgtgaagatggggtccgaggccatgcccagagccacgaagagcaccggcaggcagcagaggccgagctgcagctgctggccgccgcccagcgcccccacctgggcgagcagcgcctcaaagctgagggggcctgggggcacggccagcgacaggctgctgcccagtccgtcgccgcccgcgtctccctccccctcccgctcgcgctcccgctcaccctgcagctgctccgtgggcaccgcatctccgagggtcccgacctgctgttggggggcagggggtggcaggagaagggtgaagcggaggaaaccgcagagcaagggcagggggcaggtgggagggagggctaggaaggcagtcaggggcgagggatgcgcaggaggaaaatgccagacgctccgcgggggcgggggtgctgggagaggatggcgtcgccacctggggctcgggcacttactccgttggaggtgggggtgatctctacagtgttgtcgattttgccgccgcccccgccattgggctcgggggtcccggtggccacccggggagccagcttgccgaccgcaggggccctgccggcccgcgccgaaaggatgcgctgtcctctggctcagttgcgcgccggctgcccggacacagacagctcgaagagatcccgctctgcagctctgcagccgcgggcgcctccttggtctctgcgatctctgcgctgctttcccctccccttcctctagactctcctccccttcccacgtcagcagaaccttcggtccagactcttcgtcagagagaggaaggggggccagggcccaggggagggagggaaggggggctctgtcgtctctttcctgggtctgcgggccattgcggtaaaaaagaaaaaaagctgaaggatagtagctagtccaggcagatgccagagattcttcctctgcttccaatcatttgccatcattcattcattcattcattcacccattcactaatcagtaaaatttaagtgtccactacgttccaggacttgcactagactttaaggataacagggtggacaagttccactttggagacctttactccagggagacagacatgtaaactggctattacagtacaacttatgcatatggaagactgtcttggccctgtatcagccctagcttcagtcctctacaaggagaccactttcttgggtttcatcactcccatcctgtttgaatctccatttctcaacagcatttggcactgttgacccctcttcctctaaacactctcttcctttgctgctgagtctctcttgctccccttttctccattgcagaaatcgtcttccagctcatggcattggtgctgagcatgggcaggccattatcctcccggttcttgaggcaatgattgaagtccagcggggtgacgcaactgcaggaggggtctgtattggtagtgatgaggctgtggtgctggcttctagggccattcccgtctgtatcatttagacaccatggttcagtgtctggaatcctcacagacttagtcctaggccctcctctcatctcacactgtctccactttgggatcttacctatgcccacagcttcaatcaccacccatacaaacaatacaaacctgacgcccagactgacatctccagcttccacctctgttctgagctccagacctatgaagccacctcttatttgaccttcaccttggatgactcacagggacctcaaactcaatatgttcaagacgaaatttttgcttttcccccataacttggttggcttccactgcttttttctgcagcgaatggcaccctcaacatcgcattgtggccaaatgctcaggcaacagcctttagagctttctcttccttatccatgttgaattctttacaaaattctgcccattttacttcctatatattctcagacatcccacatctctccatctctaccattattagtcaagctacctgttgcaaagaccactttagctccctaattcctaactggtgttcagcgtccgctttgtttatacctccttatcacccatatgtcatttatagtcagatagaatgatcttttcaaaatacagatctgatcatgtatctttcctgctaaccagccttcagtggtgtctcctcactgtcaaagtgaatattaaaaatctagatacctcatacatggttctacatgcctggtcacatgctgtctgtagttccatctcacttctttccccaaactctctgcactccagccacagaccttcttctagttttcccagcgccacgaggcctttgaacaagctggttcctgcacctaaaaagcttcttagtcacatttttctcatccttcagctctcagcctaaacatctttgctacacaggagtcttccctaacctctagaattgctactcaaagtgtggttcatggaccagcagcattcctgggagcttgttagaaatgcagaatccaagcctcacccagacccttgaatcataatctgtattttatccagatctccaggcataggtattatacattaaaggtagagacacacatctctaagagatttgttacctgataggtactttattctctaatcctaggtaagggctagaaagcagtgttctatcattgtcagccgggaaatctttcccccttctctccactgaaccacacttttaacttgtctctgttcagaaattttccacgtatgggaa

SEQ ID NO: 1241678 - DNA, 4001 bp, Homo sapiens
atgaccttacatttgtgtgtctatgtcagcaacagccctgtttgcctattcagagccatctttagggactgataggatgattggaagtataatatcacctgcttacatacaatggcctgtttcctggatctagttcactgtttccagtcccagatgggtcagcatgtgacctgaccttggccaagactgaggtggtctcagcacctcataggtgcaacaaacggtttagataggtgaccttttaagtgttcttccagtaaaggacactctcagagggcccctgccctggaggaacttcacgaatgaatagcaagtcagcaagcaggtgggcaaggctgatgcggtctggcccagtgctcctcacacttgaatgtgcacacagatcacctggggatcttgttagaattcagattctgactcagcaggtctggggtgggacctgggattctgcactaacaagctcccaggtggtgctgattctgctggtccaggggccatactgggcaagagagaatttgcggaggcccgcaaccaagcacacttaaactcctaaaggtaattcctgatccagcaaataaaaatgattctcactttaagaccttcagagtattcatttacctctcctgatgcgcactgcttcagctgggtaataatacctcttctataatgctgatgtctaagagcctctaggtatgttgttatttctggtgtgtaattgaggggggaaaaaaatccaaacactgacttgcccaattgcaaagcaccaggtactaagatattcaaaataatcttcctgggtctcactgcaaagagccactttttaaccctgcatcctcaaatcacaaagtttaggtttcgaaaggcagttattttgaaaactttaatcaagttccactggatttttacctatcagtgtacacctctctaaatggtctctggatgttgacggcctttctaactgctcaagaaggtactacccgctttaccttccatgtcttggtgtttaaatcaccagcatttcttttgtctttttacatttaaaaaaataatgaaattaaaaggttcacagcatccaactcaaaatgagacgattagggaagtgaatgtctcctgagttagggaagtgaatgcctcctgaaggttacacatggggtcacatccccctaaacacacttctttggttagttccttctctcttcccgctccacctgaaatttgcatagcctaagctactcccaaatccctcttcttggaggagggggcatgggtcgaggctccacacacccgccttctccctccgtgggagttaaggggagttgagagacgcgatgctgaaacatggcagctaccccccgcggcagactgccccaacgcctttagggtttgggaagaacaaacacctcagggcacccaggggacccctttgaaccagggcaggggcgagacgcagtggcggttcctgcggctctgcagaataggaaagcgggccactcagtttcgcccaccccagaccaagagaatcctgcctgcaccccgcagttgcgctgcccattccgggcgcactcccgggacggaagcggttcttgctttcgtcttagtaacacacacctgcagccgcgtcctgagcccccccaggggccgctcgtagctcaggggaaccggcgccacagcccagagcgtccatcagctcttctgggcgcgctctacctgcccggcggggaggggactggatgaacccttgggaccaacctgatgaggaaggaggggaaaacatctcgcagccgccccgagactccccagccaaagcccccaactccccaggaagaggggacccgtaccagcacccacccaagctgccgaagaggccggacgcacagcacaccagggccagcaccgcgcacacgaagccgacttgctgcggcagcatctctcgcctcctgcgaactttgagcggccggagggtcccgcggagcgccatcccggagcgcctgggtgccgtctctgggagaggatggggagcttcagcggccagagtgcaatcagtggccgagcggcgctggggctggagcaggcggtgcgcgactcagaggcgaggagctccgggccaaagcctcatggcccgagggcgaggtcggcgggggagccccttgggaaggtggggacgcgcgacgcggccggagctcagagtcccgcgcgccgcgtgcgcgctgcgcgcaccatggctccgtggcgaggaggcgacgccggcacggtggcgctggcggcccgggctcgcagggctggcgcagtcccggcgctagagccgctacctgcccgctccgcttcggccggctcgcccggccacagccctggcagcagcgccgtagggagcactcagtgcgcccccgcgccccgcgccgccgcgcccactcgcagcatcctcctcctccaagtttggcggcggccgccccggctgccagccggcgatgttcccctgcttcccgacgagccgagcccgggcggccgagtgcgcgccgcgggaaggctggctggacgcgcggtacctgagaccctcgcggcgagcaggctcgacgtcggccctcccaggggcgagctctccccgggaactttctctctggcttctcggctgcgggcgccagcgtctgagaggccgtggcgcctcccgcccgctgctctcgcctccctactcctcccctcctgcccgcctctcaccccccgcccttcccagcacgtgtactcgtcccgtagggcgcactcccccgtgcactcttctcttcagtagttggacctctactgaccaatataatccccttccttctccctttttctctcctttcttccatatggagctgcaacgagcccttcctttaccctctgaggctgctgcagagagaaacaggttatggcaccgctggggactcttagaaaaagggtttctgcagtgtagtcgctcctgtccgggctctccgacccccgagccgacccgaggccccgccacacaccccctccccaccccgccacccaccacggggggaagatgcaggagaaaattaattggtcgtgcagagctaacaaacaggcttgcaccaagccaacacgagcttggacccgctgggaccagctccttcagggctctcggggctgttggggatctgcgaggccgcgacaccgacctgcaaaaaagctggagacggggcagagaggggaaccagagagatctgcgggccccacaaccgacggttgagctttccatgttcctaagcctaccgcttcccagggcttgctggtttggttttgtatctctcctttctggtcggctctctggtgtaaaccgctttaaaaatggggcaggagggaaaatttcagaacagcagctgaggggtgatacaggtgcaggcaggtggaggggaccccagcccagggggtctgtgactacccctaggaccgacttccttcccggccaattcatcgccacctgttcagtgccgctaggggttaaaatccttcttggaacaggccaactctttaattaaataaatacatacccaccgtgtgcaggccctgtgccaaccggagaacaaaacaataacaaatgtatgagacccagtctctgctttcaaggaactctaaatcaaaagggagcaaggcccttagataaatgccccattaaggagggtcctgaaagtcactgttgtgcagaatgtgcgttgttccctcacagctcactacactaccgtgtggtcctcagcagcatgagaattgcctaagagcttatgcgacacacagactcttaagattccaccccagacctactgagtcagaatgtacatttttaacgagatcccttggaaatttgtgtgcaccttcacgtgtgagaagtgctcccttttcaagcccgctccaatgcctctagccagtcaccacccacacggttccctctggactgagtaagcaggggtcattttgcttgtgttagcctggaatagtgacacaggttagag

SEQ ID NO: 1241679 - DNA, 4001 bp, Homo sapiens
tacctctcctgatgcgcactgcttcagctgggtaataatacctcttctataatgctgatgtctaagagcctctaggtatgttgttatttctggtgtgtaattgaggggggaaaaaaatccaaacactgacttgcccaattgcaaagcaccaggtactaagatattcaaaataatcttcctgggtctcactgcaaagagccactttttaaccctgcatcctcaaatcacaaagtttaggtttcgaaaggcagttattttgaaaactttaatcaagttccactggatttttacctatcagtgtacacctctctaaatggtctctggatgttgacggcctttctaactgctcaagaaggtactacccgctttaccttccatgtcttggtgtttaaatcaccagcatttcttttgtctttttacatttaaaaaaataatgaaattaaaaggttcacagcatccaactcaaaatgagacgattagggaagtgaatgtctcctgagttagggaagtgaatgcctcctgaaggttacacatggggtcacatccccctaaacacacttctttggttagttccttctctcttcccgctccacctgaaatttgcatagcctaagctactcccaaatccctcttcttggaggagggggcatgggtcgaggctccacacacccgccttctccctccgtgggagttaaggggagttgagagacgcgatgctgaaacatggcagctaccccccgcggcagactgccccaacgcctttagggtttgggaagaacaaacacctcagggcacccaggggacccctttgaaccagggcaggggcgagacgcagtggcggttcctgcggctctgcagaataggaaagcgggccactcagtttcgcccaccccagaccaagagaatcctgcctgcaccccgcagttgcgctgcccattccgggcgcactcccgggacggaagcggttcttgctttcgtcttagtaacacacacctgcagccgcgtcctgagcccccccaggggccgctcgtagctcaggggaaccggcgccacagcccagagcgtccatcagctcttctgggcgcgctctacctgcccggcggggaggggactggatgaacccttgggaccaacctgatgaggaaggaggggaaaacatctcgcagccgccccgagactccccagccaaagcccccaactccccaggaagaggggacccgtaccagcacccacccaagctgccgaagaggccggacgcacagcacaccagggccagcaccgcgcacacgaagccgacttgctgcggcagcatctctcgcctcctgcgaactttgagcggccggagggtcccgcggagcgccatcccggagcgcctgggtgccgtctctgggagaggatggggagcttcagcggccagagtgcaatcagtggccgagcggcgctggggctggagcaggcggtgcgcgactcagaggcgaggagctccgggccaaagcctcatggcccgagggcgaggtcggcgggggagccccttgggaaggtggggacgcgcgacgcggccggagctcagagtcccgcgcgccgcgtgcgcgctgcgcgcaccatggctccgtggcgaggaggcgacgccggcacggtggcgctggcggcccgggctcgcagggctggcgcagtcccggcgctagagccgctacctgcccgctccgcttcggccggctcgcccggccacagccctggcagcagcgccgtagggagcactcagtgcgcccccgcgccccgcgccgccgcgcccactcgcagcatcctcctcctccaagtttggcggcggccgccccggctgccagccggcgatgttcccctgcttcccgacgagccgagcccgggcggccgagtgcgcgccgcgggaaggctggctggacgcgcggtacctgagaccctcgcggcgagcaggctcgacgtcggccctcccaggggcgagctctccccgggaactttctctctggcttctcggctgcgggcgccagcgtctgagaggccgtggcgcctcccgcccgctgctctcgcctccctactcctcccctcctgcccgcctctcaccccccgcccttcccagcacgtgtactcgtcccgtagggcgcactcccccgtgcactcttctcttcagtagttggacctctactgaccaatataatccccttccttctccctttttctctcctttcttccatatggagctgcaacgagcccttcctttaccctctgaggctgctgcagagagaaacaggttatggcaccgctggggactcttagaaaaagggtttctgcagtgtagtcgctcctgtccgggctctccgacccccgagccgacccgaggccccgccacacaccccctccccaccccgccacccaccacggggggaagatgcaggagaaaattaattggtcgtgcagagctaacaaacaggcttgcaccaagccaacacgagcttggacccgctgggaccagctccttcagggctctcggggctgttggggatctgcgaggccgcgacaccgacctgcaaaaaagctggagacggggcagagaggggaaccagagagatctgcgggccccacaaccgacggttgagctttccatgttcctaagcctaccgcttcccagggcttgctggtttggttttgtatctctcctttctggtcggctctctggtgtaaaccgctttaaaaatggggcaggagggaaaatttcagaacagcagctgaggggtgatacaggtgcaggcaggtggaggggaccccagcccagggggtctgtgactacccctaggaccgacttccttcccggccaattcatcgccacctgttcagtgccgctaggggttaaaatccttcttggaacaggccaactctttaattaaataaatacatacccaccgtgtgcaggccctgtgccaaccggagaacaaaacaataacaaatgtatgagacccagtctctgctttcaaggaactctaaatcaaaagggagcaaggcccttagataaatgccccattaaggagggtcctgaaagtcactgttgtgcagaatgtgcgttgttccctcacagctcactacactaccgtgtggtcctcagcagcatgagaattgcctaagagcttatgcgacacacagactcttaagattccaccccagacctactgagtcagaatgtacatttttaacgagatcccttggaaatttgtgtgcaccttcacgtgtgagaagtgctcccttttcaagcccgctccaatgcctctagccagtcaccacccacacggttccctctggactgagtaagcaggggtcattttgcttgtgttagcctggaatagtgacacaggttagaggtgccagagggccaggaagggagaaacctcactgattattttcagcagctctgtttcaataccaacaaagagagtgaaggcatgaacacaaaactaattgcagtggaaacccctagaggaaatgaaatggaaaaggccagggttctgtttttgtctgcagagatgccttaacactgaggctcactctccgtactggtgacctcaaccaagcatgcctgcctgtgacagaaaagacacttttcatacgtttgcagaattttcttctgcaaacattgactagactgtacaaggatgcattcaaatagaagactataaaacattgttaaatatgacacttagagagctagccaagggcccttggcatcaaatttaagccaaaggaaaaagttaaagtgataatatgctgttgtcctgtccctaaaacagtgtcagggtcacattggttaaggcgatgccgatggacaaaatggcatcttgctactagcatttaatattttcttaaaacttttgtccacggagctcacctggggctggtgaaaatacatgtttttgaatccaaaacaggtcaaaggagtcattaggtgtctgtctttagacatttagtcagctctttag

SEQ ID NO: 1241680 - DNA, 4001 bp, Homo sapiens
agctactcccaaatccctcttcttggaggagggggcatgggtcgaggctccacacacccgccttctccctccgtgggagttaaggggagttgagagacgcgatgctgaaacatggcagctaccccccgcggcagactgccccaacgcctttagggtttgggaagaacaaacacctcagggcacccaggggacccctttgaaccagggcaggggcgagacgcagtggcggttcctgcggctctgcagaataggaaagcgggccactcagtttcgcccaccccagaccaagagaatcctgcctgcaccccgcagttgcgctgcccattccgggcgcactcccgggacggaagcggttcttgctttcgtcttagtaacacacacctgcagccgcgtcctgagcccccccaggggccgctcgtagctcaggggaaccggcgccacagcccagagcgtccatcagctcttctgggcgcgctctacctgcccggcggggaggggactggatgaacccttgggaccaacctgatgaggaaggaggggaaaacatctcgcagccgccccgagactccccagccaaagcccccaactccccaggaagaggggacccgtaccagcacccacccaagctgccgaagaggccggacgcacagcacaccagggccagcaccgcgcacacgaagccgacttgctgcggcagcatctctcgcctcctgcgaactttgagcggccggagggtcccgcggagcgccatcccggagcgcctgggtgccgtctctgggagaggatggggagcttcagcggccagagtgcaatcagtggccgagcggcgctggggctggagcaggcggtgcgcgactcagaggcgaggagctccgggccaaagcctcatggcccgagggcgaggtcggcgggggagccccttgggaaggtggggacgcgcgacgcggccggagctcagagtcccgcgcgccgcgtgcgcgctgcgcgcaccatggctccgtggcgaggaggcgacgccggcacggtggcgctggcggcccgggctcgcagggctggcgcagtcccggcgctagagccgctacctgcccgctccgcttcggccggctcgcccggccacagccctggcagcagcgccgtagggagcactcagtgcgcccccgcgccccgcgccgccgcgcccactcgcagcatcctcctcctccaagtttggcggcggccgccccggctgccagccggcgatgttcccctgcttcccgacgagccgagcccgggcggccgagtgcgcgccgcgggaaggctggctggacgcgcggtacctgagaccctcgcggcgagcaggctcgacgtcggccctcccaggggcgagctctccccgggaactttctctctggcttctcggctgcgggcgccagcgtctgagaggccgtggcgcctcccgcccgctgctctcgcctccctactcctcccctcctgcccgcctctcaccccccgcccttcccagcacgtgtactcgtcccgtagggcgcactcccccgtgcactcttctcttcagtagttggacctctactgaccaatataatccccttccttctccctttttctctcctttcttccatatggagctgcaacgagcccttcctttaccctctgaggctgctgcagagagaaacaggttatggcaccgctggggactcttagaaaaagggtttctgcagtgtagtcgctcctgtccgggctctccgacccccgagccgacccgaggccccgccacacaccccctccccaccccgccacccaccacggggggaagatgcaggagaaaattaattggtcgtgcagagctaacaaacaggcttgcaccaagccaacacgagcttggacccgctgggaccagctccttcagggctctcggggctgttggggatctgcgaggccgcgacaccgacctgcaaaaaagctggagacggggcagagaggggaaccagagagatctgcgggccccacaaccgacggttgagctttccatgttcctaagcctaccgcttcccagggcttgctggtttggttttgtatctctcctttctggtcggctctctggtgtaaaccgctttaaaaatggggcaggagggaaaatttcagaacagcagctgaggggtgatacaggtgcaggcaggtggaggggaccccagcccagggggtctgtgactacccctaggaccgacttccttcccggccaattcatcgccacctgttcagtgccgctaggggttaaaatccttcttggaacaggccaactctttaattaaataaatacatacccaccgtgtgcaggccctgtgccaaccggagaacaaaacaataacaaatgtatgagacccagtctctgctttcaaggaactctaaatcaaaagggagcaaggcccttagataaatgccccattaaggagggtcctgaaagtcactgttgtgcagaatgtgcgttgttccctcacagctcactacactaccgtgtggtcctcagcagcatgagaattgcctaagagcttatgcgacacacagactcttaagattccaccccagacctactgagtcagaatgtacatttttaacgagatcccttggaaatttgtgtgcaccttcacgtgtgagaagtgctcccttttcaagcccgctccaatgcctctagccagtcaccacccacacggttccctctggactgagtaagcaggggtcattttgcttgtgttagcctggaatagtgacacaggttagaggtgccagagggccaggaagggagaaacctcactgattattttcagcagctctgtttcaataccaacaaagagagtgaaggcatgaacacaaaactaattgcagtggaaacccctagaggaaatgaaatggaaaaggccagggttctgtttttgtctgcagagatgccttaacactgaggctcactctccgtactggtgacctcaaccaagcatgcctgcctgtgacagaaaagacacttttcatacgtttgcagaattttcttctgcaaacattgactagactgtacaaggatgcattcaaatagaagactataaaacattgttaaatatgacacttagagagctagccaagggcccttggcatcaaatttaagccaaaggaaaaagttaaagtgataatatgctgttgtcctgtccctaaaacagtgtcagggtcacattggttaaggcgatgccgatggacaaaatggcatcttgctactagcatttaatattttcttaaaacttttgtccacggagctcacctggggctggtgaaaatacatgtttttgaatccaaaacaggtcaaaggagtcattaggtgtctgtctttagacatttagtcagctctttagtaggacgttttctttgacatttttcacctgctttcagttaatagttagaacccttggaataatttctcatgcacaaatggattccttttatttgacagtttaaaaagcaattcatttgaaattgtacttttcactttatttaaatagtgcccattaccaaatagcctcagctccagctctaatgactcattctgcagaagagagaattgggttttctgtacctttgggattcaaggcattcaggagcattttgtaaaccagcaaaggccgtgggacaaagcgaaaatgcgttgccgggtttatcctggtcctggcttcagtgcctttggattcggaatatctcctctgcaattgtgtcttctgatatgacactgcagggaactgtctacatggccagagtttaggccattttgttcagcagtctcagcccaggggaggtgggtaccatggtatttttccttaacaatcccttcctgtgacatgatgggcctcaccatttaatttgtatcttacttcattttaaaaagttttctttgctagaatgaccttctccatgacttgtaacttccactttgccttgaagatgactatccatcagccctggataggcag

SEQ ID NO: 1241681 - DNA, 4001 bp, Homo sapiens
tcacgcctgtagtcccaccactttgggaggtcaagggggtcagattgcttgaacccaggcgttggagaccagcctggacaacatggtgaaaccctgactctacaaaaaaaaaaatccccttcccccacctccccaaaaaactagccgggcatggtggtgggctcctgtagtcccagctactctggaagctgcagtgagaggatcacttgagcccgggaggttgagaccagcctgggcaacatggcgaaagcccgtctctacaaaaaaaattaaaaaaaaaaatagccggcatggtgatgcgcatcggtaattccagctactcaggaggctgagatgggaggattgcttgaacccgggagttggagcagcgagccgagatcgcgccatggcaatccagctccggtgccttccagtctgggcaacagagagagactccatcgaaaagaaaaaggggggaggggaggggaggggaggggaggggtggggaggggaggggaaagattttacaatttcctgtaagcaatgaatggctctaatgtgatattgatgaaataccatctttaagaaagtgtacagattgtaagtgacacgtggctgcttacgttactcctgagatgcaagtagatcatgacataatgataaccagtcataatttgcagtaatcccttacaaaaagtccaaatttgtttgaaaatacagaaacttttactagtcgaagttaaacattaaacattttctagtcattgccttaacaggatttattagagttactataatttattgaaagaatggctagatttataaaatgttttctggttatgagccaattatggcaattattttaattatatatttataataaaaatgcatgactgtaagataaaattttaaaccaaatcataatttatattttaaaatagctttaaaatacttgcacataacacatgtcgtggttagtaactttctccagctacatttaaaagtatttctaagattaattacaacatttttttctaaaggtttattttttccccacagcataactctataaattaacgtgagcccattatatcaaaggtgtttatgtgtgttacatatgcatttaattttaatatccttatttaaggcacgaatatccccaagcaagcacagtatgcaataagaagtcctgtggagtcctgtaagtactttgatgaggaatgcaggatttatgtaagacctgagcgagcttgaagaaagactctacaattgataaaactaagtcagaccgaactggatcattttcaagtaaaataggtagcaaggcaaaaagaccgcctcaaagtcgctgcccttggggctctgccacttgctttacaggctaggaacggacaatgccgggaacccgagagcggccggcgcggacgccgaggcaactttacttggggcacccactactcgcaatcaactcccggcctcctctgctctcgcgcctctaggggctcaagcactgctccgggagcgctgaattttgaggaagagggcagaacttcagtaaggagacctgtctgggcaacggtttcaggacacgcggtggggaaagcgactagcctccggcggggcagggcgggctgtccttacctgcagaaccaccggccacgatctgccgagaagcctcgcgcactaagctgacttcaggcttggcggacatcttcgccaggcgggaggacaagggagtgggctgagatgcgtcaacgagctcgcagcctgcacagcctactgatccagagagccccggctgggctggtcctcaagcgcgttggctccctgtggagcagcaatccggcgactgctggaaagcgagggttcgaggcgcagattcgtcgcgcgatctccggcgcgtcggaacctgttcgcagcgctctcgcagaggcgccctcggctccgaaaatgtctctggaaagaagacccgcggatgggtttgggttggctcaccgcagcggctcaggctttgtctcctagattggcgcccacgcccttctctatcaggagcctccggtagtttgtcaaactagacggttgcctctgataactcaagtgaagtgacccaggcctggagcgccaagtacaaagcggggacgacacttgcacctcctggcaagccagagcacagtgaggttcaaaagaagggacaagtgaataaattcctcagttagttgtcctataattgtggtctgtagcaactaagtcaaagcaaatctaatttacacttaccttacaatagagctaaggtagtactttaccaaaaatggttttgatttaaggtaaaatcatacctcatcaacttgagttttatttacctaaggaccaaaagaagaaaaagcctggttacaaatagtttcttctatacccaggtcagtggttcttaaaagtggttttagtacccacagcatcagcataatttgtgaatgtgttaggaagtcaaattcgtgggtcccaccccgacctaaacggaatcagaatctctggggatagggcccagaaacgagttctctgttgattgtcatgaactttaaaggttgtgaaccactgacttaaacaattgaggaacattaaggaacttaacagtatattctctcaataaaatgtttgattattcttactagccccttaggatagttaccaaaacaaaactactaatttatactcttttaaaactacaagttgcctgtgttatgtaggagagatataagattgtgaaattttccaaaaatacctgccacacccctaacagacaggagatgataagagtaaaagagagaattgggaggctttagaagccctattgtaatatttcttaaaacacattatttattgctaaatatatttagtgtgagccatgtaaaaattgccatttttggaggtcaaaaaccgttgaatatcagcaatttagtatggttcaatttatgtggtttctaatcaaatgtacaaagtacaataatttggtttcatacttgattttttatttcttaggctgagtcattaaaagttgatcagtgatatatggcaaaattatttaaagtgcttgaggaattggggagacttgctgcttatgtgatcagatatacaaaaataaagtttttcatttcattaaatatttgattaaaactgctaagtttgaaaatgtttaccaagaaatagttttcagaaattttgctaacttgataaaggcttttgagcaatatctttcagactttttactaattaaatagggaatcttgagtgcaatatagaatcacttattcaacaaatattgagaacctgttatatactaggtatagaaacagaatttcagagctcatagaaaatgttttcctcatttttcaaagcagaagctgagttttccaagatcacactaggcgtaatagtatagctgggattccatcacaggactccttcttttgatagcattggattgtagatttaaatattaaccacaggctaaaaaaactacattctgtgacacaaatacccccacaaattaattccatttttttttagtttttaaaaatttggtcacaactattaaaccctagtgcacacactgaaacagattctacactgagagctcactaagtgttagcacttgcctaggtactgacaatatcactacaaatcccttccctgtggcacttacaatctaatggaggagatcctaccaccttgtaagtaaatttttgccttccctacgttatccaggaaatgcaataatacttttaggtcaagatttaaagacaatcttttgacataattatttccatgagtgtcttcccctctgaagatcttatccatggtaggtgggagcaagtttgtgtctaagacccagcctctaaaaagctctgtggattcagttggaaaactcccagttatccttgttaaaaagttacttcctctttttaacctctccagactagaagagatatctttgagtgaaaaaagcaagacttgatatcacatataat

SEQ ID NO: 1241682 - DNA, 4001 bp, Homo sapiens
tgcacgaaaagcagggcctgggggcaggggggtggcctgtgccccagtgctacagcaccagacagtgccagtccttgacccacaaacctggggcagggggcatggatatgatctctcccaggtgggcctatgaggatgggcagcgaaggacattccaggcaaggaggctgcgcgagcgacgtgcagaggagaccacagatgtgccgggaggcgccaagcaggcctgctttcaggtgaagtgttcctgccccaaaccccggtgtttccaggagggcagcacggacggtagcgccactgcagaaggaactctgcccatccggggaaagaatccccactccccaaagcctggaaggaggtgttggcctggggacagcccttcacccccacccgctggagctgatagtgggtggggagcaagggtggagcaaacagcgagatcagaagcgggaggggaaggtgagaatggaatccgcagaggacacgccccctctgtctccagggcacccagcgattagcagcaaattctgggctttgtgccccgcagcttcccactgggtaaccgaccgggaagttctaactcccctcagcgcacaacacctccccaacacactcccttttcaacgagtctctcccccaagaagcaggctccgacgccacagatttaatacttaaggccaccgctacccactcttccgccagggctctcagcgctggccgggagctgagggtttattcgagccaaatccaagtagatgaagaggcggtgaacaagggcaggtgctgggagaaaagtgggaccaaacagggataagcggccggccctctcagcaactcccgccgccaaccaccctcccccgcccccgacatctaaatcctggtgaataaattaaccctcaaggtaaaagcagagaagccagaggcccaacagggaagtgccgtgcccgacgcccacggtcggggcatgggagagcctggactgcacgcccgcccgggccctcccggggacaactgcatgggaggaaccccagagccgcgaccgcgcctcggagaaggtgccccacaccggctcgcccgacccacccaccaccccccttccgcccccaacagctcacaaaaccgcgtaggaaggggcggcgttccaaggcgtgactcggcgccagagtggttcagtgccctccaaggccagccgagtagggggtcggctccgtagccccaaccccgctggatggctgcgcgggacggggtggagtcagtcccgaaatatacggccgggggaggggaccctgctcccagtgcgcaacggatggggatgggggaggggaaggagatgagcccgggacctcggcgcggggggcagtggggcatcctcccggcagtcctggcctccgctcagccacggtgctgccccggcgccccagacctcccgtccgagcgtgcccagagagaataaagacacctgccctcgcggacagcccgggcctgaagtcaatttacgcccacgagacccgcccgaggcaagagaactgtggtccccattcacagacgcggcgacccccgccagcgggaagccgcgaggccagggcgtgctggtgggccgacctccctccccggacgcctcgccccggcccggcccggcccgccgcctccttaccccccgcgcatccagccaagaagtccagcgccatggccgggtccccggcgaggccgcctttcctcctcgtcctccccctgaggcccctcgccgggctgggcgccgtcggggtccccgagcgcgcggtgccggggctgggcctggccgctcctcctggcgcggagcccgggcaggcgcggtcagggatggtggggatggcggcagcagctagacccgcgctggtccctcggcggcagctgactcgctggatcccctccggcccgcggtccctcacctcgggccgcgcgccccgcccctcgtgcctgccggcagggcccgggtgggggcgccgagtgaggccaatgggcgggcacggcgcggacaacaccccgggcactgcgcttcgccgccgcgcctcattggccgggcgtgcgcgggaggcggggcgcgggggacgtggtgggcgcgcgggcggggcgcggggacgcctcagacaaagagcgcgctgggtgcgcaggtccggcgggaggggacgcgcggggtggcggggttgagccgaggactcccccacccggagtacgcggggtggctctggtctggaccgggtcgggaaccggaccctgggttcggagtccggcgccgccgcagaacctcagcgccctagtctgtgccgtgcggaccctgccgcgaaaacggccgtggagcgccgggacgttccgaggcccgcagactgggacgccgctagttgcgaaactccgcgagcgggaatcgcccgtggggagcctctgcccgtcccgcctgcgcgcccgcggcggcggtggcctccggggcttccggactcctggccgaacccgccgggttctgggggtcggacgcgcacgggcgcttcctgcggagcctgaggctgggatttgggcggagagcagggaaccttaaaagggaaaggggccatgggcaaagggcgcagcaggccttcgggccacagctccttcccgaggactgcgggtcgcgggagccgcggaaggttgtggagagagggaggttcctggactgggctgcagagtggagtcgggccagatcgcagcgcctccgtcagcggcggccggacggggcgagaccggaggggctcggtaggggccgcgctcaggcgctgaagtcggagggtgcttggctctgggtcaccagggtatccatgggctgcggggatgaatgagagccgagtctgactcggccccccaggagtccctgacattcgcagtggcaagggactgccctggtccctgtggagcgtcccattcggtgacttcccaccagcccttccccagcgcctctggaggtccagactgtcaggttggagcctgggagcagggacgggccaggcgctttctcttcgctgtaggagtcagatcagccttaggccgggcccagcttccttctttagggcctgcaggcaggcaaggccacaccgtgtgccacgtttccaggtttagggtcacatggttcttttatccaaattccagtgggtacctacctcctggaggtgcaggtcgaaaggttctgtgtatttggtactaggacacacaggtaggtgttgtcagtagtgcagcctggtgctaggggcaggggtccccagtgctcatgttagtttccttttagagtctaagtagaatgttaagcagagacccaaaccctaggtctgctgactcctagtccagggctcgtgatggctggtgggccctgaacgaggggtctggaggcctgggtttgaatatcgacagcctctctgacccacttggttgcctcagggaggcaggtgtgcggatgggggagagtggcccatgggccagaaaagcagtggtatgggggccccaagagaagcccagacccaaaagggcaggagctggctgtggggctactcaggtggctggaggcctcctgcagacacagtgattacactggactacctacatgtagtcacttaccttaggaacaggatgtccttgggatgctggagggctcatgaggtaaagcacaaatccctgcacatccattcctggttgaggaggtttgggagggaaatccagtaccttgacagcatgtggcagtagtgagaaaatgatggaaacggataaggagacaagcatgacctgttttgctttgttattgagagaatgcacatgccttgaaaattatgcttggggcaggttgcactgagctgtcagtccctggggtccttgggaaggggcctagtagcctggtaaacagtaggtattccatagttgagcttcagaaacctccttgaggctgggttcagtggctcatgcctgtaatccaggcactttgggaggctgaggcaggaggatcgcttgaa

SEQ ID NO: 1241683 - DNA, 4001 bp, Homo sapiens
gtgggtggaaggagggggaggcacagcctgggcaaaggccaggaggagggaagccgaagcccacaccggggttcgtgaagagccaggactgcctggaaccacaagcgtgtgtggaagagagagggccgggagtccacaccttgcagagaggcctcgggtgccaggcctcaacatccaagccccagcactgccacagggaagtcagaggggaaacagggtggtccctgggaggaccattctctcccctgaggggaggtggtaaaggccaatggaagaaaataggcacatggggactgtaccctattcactgtagcccaggactcagtaaatatgtgggatgaaagaatgaagtgaataaatgtaaggcaaaagaccaagtggcttggagagaacgacccttcttaaccctcccatacacctcacacacctcaccaggctcctactcatccatcaaagccctgccacgacactacctcctctctggagccctctctggcctctgtactctgggctgcctctgtgcctggaacatgttgagcagagcccttgtcatatggccttgctgttgtatgccaccgccacctccagaactggagttctccaaggacacggccgagggctgacaccccatgacccagggccaggcacagagtgagagccctttacctaggcctcctcatggctccggaggaaagatgccagactcaggagccctttccagctgtgtgatgtcaggcaagtccagtagcttccctgaggaagggagcggctggccccaggctggcacctagctggggctgagaaaggctgctaatggaggccgggcgcagtggctcacgcctgtaatcccagcactttgggaggctgaggcgtgcggatcgcttgaggtcaggagtttgagaccagcctgaccaacatggtaaaaccctgcctctactaaaaacccaaaaattagccagacattgtggtgcatgtctgtaatcccagctacttgggcggctgaggcaggagaatcacttgaacccaggaggcagaggttgcagtgagccaagatcacgccagtgcatttcagcctaggcgacagaacaagactccatctcaagggaaaaaaaaaagaaaaagcctgttaatggggcaggtactctgccttctcccagggccagagctgggccgctctcccaacccccatgctgtttccagaagtactgacgccacccaccgatgtttcacaagaccagcaagggcaggagtgcccactcagaacagcccccacagcccacgggatggagctgagcccgtgtcccagggcctggttatctccctgaatcagtctttcaccaggagcccttccccaggagggagaacggtttctccagcagagtctggcctgagaagcaggctctggaggcctagccaggtgcacacacccagcagggcaggtggagccacctcgccaggccccttaccgtcctctgcccgccccttccagtccctgctgcaggaccaggcccatcttccctacccatctccccaccctctcgatcctctcctggggtcttctttcccttccagtgactcaatcacccctccccacaccaaggactcccagcctccctgactctgcctcccgagcggcccccatgcctagaccacagccccatccccagcctgccctcagcctcctgtctgagcctcccaggccagtgcagccccccaggccctgcagcacccctcacccagccttagcctcccaggaacctgctctctgctcctggcagatcctggggggtgaggggctcctcaaagcccaccctgctgcccagcaccttcctggacctcagttcctcctgctacccccaggagcagcagtgtctgcacagcccaccatcctgtctgttacctccgatggctccagcgacaaaatccatgaacaaggtgtggcggggaggccctgggtctgcctgcctgagagggctttggtgccaccagggtggcctcaacagctcccagctggcccctctcagaccttaaatacctgcggcaggggaggggaccggaagcagagcctgctgaggccacgcggcacacagctggactccctccctgcccccgggacccttgtcccagtgccctcgggacccaggtgtcaggaaaacacaggagagagcacgggaggtgacaggcaccagagagcaggggcactgccccatcacatccaaacacctcctgggaaggtccagagatggggctgtgacagctctcgccctccaggtccaagcccaggccttcactgtgtcccctgggctttcccgactcccctggatttgctcaggacccctgcctgggaaacctgcaaagctccctctcttactcactcaaaaaacacttactttgctgatgctacacccaggcaaatgagagccagtccctgtcctcaaggagctccagttggcagggagggagggggtggcaaggacaggcctgaacccaggaacagcacccaccatctgctctcacccttcccgctgccccggttccctgctctctgctccatgggaatgtgtctccctggacccagaggcgaaggccaaggctgcctccaccaagtccccctgcccacatgaaccagggacagaggctgccgattcagcctctgaaccagcggctggggccctcctgaaggggaaacctctccactaagacgctacttctgtctgctgggcactgtaaaaacagggacctccttgcccgtgcaccccaccttacagttcaccaagctcccctcactctcaggctctaggatcctcctcaccgccccaggagggagacagcgcagcgttagtgctccccatttcacagatggggccattgaggcccagaaagggggcttgtccaaggccacgagggcggcagggctggatgtgatccccagatgctctcatacaacccaccctctgggatatccaggcccgcctggggaggccccagagggctctcaaggggactcagtgcatgccccatgtgacctgcactgcatccttgtgagatctccacgtgagacaccaaggctcagggaggctgtgcaggtacctcggccacacagctgctgagcaacagaatctaagtgagtgccccacagactggaatgccagcaggataggggaggggcaggtgttgatgcatgaggcccaggcagcccatctgggcagccctcgggacaggtggcaaggccaggaggctctttgtctacctgttttcctgtcctctaatggctggacctgcaggctggccttgagcaggctgagagctgatggagggacagcccccctgccagcccggctatttataggcaagtgggagacacaggatgagcagtgccagctgccacggcagagggcaaagggcgggaagtggcccatccaaggccagtcccaatgctagtcctggccctcaaggggatgaagcttagcatctggttagaagctggctgcctgcctttaaagcccagctctgccactcacagctgagaccgtgggccagccccttgaccactctgtgcctcagcttctgcatccatgaaatgaagagagtacctgcctcatatctgcgaccacgcagggcaaagtccgggcgtgtccctgtgagagtggccagctaaatgctaatgctgcattaacagaagcatagagtctggaaggaaggaggtggctggcctgttctgggcagggcaaatacagctgagacttgggtttgattgctgatgctgcactcaagaagccagtaccttgggtgctgagggagtttgaagcactgtgtctaactgaaagaacagggaccattcagatccatgtttcctgtagagcatccaatgcagcaagtgccacccacccatagcacctgagccagaagcccaggaattgccctggacacctctctctctccaccccacatccagagtccccagtcctgtgtgtcaacctcttaaattcacgttcagctcc

SEQ ID NO: 1241684 - DNA, 4001 bp, Homo sapiens
aataaccatgccaagttaatctttatcccttttggctaccagttatagccttggccagtgctcttccctttttttgtcctgttattgtgttgcaaatgaagcatgtgcagctatttgagcaagtacaaaaatataatatgaacatgttcttatctaaaatgtcactttttcagtattctttttgggttgttcattgttagccaaagttccattgtcataaaaattacaataataaaccaccctgagtcttgtaatttcacacacagcttctacattctctaagccactaaaatcccatggttcctaattaaaatattcaaaggtgaaagtcaagtaatttccacaagatatattagttcctttacttatgtttccagggttaaaaaagaaatcctttgccaataaaaaaggagaagtttttgagtgtatagtacttcaaagggcattccacagtgtgttattttctttccagaaaattctaacactatataattacttttgtatggaaaatgaataatttaagcccctaatgctaaaaacagctagacagaaaccatccaaatcagataggcctttcctgaaaccagatgaaatatcgaactagaaaatatctgtgtgagaacagcccatggaacaaagctcttgaattattattcaatagagaggaagcatggtaggggagaaagttacatgaaaaaatagtgttttcttgtctttgtgccggaatttttgtgggtcccacgcatcacagaaactgtaatgttgattgcaccccaaatgtcatagaaaaatacgtatcagaaatgcatctaggagcttccaagcttctgacaacaataacggcaaaaacatcaattaagcttcatctgttgcaacagaaatgcattgataaagaaaaaagcgaaagcccacctgcatagaaactaaaccgcagctactcctccaattcgaagaaaaatgagctgcacttcagtcgccagtagaactaatcccagcaaatatagctagtgggtttgtgtactgggggagggggactgcgagcagagcacacctcatcgccctcccaccaaaactggtccaaaaacgtgaaagcatccacgccgcatgacctcgcttagctggaagaaagcggtgaccgcgacgtgcggcgggggcgggtggccctgtcgcctccccttctcagaccccccccccccacgcccccagtcttttgcacgggtctctggctccaagctctggggctcggagacctgagcaggttcttttctcttcccagggtgaagaacctcctaaagatactgtaaccggagtaactcccgcgctggcagcgtctcaacagcccggagtgaacgagctgaccccaccagcgccgggacccacgtctgggtcggccgcccccgccagccccacccccgagcctccccagcctgcgtccccagcgccccgcacgcagtaggggctttcggggcatgtatcccctagggctgactttccgctaagtgaacagccatgttagcctcctccgggcgtaaatccaccagggtgagccggccaacggcggtcaggagcgctcaccaggtcccctccgcacctccccccaaggctacgactgtttccaaactcctgggcgcacccagccgggccccttgccctctcacggttcagcaccgaggacagcggacatacttttctccccggggggtccccgccgccaggaaggcggtgttgacagcgtccgcagggctgcaggtgtccgtaccgcgcgcccgcccgtccgcatccccgcggcacccctgcgcgcccacctcccttccccgcctcgcgcagggcagccgcgcggcgtcttacttttctggctggagtaacctggataatagccatagtagccggtgatccgcaggatccggtcctcgatagtggccaccccgttgggggccgccttgacatccatagagagcgcggggcgacggccccgagtgcggcggggcggagagcgcagcgcggggcccgggagctggtgcaggtgccggagccgctggtgctgatcttgcagctcctgctcccgcgcccgggctctgactccaccgcccggcgcagcaccggctccgcatcacagcggcggcggcggcggcggcggcggagcggcccccactcgggccggcctctccgtcagcctggcagctctcccgcgcgccacccggagcactgctgcccgaatagcgccccctcacctccgacgcccaccgtggccgggggcgggtgtgggcgccccacctggtcgccagctttcatcattaacccttgcgcgatccttcccgaaaactagacaccccaaccccacctgatgaaagggatgtttggtcagtggggcgcgagaggagaaggcgacggtggccaggggctcagagaagggtgttgggagtgggagaaacccaagagggactcatagctgttaatgcgaggcattaactctgtcgctcggggagaagacacttctggggcgccccgggactcggtccacgcttggcgtctacaccacctctggtctgctgatatgcaagcattcccccgcgttagtcagtccttgcaacttgtctagaagactgggaatctttttttatgaaatgacaagaaaattagttcccggcaggtggtatatggagtgattatccaggttttgcagacgcaaagactgtaagtgttcaagcgctcaagtctgactgtccatacggaccctccatcctgccactgaaaaatgtcaaaggcttagaagattcagctgcacacagcacgtttatttttccaatttcaaatgctctgaggagaaatgattttctcctttattgccaaaaatatcaggagggaagtccttcaaactgtaaatatctggacgagtgaaagtcttagctacagtctagagcctttccattagagcagaacatccttgaagctgtgtgttcagagcgaacaccctcccctcaggtgtgggactcttctgctttagccagagacccaatgggttagggtcagtgagcagtggagacgattcctctgttcatagtctgcagacacagcttcctgcaaataataataataataataataataataataataataataataattttcaaagtttcatctcagaaatgaaaaggtggaggtggagggttagtggaggggagggtcagctcatcagcttagaggcaatttaggtccaccttccgtgcagagctggcttaagacatccctgccaggtttcatattactaaagcttagggagaagaaaaaaagagaaacaaaagtcgacttcaatgcccctctcagaaacctccagagaacctatcacaccatcctgcctccaagcattttccacattgtgtgtgggcccttaagaaggaagaaatatgcaaattttttttctaaaaggtaaattaggtttaagcatatgaaaacgcaatattaaattttacaatatgttttgggttttcatccaaacacaaagcttagcacgggatcttgagagtggagtcaatctgagattattgtggctggaaggagagttcataaagaaaccaatttcctcctacacctgttttctgggctaggaaagatggaagggtggaaagagctaaaaggtcaaaaggaactaaaaggaaaaaccaacactagtgcagtgatggggagctagccatataaagcaaaaatgaaagcgttatgcctttacacccccccccacgtgaaataatattcagcacacttttgttagttttattatttctgtggcaaaattatatcaaatgcatgtattgcacatggtaaaatgtgttcatcacatataattttaaatgtcacttttgtttgaagtttctatgaaagataaattttccaatattacatatattatatattttgataatagccatcataatccatagcacattaatatatatatcagtaagagagaaattaggaaacaattcaagcaaaaaccttctgat

SEQ ID NO: 1241685 - DNA, 4001 bp, Homo sapiens
tggcctacaagctaagtcctgaaacataaaaaagaacaggcacaaaacacatgtctggcctctgaaagtgaaataagactacttaacaatacaaagagacagcgaggaatgaaaagattatgtgttgtatttgcactcacaaaattgctatttggaagttaatctgcatggctttgattcactttggccaaggagatacaatgaatatgccactcttaagtgtcatatttcattataaatgaaatgtggatcaagttcccatttttaaaaactagtcacacttctgtgtatttaagaagctatgtagtagccctccaaggtacacactagcaacaagaataacaagaaaaatgctaaaaccccagaaataactaactagaaattgtataatagcagcttctggaatctatctctctacttctccgtatattatcaaaatggaaaaaaaaatttgatgctaaaatatgaagactcacctaaatccaaagacaccggtattagccaaaacataagctaagccaaggatgccacttcccatgatggcattcatcaaattaaacactgataaaccaaatgaaacacctggggatcgctgtctgtgaagttcctgtaagcacacaaatttagtagtgttaaatgtttggacggtgaagttaaaatttcgtaaagaaattccataaatgaaagattatggaaaaaagctgcaaaccaccagggtttgtatgacacactcgttgcttaaccaacactaatttcctttcctttccttcccacctcccactactgcagctccaggaatctagggtttcttaggaaaatgatttccaccagtacacaagacaggcagagttcaggaagggccatgactaaccttgtgactgcaagagatgaagataggatgggaatggagtggggagagagaggagggataaggcctcagctcatgtgattactaaagaattgctgagtcaacctgggactgctgtgggcagttgtttctcctcaattactaggactgcacaactaatctctacttatatatctaatgaattagttctaccaaactggaaggatggtcaggaatatcttgcaatgacaatattataaacagaagcaattcacgttgttctggcagtatccctgaaaacatccccctccccacaaacagcaccgggaacaaagtcctgggaacagtgtctaggactcgagttaaaaagcggagtgcccactgcacaggctttagggtcaggaacgtgctatgcacttactaccaagccacttccattctaccgctaagaatttctgtattaaaatgtttattattttccctccccccatgactaagtcggaagaggaaaatcctgtgactcttgcaaagacctcacgagactggtggagaaaataaggtgacaaaaatactaactaacagcagtgagtacataatcctagggccgctcatcccatcatgttcgcagcttccactcaacgctgcatctcttccacccgacgcttttcatcttttctttctagagtatgctaggctgctatcacgttcataactgcgccaatctcatctgaatctcggcggctgccttcagaccccatcccccagggttcaggctccagcatctcccctgtcccggtgcggtcctccttttctgggtcttatttggcaggcacttgagggaagccggagggcgtcagcgcggggaagcgaacacagcccacttacgttgcttagcaacggactcaactcttcggcctccgcttcttcaggctgctggacagagacataccagccccgctcagcgttgaagctcccccaggacgcctccatgctgctctccagctgactaccagttccatctacgagcctctacccctgccctgcgctccagtcgtcggtcgcgccagaggcggagctttgagcccggcccttccggcattccgtacttcaccagggcctggaaggagaggagcgagtcgacttgatctgatgacgcgcgccctcttcgcggcgaacagtgatgatgtcatagaagacccgcccatccacccgcgacccacatccgatcggtaccggagcgggaggtgaggggtcggctcgcggatccagctgcagagcgacgtggggaattggaatggtgctttggtgaggtggcggccgcgttaggggctaatggtccaggggaggtaccagcccgcccagggctgctctctgccatgtgctgcctgggcacagaaacatcgcgaggtcacccacccgcctaggtgctgagcttagtttcgaggttctggatagtaaggaatgtttcaaaagcctttcgccacattttactggtgggaaaaccgagacttatagtaatttatccagggtcacccagctggtcagctgctagaaccaatttgatctctgacggtgaagttagacttcgttgctttacaggattctgggacagggccctttccccttacaagtaaattctttggtattttagaagacagtgaataactgatactatgcatataacaatcagcaaagctctcgtcctcaaaatacagaagcctctagttaaaggcaggacatgtggcagtaaagcatcgaaaacaaacaacagagcaatatattaagaacacaagcaccgaagtcagtcaaaactaggttttaatccatgtttagccacttatcagctgggagactttgggtgggttaccttacgtctgagctttagtttacttatttacaaaatgagggtgcaatactgcacacctcccaagattcataatgtacataaagcatttagcgcagtatctgacacaataagcacccatgagactatcctaataaatatcaccactagtaatggtcatgtataatgactatttcatttacagatgaccatttaactcatacttcagtcttccaatcccaaatgtattatctagaaaattgtgggtgaagaggatcattgagtatggctaatggatcactaagccctctgaactgggagcagatgggttgaaggtgtaaatttaatatataccactattatctaccactaatacgacttcctgaagaagtcatcctagtctggaaaagatagtatacttcccacacatcactaaacgttttatttgtcagcatttagcccgttatttgagatagtagaatttagatttttattctcaaaagctgtcgtgtgtgaattttttttttttttttttaaggatcttatggaggccatttggattctcaggaagatttctgaaactggaaagccatagcataactgaatcaaaatcgttgattccagtagcttggacatccctgacacagatgcttttggaagcacctggtattttcttattgggtcaaagaaaaagattctcaaccatgccagaaacagaaacacatgagagagagactgaattgttttcaccaccttctgatgtccgaggcatgacaaaacttgatagaacagcttttaaaaagacagtcaacattccagtgcttaaagtgaggaaagaaatagtcagtaaattgatgcgatccctaaaaagggcagcattgcagcgcccaggcataagacgtgtgattgaagatccggaagataaagaaagtagactaatcatgttggatccctataaaatatttactcatgattcctttgagaaagcagaactcagtgttttagagcagcttaatgtcagtccacagatctctaaatacaatttggaactaacatatgaacactttaagtcagaagaaatcttgagagctgtgcttcctgaaggtcaagatgtaacttcagggtttagcaggattggacatattgcacacctaaaccttcgagatcatcagctgcctttcaaacatttaattggtacgtgtgtcatagtaatattcatgtatttgaagggaatttgcaaattgttaattttagctttaaaaattattttttttaatgccaagttacagaggcagaacattttatcatgtt

SEQ ID NO: 1241686 - DNA, 4001 bp, Homo sapiens
atgagccaggacagcaaggcagagctgcacggtagctgctactgtcggctgcagccccacagctagcccttcaaacactgagtgaaaggagagtgacagcaagaggacaagggctcggaggggaccctttgagggtgagggtaaatgtccatggctgtggagttcgaagatatgagccccaccccattcttcgtcctgcactgtcgatcctccagcagccccaggacagcactgcaatgccagcgactccaaaaagaagacaaaaaagaagcccagggagatgatgagctctccatagggatactccatctagaaacaaaaagaagggctgtgagatggaaaggaagggtaggcaatacattggatggacatggaattgggagattgaagagaatgagaaaatgtggtaacagaacacaaaaaagggtaggggaaatgaagccaagagtagacatggccatgcaacaacaagaatgccagagtgggccggacacagtggctcatgcctgtaatcctagcactttgggagactgaagtgggcagatcacttgaggtcaggagattgagaccagcctggccaacatgatgaaaccccgtctctactaaaaatacaaaaactagccaggtgtggtggcacgtgcctgtaatcccagctactcaggaggctgaggcaggaaaatcactagaactcggaaggcagaggttgcagtgagccgagattgtgccactgtactccagtctgggcgacagagagatttcatctcaacaaacaaacgaaaaacaacaacaacaaaagactgccagaggggctaagggacagaatctcaatagagttaaaaacatgggcaaatgatgtgaggtatatcagaggatccagggaaagaatgaaagagtaaaacaagggctttccctggcattctataaactcaaaaggattggatttgctcctcttttcctctacgatgtctgagctagggagcagaagggattcttggtactcctcatgtattcctctcaaaagggtctggatatgaaaggcctctctggttctcctcactctccagataggggatggtgggaggtacttacatgagctgaatcagcatcaccagaagaatttctctcacttgctgatctgttctaagaagaaagcagcagaaattagatgtgggatggagcagcacagcttcctgtgctgtcccttcagcaattctgttttccttaaagcctaatctgacttgctttcaccatcccacacaagagctgtcattttccttgtcgttccacccatgtccttggctccatcactttcccgctctcttccctttgtcctgtttatcattttggcctcatagacctgcggcttgaaatctctgctctcacctgcaccatgaacttctgaatctgtgattcaatttcctccagggcttcagcagtcatatgcatgaaccctgctcccaggaaaacaccagcagaaatacagcccaggagtctgaggactagccggtgatgacctaataaaaagcagaagttacaacccacttgacactgaggagacagacaaaggtgagtaaagagcagcaggcagcactcaatatcccaaggttggggatggtgagagaatcagagcaaggtatcaggacagggttgaggtgagactcaggctatggaacaaagatggggtagggctatacctctggctgcatcaatctggaaccatttgaagcagatgggagtaaggccacagcccagagtgagagccaacagggcaaacaggcagccaagttttattcctagtagttgctccatctctggggtgtagggtaagcccaggagtcagaatgacaagggagctgtaatctttggagcaggagtggtatcttaggtggtcaacactggagtgtccactctcgtgagtttcaggaggctgttggtatcttctttctgtgttgcttctgcttctgcagcattgcagagctgacagatcctgccccagcttctagccctccccctgcatggaggcccctcccctggttcacgccttcctgagcttggaaaccagaaactccagactccctgccaggcacagcccagtggcgtcttctcctcctcttcaatggcatgactaatccaagagctacggatagtcttagttcatgtgcttggggttggtctaatccaaaataggaaagtctatggtagctgcttcccagctattttgtactggggacaatctggtcctgtctcactcaggacgtttgatctaagccttccataccctctccacctcatcccaagtcttataggttgcaatgctgatacttgaaccacccgctttcagagatttggggccacctggaggtaaagaggtggggctgagaggtggtgctggtgctactctgtgggaactagtacccacatgagggaactaccctttcctgtaaccccagaaaaatagctccaggcatggaaatgtctagtggtaagttgatttgttttttttctttctcttttgattgggatcagttttgagaggaatgagttgagatgtctggtattacaacatttatactgttacaacttctaactgtgcctgtttcctggtaagaactgtggaaaaaaagacatttaaggtttaagacaaaggaagctgctctagccctgaaacagcaaggcttaggggaaaacagaaatgaactgagtgaatgggaggattctacctggatatagagaggtgggggtagaagattcagttctgatgggaatcactcttgatggaaatgtctggggcatttcccatacatactctagggtagctgagggaccctgggaaagacagaagggaaggcgttagtacaagaggccaggcagctgctgattcccctattcaggtggcccacataacaaccctgagacctgttgagccagttctcagagctctggaggcagctttccttgctactccagattattttcctagggaagtcctggcctctggtagaagcagtattcttacagtgttactggatgattcttacagtgttactggtcctgctgcttgttcttgtggtccggtaatgagatgcagacagacagactgggaaagacgggagtttatttctgcaactgattacagggaggtcggagtagcacaccagaccaactcaaagttacaagcttttctttagcttttatatacaattcaagctctatgactacctgcgggaatgtttcctaattaatctaaactaggggtctgcaggtagaagttttttttttgttttttagaaacaaagcaataaacgatttgatttagaaataaaaccattcccattattgcagcattatcatcagtcactgattgctaatgctgtttacgcttctttttccctgggatgtctgaacctggcaacttttcttcctgttcttctattttcttagcaaacccacatcaagggtgtctgttcgcgtttgaaattcatcggcaccagaaagagctaacatgttggcagtatctagaaaaccatcaacatgagcatgggacagttcgctttgcagctgatcccaccatagtgagtgagtacttgcagacagaagtttcttaatcttaagttggtcctgggatgggttgtatgtgcaggaatgcttttatcactcagctagatctgaggtagagaaagtataggtggggctttaaagggcttgctttttttgtattctggctttcgtactcaggcaccagtttcccccgattccttatccatttttcttgcttctgctttaatgtttaacttgtacattcatcattatagcaaagggcttatggaaatctggtttttctacttctgctttaatgatcagcttacacattcatcattacagcgaagagcttatggagctctgaactgccacaataggagagggcgagcttgagatttgtgtgggaagcctggcaccaaaaatctgaggaagctcttcattacaggataggccaggataat

SEQ ID NO: 1241687 - DNA, 4001 bp, Homo sapiens
gtaatgtctcctcttcctcaggtttcttcaaggtgtacttaatatttcatttatacctttcctttctacttcaggcctcctttgaaagtactttcaggaatggcactgaaactagggcctattttactgctgaactctaggacaaactcatgaaatcttgttccctttgaatgtagtagtttttcccccctaaatctttgaacgctgtgcacttcgtgaattccttttgcctacctaaaggacctatcagcatgttcactgaacagtgctttcatctatccctcttcccgggaccctcgcttaacatctgttcaaggtgccaatcaaattaacgaaaatgtcaaaacgtattaaccaaaaattcattgctaagcaaatagatttgaaacaacttcagaatatcaattccaaggctccccttctttaaaaggaaatgtgagttaagaacaatcttagttttttcttacattcattctagtacagacatccaaaaaacaaaacagctttcctcagaaaggtgtgtttgactttctcaaaaggaagttatcatattgatttcagttcatgtagaaaaataacattctccatttctttttttttcttttttggagacaggatctcactctgctgtccaggctggagtgcagtggcccaaacacggctcactgcagcctcaaccacttggggtcaagcgatcctcctgcctcagcctcatttgtagggacaaagtcccgccacgttgcccaggctggtctagaactcctgggcccaagcgatccttccacctcagcctcccaaagtgctgagattacaggcgtgagccaccgcgcccagccctccatttattttcttgataacaatctggaatcttgattccatgaaacctctgagaatcaaaagaaatgttatggtgcctctctccaggtaaatgcacagaacctcaaatttttgtaagcaattctaggggattcagaatactccaggatcttccgtggaatatctatccaccccaggttaagaattccactaatgaatatgaggtttctttctattattaagtgtcatgtatcttttaaaaaagatagtctttcttaatgagaccttcagctttgagatttaactagggaagcagcttccctttgcaactaaaactactatctcacagccatcctgacagctgacagaaaattgagaatttcttacctctgagaaattaacagccaagggaatgattccggccacgtaacatcccaccaacatagccagagacagcaggctaatggagatgaaatcatccattctgccctcctttattcacccacaaccactagacaacaaatttccagtggctttaaatggtgcttaggttctttaaacaggtgtggtggttccaagagagtgggctttccagttctttaggccttcccaccagcagatgtgttcacgaggcaccttcctcttgaacgtacccggcaacagaccctttttgctgatattagcaccagagaaagcttacagcaatctaaggtcccaggctctgggttctcagatgccagtcattagattctcgtgggttaacagagatgggaaaagtcaatggggaaaatgtgcgaatgatcgatttcttcgattgtcggattgagggtggcacaatgtcttaggcggcggcgggtaagtgactcaagcgaacctgttcgttccctaggcgcccctgtctccaagaggcggccccgaaggtgatccgccccccagagcaggaaaccagcccaccagtcccagcaaactctcctccgagcctgggatgaggaaaggagtcctgcaggtctctaacgatgggtcctaggggttcagcagcaaagttgacacaaagctgtctctgccctatacccggtgctgcccatggtactgcactcgaccgggccttgacccggagtcgccgatactacagctgccatggccgccaagtggcatctcttcattccatccacttccggattgtctaaccaccccctcctttacaaaggcacttccgggttacaaccgacctccggcccaggatacttacgttgccgccatttttgagtagggctaatgaaagatgtctgatgtcactgtctataccggtgatcacttgagccgtatgtttaataacgaaagtacggaagacagcgtcttgaaaaaaaataattcttcctaaagcttggaaactttcccttacctttttgcctttatcgaagatggctgaaacagagtcagtagctgctctagctgccggaagtgactgtgcctctatgatccaaaaggctcttttgcgttgcactttcgacgacttccggcggctcctctcgcgaggattggctgttagcggcgttgtagttaagctcgtgtaacggcggcggtgtcggcagctgctgtagcgaagagagtttggcgcgatggtgagaaaggcctccgcggctacccgagtccgagtccccggcctccagagcgaccccagccccatacgttttcccctccccacgagccccatgcagcgccgcgtgatgctccccgccactctagtcggtggattgacccttcttcccgccgcagggacgccaggcctgactctaggcctcggagccccggtccgccctgcggttgcgcgcccgcctgctcgctcgggtccggcgtgccttgggcctgaggatgaactctctcccgattgttactcggtagagggagacgtgggggaggtgttttgttttttgagatagagagtctcactctatcgcccaggctggagtgcagtggcgggatctcagacccctgcaacctctgcctcctgggttgaagcaattctcctgtctcagcctccctagtagctgggattacaggcgcccgccacctcgctcggctaatttttttattttagcagagacggcgtttcaccatgttggccaggctggtctcgaactcctgacctcaagcaatccacccgcctcggcatcccaaagtgctgggattacaggcgtgagccaccgggccctgccggatatggtatttttccctccaaatgctctagcctgctgtaggaacaatgggccagggttgtctaactattctcgaagctgacagatccagctatacccagcatgtgggccaggagaggacgtatttgctttgcagtgttttttcagctttcgttttcctgtgctctgccttttttttttttttcctgtttttgagacctctaggtattgcgtgtggcgcgtccctcagccctcgatcctgtacttatctgtatttatatcctcttggggctggaggctgaaaagtaggctcagctcagagaccagctctattagaacccaaccgggatgatcagtaagctccaattcgaagaaagtgaccaaaactggcttgagaggtggtataatctgtaaagaatttgagcaggaaagcattgccatttaaaaatgataaccacttgaccacagtttttaaaatgtatcatgttatgttcttagtgatttttaatccttgtctttgggcagtaagtactgaaaatagtaaactttgcccggtgttcattttaagactagatataaaaagcaacatgctgtatagctttttccattcttaccctttcaaattagtcctttaatttgcattagaattggaatacaattattatagtagcagttgagatagctagtgtatagggcaacctctgttgcaagaatgcacgtggtttctacaaaattattttttcttaaatgactcgttgaaactttttgagtagctagcttacaaagacttctgtataacaaataatctaatatgatgctttctgtggcttttaaatcgatttaacaaaggctttgactgctcaggttattacaggtgagagttaatccttcgtctcttgtcaccaagttccgtttttatgtcaaaccctctgaaacttttagtcaaagtggtttagttcttgatggggagagaagggtatgataaccctt

SEQ ID NO: 1241688 - DNA, 4001 bp, Homo sapiens
gggaccctcgcttaacatctgttcaaggtgccaatcaaattaacgaaaatgtcaaaacgtattaaccaaaaattcattgctaagcaaatagatttgaaacaacttcagaatatcaattccaaggctccccttctttaaaaggaaatgtgagttaagaacaatcttagttttttcttacattcattctagtacagacatccaaaaaacaaaacagctttcctcagaaaggtgtgtttgactttctcaaaaggaagttatcatattgatttcagttcatgtagaaaaataacattctccatttctttttttttcttttttggagacaggatctcactctgctgtccaggctggagtgcagtggcccaaacacggctcactgcagcctcaaccacttggggtcaagcgatcctcctgcctcagcctcatttgtagggacaaagtcccgccacgttgcccaggctggtctagaactcctgggcccaagcgatccttccacctcagcctcccaaagtgctgagattacaggcgtgagccaccgcgcccagccctccatttattttcttgataacaatctggaatcttgattccatgaaacctctgagaatcaaaagaaatgttatggtgcctctctccaggtaaatgcacagaacctcaaatttttgtaagcaattctaggggattcagaatactccaggatcttccgtggaatatctatccaccccaggttaagaattccactaatgaatatgaggtttctttctattattaagtgtcatgtatcttttaaaaaagatagtctttcttaatgagaccttcagctttgagatttaactagggaagcagcttccctttgcaactaaaactactatctcacagccatcctgacagctgacagaaaattgagaatttcttacctctgagaaattaacagccaagggaatgattccggccacgtaacatcccaccaacatagccagagacagcaggctaatggagatgaaatcatccattctgccctcctttattcacccacaaccactagacaacaaatttccagtggctttaaatggtgcttaggttctttaaacaggtgtggtggttccaagagagtgggctttccagttctttaggccttcccaccagcagatgtgttcacgaggcaccttcctcttgaacgtacccggcaacagaccctttttgctgatattagcaccagagaaagcttacagcaatctaaggtcccaggctctgggttctcagatgccagtcattagattctcgtgggttaacagagatgggaaaagtcaatggggaaaatgtgcgaatgatcgatttcttcgattgtcggattgagggtggcacaatgtcttaggcggcggcgggtaagtgactcaagcgaacctgttcgttccctaggcgcccctgtctccaagaggcggccccgaaggtgatccgccccccagagcaggaaaccagcccaccagtcccagcaaactctcctccgagcctgggatgaggaaaggagtcctgcaggtctctaacgatgggtcctaggggttcagcagcaaagttgacacaaagctgtctctgccctatacccggtgctgcccatggtactgcactcgaccgggccttgacccggagtcgccgatactacagctgccatggccgccaagtggcatctcttcattccatccacttccggattgtctaaccaccccctcctttacaaaggcacttccgggttacaaccgacctccggcccaggatacttacgttgccgccatttttgagtagggctaatgaaagatgtctgatgtcactgtctataccggtgatcacttgagccgtatgtttaataacgaaagtacggaagacagcgtcttgaaaaaaaataattcttcctaaagcttggaaactttcccttacctttttgcctttatcgaagatggctgaaacagagtcagtagctgctctagctgccggaagtgactgtgcctctatgatccaaaaggctcttttgcgttgcactttcgacgacttccggcggctcctctcgcgaggattggctgttagcggcgttgtagttaagctcgtgtaacggcggcggtgtcggcagctgctgtagcgaagagagtttggcgcgatggtgagaaaggcctccgcggctacccgagtccgagtccccggcctccagagcgaccccagccccatacgttttcccctccccacgagccccatgcagcgccgcgtgatgctccccgccactctagtcggtggattgacccttcttcccgccgcagggacgccaggcctgactctaggcctcggagccccggtccgccctgcggttgcgcgcccgcctgctcgctcgggtccggcgtgccttgggcctgaggatgaactctctcccgattgttactcggtagagggagacgtgggggaggtgttttgttttttgagatagagagtctcactctatcgcccaggctggagtgcagtggcgggatctcagacccctgcaacctctgcctcctgggttgaagcaattctcctgtctcagcctccctagtagctgggattacaggcgcccgccacctcgctcggctaatttttttattttagcagagacggcgtttcaccatgttggccaggctggtctcgaactcctgacctcaagcaatccacccgcctcggcatcccaaagtgctgggattacaggcgtgagccaccgggccctgccggatatggtatttttccctccaaatgctctagcctgctgtaggaacaatgggccagggttgtctaactattctcgaagctgacagatccagctatacccagcatgtgggccaggagaggacgtatttgctttgcagtgttttttcagctttcgttttcctgtgctctgccttttttttttttttcctgtttttgagacctctaggtattgcgtgtggcgcgtccctcagccctcgatcctgtacttatctgtatttatatcctcttggggctggaggctgaaaagtaggctcagctcagagaccagctctattagaacccaaccgggatgatcagtaagctccaattcgaagaaagtgaccaaaactggcttgagaggtggtataatctgtaaagaatttgagcaggaaagcattgccatttaaaaatgataaccacttgaccacagtttttaaaatgtatcatgttatgttcttagtgatttttaatccttgtctttgggcagtaagtactgaaaatagtaaactttgcccggtgttcattttaagactagatataaaaagcaacatgctgtatagctttttccattcttaccctttcaaattagtcctttaatttgcattagaattggaatacaattattatagtagcagttgagatagctagtgtatagggcaacctctgttgcaagaatgcacgtggtttctacaaaattattttttcttaaatgactcgttgaaactttttgagtagctagcttacaaagacttctgtataacaaataatctaatatgatgctttctgtggcttttaaatcgatttaacaaaggctttgactgctcaggttattacaggtgagagttaatccttcgtctcttgtcaccaagttccgtttttatgtcaaaccctctgaaacttttagtcaaagtggtttagttcttgatggggagagaagggtatgataacccttggttttgcatgtcatgttaaatgtactatttttccattgtttattcagaaagtctgggcttcagctatttctgttccaatttgatggttaaaaattctgatcattttgtccaggcgcggtggctcacgcctgtaatcccagcactttgggaggccgaggcaggcagatcacctgaggtcgggagttcaagaccagtctgaccaacatggagaaaccccatctctactaaaaagacaaaattagccgagcatggtggtgcatgcctgtaatcccagctacttgggaggct

SEQ ID NO: 1241689 - DNA, 4001 bp, Homo sapiens
tcctgcctcagcctcccaagtagctgggattataggcatgcaccaccacacccagctaattttgtatttttagtagagatggggtttctccatgttggtcaggatggtctcaaactcccgacctcaggttatccgcccgcctcggcctcccaaagtgctgggattacaggcgtgagccaccttgcccagcctccaacttgaatttttaagagaaggcactcattcgccagagagaaaggatctgtctctcatcattaggacattgctgcccacccgactcaccaaatagagaactaaatcttgggccgggcgctgtggctcacatctgtaaacccagcactttgggaggccaaggcgggcagatcacctaaagtcgggagttcgagaccagcctgaccaacatttagaaacccagtctctactaaaaatacaaaaattagccatgcgtggtggcacatgcctgtaatcccagctgcttgggaggctgaggcaggagaatcacttgagcccgggaggcagaggttgcggtaagctaagactgggccattgcactccagcctgggcaacaagagcaaaactctgtctcaaaaaaaaaacaaaatcaaaaacaaaacactaaatgttggttctctctgagcctgctataatacaagacaggcatgggggcagtgtggcggctcccagaaaataactataatggcttgaccccgagttttcagccttatccaaaacccgtcttccctccaatttcagcttcagggatcacctgtgctgaggtacaacattaggaactgaccctaccagcagctaatctgtgggagcgtctcatgacactgctcttttccccaaggactctacgtctgccaaaactaaaggcttcagaaacctgctggaaacccacaaccatcctcctgcccaaagagcatcccttaacccttagctggagtcttcagccctggcaaagcccaagtagacccacttcaccctgaaagaagacaggctattatcttttccttgcttttcctttcccattctctggtattctaagcctcctgctatcgatccctcacatcagcatcgttgaatcacccaaaaaagtatgaatgagagaagggcgatccaatgtaccataaaacctagggatgattggaggcagctgatggccactccctaccccagagttgctgctggagagatatcaccccgagccaaggcagggagacagctgcagccaggcagcacatgctggaaaacaccgaacaggagacagctgagaggaaaatgggagaggctagtcaagcaatggagagatgttagggtgagaggcactcgggagaagaagcgattagacactgcacagcagcaaagaggagggttagcaaggtaagtggagatgagaagagggtggaacgcacactcactccttggtcctggatataagcaggttctcacggcagtgtgagcagcagtcagggagagaagtgccttccaggatctgtggtctgatgctcctccttcccagccagcagtaaaagggaaggccagacaaatgcctatggatttaagcaagaagggtggaggaggtgaggcagcccgcaaaggaaggagtgagggagggggaaaggagtattaagcaaccatctgggtccaaggttcactggcccttcacatctgcaaaaggggcagctaggagctcttggctcagcactttctgtgataagaaggtgctctctcaggaatctcctttgtcagctctgctctgggaccaggggcccagaagaaaggacagtcagctgagtgcagtatctgtagccctggggaagctgtcccagagcaagttagctgaggacaggacagtagcggggaaggaatacacagcactctctctctctgtgtcctccatgccccaccctagcctctcttctctctcaccccaagcatttaagaaagggaggaaggttgcacagtgtgacacaaaggcttgttcccatgctgagattacaggaagtgtaagagcagtctctacaccatgtgactgggtgttctaagagaactctgcacacttccccatgcaaagagagactggggggttgcctccaagcctgggccactgccccaaagtctgagcctcagactacttcaaaagaaacacagtcaagagatcaaatatctgactgcatccccaccagacccacgtgccttttcattcttgacaaaacataccaagatctctgggataagcataaattcctataaacgccttcctcaaatataagttgactccactttcctaaaaaatatgaggaaatcaggccagacgcggtggctcacgcctgtaatcccagcactttgggaggctgaggcaggcggatcacaaggtcaggagatcaagaccatcctggctaacacggtgaaaccccgtctctactaaaaacacaaaaaaataaaaattagccgggcgtggtggcgggcacctgtagtcccagctattcgggaggctgaggcaggagaatgaggagaatggcatgaacccgggaggcggagcttgcagtgaacccacattaggccactgcactccagcctgggcaacacagcaagactccatctcaaaaaaaaaaaattaaaaaagaatatgaggaaatcagatttcactgaattctgttggacagacaggcccagaacaggcagaggaagctgagcactttttggaaatcacatagtttatgctatctttattatttactttaaatctggtattctgagtctcttttaccaacagaaatagaccctatccattctgaaatccaactgtctgtttcttctcctatctgttctaaccctctttggttattctacaaccagagaatagagatctaaatatctctgggagacatctctaccatacatcctcccattctagctctttaaacttttaatttaatctaggaggaggattctggtgtgagcgttcccagagatcatgcttctcccaagacaggctcacaatgatctgaaatccttctggaggagactctccttttctccaaaatgctcctgtaataataattgctatcacttattgagcacttactgggccagacacactgctaaggacttaagcacattatctcatggaacctccagagctcatatactcttaatcacacaagtatactatctctccatctccccatccccctggcctgccttagtctctaggccttccttttatttttttttttttttatttattttctttttttgagacagagtctcactctgtcccccaggctggagtgcagtggcacgatcttgactcactgcaacctccaccacctcctggttcaagcaattctcatgcatcagcctcctgagtaactaggattacacctggctaatttttgtgtttttatttcggtatttttattttattttattttattttattttatttattttgagacagacacttactctgtcgcccaggctggagtgcagtggtgcaatctcggctcactgcaacctccacctactgggttcaagcaattctcctgcctcagcctcccgagtagctgggattacaggtgcacaccaccacgcccagctaatcttttttgtttttagtagagtcggggtttcaccacattgaccaggatggtcttaaactcctaaactcaggcaatccgcccacctcggcctcccaaagtgctaggattacaggcatgagccattgtgcccagcctaatttttgtatttctagtagagacgaggttttgccatgttggccaggccggtcttgaactcctggcctcaactgatccacctgcttctgcctcccaaagtgatgggattacaggcgtgagccaccgatgccaccttagaccttgcttttggacaggaattatctacatgaattacctgggggaagatgtaagcagactagattaaaaagaaagaaagcctctgtcatccttcagtctatagcctagacgaaaggctcc

SEQ ID NO: 1241690 - DNA, 4001 bp, Homo sapiens
attacctgggggaagatgtaagcagactagattaaaaagaaagaaagcctctgtcatccttcagtctatagcctagacgaaaggctccaacaaagtttgttaatctccttcctggctgcccctcccctttctcattctttgcagggataagaggtgattacaagtcctcttggcagtgctgctattgctagggtgcccacttctaaagcaaacaaaaaaaaaaacacaaacacatcatcacgcctgcccttttaagaccaaattcactggcaccaaggggtgggcatgtgtcctaatatgacgtaaaagaaaggaaggaaggagggacaaaggaagggaaaactgtgagggggaatggagagagaagtgtacagggtttcattcctgactggtagcatctgaaaagtgaagtcctatccgtggaattttgagacagaaatctgctgggggtaaaacccacactccagcaaacagcacgccctagtggtagcaccaggaagtgctagtggactctaacctacttcagtctgcccgtgcgcactaggcaagggaggctgccatgcattgagaacatgaagaccccctcttttctcaaccactacctagcaccctggacaagaaggcaccatctttggcagctcacatttctccctgagaccctgggtcttagggtaatgcttccaccattcaggcagccccaccattcaggcagcctgggaccagcaacacccctaggctctcccaaaggggctcttctaccccaggtttttggtttttttttttttttggtttttgggttttttttacccgagatggagttttgctttgtcccccaggctggagtgcagtggcacaatctctgctcactgcaacctctgcctcccgggttctcctgcctcagcctcccaagtagctgggattacaggtgcccgccaccgcgcccagctaatttttgtatttttagtagagatggggtttcaccatgttgtccaggctggtctcgaactcctgacctcgtgatcctcccacctcagcctcccaaagtgctgggattaaaggtgtgagccaccgtgcctgacccaccccaggttttacatgagaaaccccataagataacagcagcccttgttgcctttccctgtctgagatgcattcatctctgaacacccagtgaagattacaggacaacacactcatcctacagcttgtggaagaaatttgattcagaaactggcagcagggcctccagtatgcagtgctgggcaggacagccaatggagcccctcaccctaacctcaccctcgaatgacaacaccaaaacacaatttctccaggaactagtacataattcggggtcttggctcctcagccaagctcagggaactactataagaacacactttctctcccagagaccccatgtcctgccttcctggctccaatcagtctgtgctgcctcccctaacaacagaaacagaaaacagatacactctggtatgactagatttccccatcactccaagctagaagctcagctcctccctccccagttctctgtttgtttttctatattccactgtggctaagacagtctctttaaaaaaaaaaaaaaaaagtgaaacaaaaaagaaattgtttactcctgtggccagggcttccattaaggaagggctgaagtctctgggcagaaggttcagcccagggagggacagggctgggatcaagaaacaggaggctcttgggtctccattcagccaatttttaggactccatcctcctcctgcacttcccctctcgcccattgtccctcctctcccacctcttacctgtccagtgacctttgggcaggtgcggggaggaggggctaccagctgagtcaggggagaggggaaggtgctagttaggagaaccaagcgtatcgctcatgctgcaacagctgttgactctgaggagcagaaaaagcagagggtaacggggactgaaatggaaaacaggaaaacacatgtgtgactctggccggcagcggggaggggccaggggacgggctggagctgggactgcctggtcagacccagaggacctcagtgcctgcccgcctccaggcaccttctctactacactggcaccaaatacctgagtctcagctccttctcctccctacctcagcctcaccccccccttccttgttgccctacatttactgagcacttaagctttcccctccattgacagtgacctctgatgcctcttgcaactccactcatcccatttcctactcatctcccactcatgtactatccttagttctgcagaggggatacgatcccatggttaggggaaggaaactctgcagtcccatctcaagagtgtcagtgccatttcagcccctaaagcaagccaaggggaggtaatgcaagccaaggaagaccacttatagggggacagccaagcacacatttaaacaccaagcaagctcactcacagctgagatctctaattggttcaggtgatatcgatatatgtcgccaggtaagagccaactgggccatggcaccctgggcagactaatgagttggcatcccttcgaaccagttttatttaaacatccgtcgaacgtttacttagcagaggtgggggaaatatcaattttcctggaatacaaattgtgtaagcctctttatatttaaaattagaaattattacacatcagccgggcacggtggctcacgcctgtaatcccagcactttgggaggccgagtcgggcagatcacaaggtcaggagttcgagaccagtctggccaacatagtgaaaccccgtctctactaaatttacaaaaattagcaggcgtggtggcgggcgcctgtaatcccagctacttgggaggctgaggcaggagaatcgcttgaacccgggaggcggaggttgcagtgagcactccagtccaaaaaaaaaaaagaaaaaaattattacatatcttcatcacatgcaatcttctgaagcaaacaacttcttggtaagcatagtaaaccacttaaaatgtggataatagtataaatctcttgccctcagggagcagcattcacaatgcatcaggaatttttggaattacaactgtgactaacgcctttaagcaactgtcagctggctggccccagggctacatcctgcaatttgcacctgtctgttggaaaattactccagacacaagcagtccaggtaaggagttgtcaataagtctatgtcactggatgaaagccaactcatatttcaccaagacacagaaatcatagtacactggcaccaaatacctgaattattccaaagatattttagtgtcctttagacactctcagcctgctacccaacttgccggccccttaattgcactctggagtcgggtccaagtcgtaagggaggtcctagaaagagagaagctgtccttgtctgcatgggcctccctgctgtcttccccactccactccagcttcactggcttccctgcggtggccgcacagcaagcatgctcccgcctcacagcttttgcaactcctgttctccctgcctggaacatgcttcccagtgatattgtccattcccggtgtcatttgtttgctgtcagcactcccactagaatgtaagcgtcacaagagctttgttcactactgtatccccgcagtgcagggctcacatagacagttaataaatgtttgctgggttaataaatgaatgaatgaactatgttatctatttgatttcccaggtggctaggctcctgcgcatgtccttgaatttgctctccaggccctcctgtttggctgccgctctggctcctaagcaaggagtacccggaggtactctttttgacagtaatgcgttaaaggcaaagaagaaagtatggctttcacagttttactgggaggcctagaatgatttgaaacggacttttgtttcattaatgggaaaagcaaagcaaaacaaaaagcctatcatctaacactc

SEQ ID NO: 1241691 - DNA, 4001 bp, Homo sapiens
tggtacccatggtcactactgccagtgccacttgggactctgggtctgtcaccaagacactggttagccccagcctggactgctttctgtgcagcaggaaggaagatgccaatatggcaaaaggggaagactttcacagttatgcctcagaaaccaagaaaggtgcatccattgctcccagggctttagaaagtcatttcccacagggatctccaccttgggtcccctcccaccagcccccttaatcaatgtcacagtcacatgttccctccaaactcccggaactccatttggatttctcggtctcgctggcttgcacctttctcaggagtggactggactggcttggaaaggcttggttttcctttaacatttccagaaccaggccactcctccttgtctgttcagataagtgaaaacaggcagtagaaagggggaaaaatgtccagacttgccaaagtccataaagacagatggtgaagaagagagggaaagagcacaagaaaccacagggcgggagagagcaaggggaggacaatgcagatgagtgggagagaaaaagggcttgagaggagcagaacagagagaggccaggactgaaaacagcaagatggaatgtactaagcagacggttgctgaaaaaggaagcagtgacgccactttgtagaaatcagaacgccctgttcctctccaaacctgcaaaacaggcacctttctggatggagctccccagccctctgaaacgccataaatttcacctgggtcatggcctgccagaagggttggcttctcagcctcaccttttgctggggcgttcacttctctgccttctgccacgctctggccagctcccacagactccctcccctccagctggagcaaaaggggtgaggcatgtccctcccagcagccctctgggtctgggtgcccaggctggaggttggagccgctgggcagggaagccgggcctgtgggggcgtgggtgtggctacgctcggctctgtgattggctgcaccgagttccttggccgcctcccccgcttgtggaaggaactgagcacgtgtttctaattgtggaaaagccgcttcggcttggcctgtccaaccgcaggcgtttccagatctaggaggtaagcagtgccggctgccaaaaggcgctgataggcaaagaaaacacggaggcctgtttgacctctaacgcacacaacccaaggctctgataaggttccagttctgcccacgcaggccacacggaacagtctttcctcgtcaaagacccagagaggcctggaggtgtgggggagtgggcagacacggatccagcttcacagaaccctcctagaatccttctctattccccgcccacccccacctcaagacattttttagagcgggtgaggggcccacattataaagtccttccgcacctggattattgtacatgtaacataacttgtctgataaagttatacatataacttgactggtgaaagagaaaaacgttaaaaaaaaaaaacccacaaaaagccacacaacagacaaaaaaaaaaaaaaaaaaaaatcaaagcagcccttcctcataaactgcgctttgatcccagcttctataaagtgcacagtggggagtgtggttttgaaacagatcttgcctatcgcacgatagtaacatttccccttctccagcccttttcatctcgaagcacttacaacgttttagaaatctcggaaccccctccaaaggagaggaggtgctctgagccttccggaagggcctctctcttccaaggacacaccagcagaggaggagggtgcagagaagctgtgagggctgtgagtgctcctggaggcacacagcttttaccaaacacttccagctaagctcctgcccatactgccccatcccctcccctcctcccttcctggctctctcttccccttccttcttatcctgttagctcctgcgccagctgctggagctggggtttctgctgaatcaccacccagtatttagctcagccaagaggcaggaatacccagctcagcattttccaagagctgagtagttctctcttcagcatgagctaaacatggctcctcagctggcctggatcggggagaagcgaaaaactggacaccaagaaatccagggtggcctgccatgccaccctggggaaccctattttaatcctactcattactttttcagcctgggcctgaaaaattgctatctcacacaccaattctcagggctgatgtcccccgagacatggagcaaggtggatgagaatgggttctgttgagtctgcactgagcccaggagggctagcctgaccctccatcatatttcagtcttggaagacagggtgtggatcctgtgaggtttagttggttcttggaccagaaggcttgtaggctctgttggtgttcactaaattctataaacctggacccaggctgcaaaattcccccaaaacggttcagttataacccaattccaagggtagcttgtacttaaacttgctgaactcttttttcttttcttttcttttttttttttgagatggagtttcgctcttgttgcccaggctggagtgcaatggcacgatctcggctcaccgcaacctctgcctcccgggttcaagcgattctcctgcctcagcctcccgagtagctgggattacaggcatatgtcaccacgcccggctaattttgtatttttagtagagacagggtttctccacattggccaggctggtcttgaactcccgacctcaggtgatccgccctcctcggcctcccaaagtgctgggattacaggaatgagccactgcgcccggatatttttctctttttaataaggaacactttgtgaatttgcatgtcatctgtacatggggccatgctaatcttctctgtactgctccaattttagtatatgtgccgctaaagtgagcacaacttgctgaactcttataacagagatgcccttttttctttcccccaaagctccaagtaccactgggcctcactcccataagccttctgattttatgttcttaggtatgtgatataaatttggtgtgtcacattaacccttaaaagtttaccagacacaattaatgggtgactttatttaaaccatgggccctggctcctctgagaaaaacaaagtgatccttgacagtcagcaacaaaaggccagagaatttaagtttctaggctggtacaagaaagtaggcaaatctctaccacacctggtggaagctgaactccaaaacagtttcctgtttcaggaaacctcaatctcattcactgttcttccaatcagaagtagacatattcccagaacaagcccctcattcctccatttccagggtgtgggcacacacactctctgaacagcagaacttctgtctgagagtagaagctgaagagcagaagagacactatgggaatcaggaaagaggaggtgatctgggccagcagttgaagcacattgaaacgaagaagaaggctgacttctcaggtaacttacttactctgccattgtagacataagagtccaaaagcacaggggatgctttctcaagtcccagcaagtcttaagtgttgaagagtgagtagaaagggtgacaaggacagaggggtcaacttgaccagtctgaaccacaccaattcagatgatacaacaatacgtacagacaatacgacccagtgttgtccttgatttacttcacctgtatccccaacaagaccatgcagtccttgactccttcaaccttaatcaccaaggcctaccaattctacctcctaaatgccaaatgcatctacttttctctactcccactgccccaagatgcacatgatagtcatctgcaatctgaatccttacaactgaattgtaatcatcttttcttgcctctgatcttattcccctcaccaatccatcctttagctttgcagcatgactctcctaaaatacagatatgatcatgtcggtc

SEQ ID NO: 1241692 - DNA, 4001 bp, Homo sapiens
actctgtcatccaggctggagtgcagtggcatgatgatggctcactgcagtctcaacctccccagactcaggtgatcctcccacctcagcctcctgagtagctgaggtgtgtgccaccaggcccagctaatttttgtattttttgtagagacgggttatgccaggttgcccaggctggtctctagaactcctgggctcaagtgagccacctgccttggcctcccaaagtgctgcgattacaggcatgagccgccacacccggtgatgttttcaggtgctcccttgctttggatacaggactctggcttctcattgagctgggccagcagggggtcattttgtgcctccctcagggagccaatgaacattcccacatggatccctgaaccaatctcatttcttctactaagccagctgccactcgatgagccacactattctggtctgacagggtaaaggttgggatagggccacctggatacggggctggattggttgttataaggacagtgctaagaagaatgaaccagttgggactctccttgtagtcaactcttggccctagaggtaaatatttgaagcctgcgccctaccacccaaggcttgtgtccagcctcatgggtgatcagaaggcaggaatgaccttagagacccagaacctcattttatttttcttttacagatgggagtctcattctgtcgcccaggctgaagtgcagtggcatgatcatagctcactgcagcttcccagtcctgggcttgagcgatctgcctgactcggcttcccaaagtgctaggattacagttgtgagccaccatggcggccccagaacctcattttatatgtgagtgaatttagaccccagctaattcgcagcaaagaccagactgggacagcccaattcccagttgcttgttctgcctctgccccgccttccttcattatacacagatcactctgctttcccttggccgctcccacatcatctctcctcctgcttgggtcagtggtacccatggtcactactgccagtgccacttgggactctgggtctgtcaccaagacactggttagccccagcctggactgctttctgtgcagcaggaaggaagatgccaatatggcaaaaggggaagactttcacagttatgcctcagaaaccaagaaaggtgcatccattgctcccagggctttagaaagtcatttcccacagggatctccaccttgggtcccctcccaccagcccccttaatcaatgtcacagtcacatgttccctccaaactcccggaactccatttggatttctcggtctcgctggcttgcacctttctcaggagtggactggactggcttggaaaggcttggttttcctttaacatttccagaaccaggccactcctccttgtctgttcagataagtgaaaacaggcagtagaaagggggaaaaatgtccagacttgccaaagtccataaagacagatggtgaagaagagagggaaagagcacaagaaaccacagggcgggagagagcaaggggaggacaatgcagatgagtgggagagaaaaagggcttgagaggagcagaacagagagaggccaggactgaaaacagcaagatggaatgtactaagcagacggttgctgaaaaaggaagcagtgacgccactttgtagaaatcagaacgccctgttcctctccaaacctgcaaaacaggcacctttctggatggagctccccagccctctgaaacgccataaatttcacctgggtcatggcctgccagaagggttggcttctcagcctcaccttttgctggggcgttcacttctctgccttctgccacgctctggccagctcccacagactccctcccctccagctggagcaaaaggggtgaggcatgtccctcccagcagccctctgggtctgggtgcccaggctggaggttggagccgctgggcagggaagccgggcctgtgggggcgtgggtgtggctacgctcggctctgtgattggctgcaccgagttccttggccgcctcccccgcttgtggaaggaactgagcacgtgtttctaattgtggaaaagccgcttcggcttggcctgtccaaccgcaggcgtttccagatctaggaggtaagcagtgccggctgccaaaaggcgctgataggcaaagaaaacacggaggcctgtttgacctctaacgcacacaacccaaggctctgataaggttccagttctgcccacgcaggccacacggaacagtctttcctcgtcaaagacccagagaggcctggaggtgtgggggagtgggcagacacggatccagcttcacagaaccctcctagaatccttctctattccccgcccacccccacctcaagacattttttagagcgggtgaggggcccacattataaagtccttccgcacctggattattgtacatgtaacataacttgtctgataaagttatacatataacttgactggtgaaagagaaaaacgttaaaaaaaaaaaacccacaaaaagccacacaacagacaaaaaaaaaaaaaaaaaaaaatcaaagcagcccttcctcataaactgcgctttgatcccagcttctataaagtgcacagtggggagtgtggttttgaaacagatcttgcctatcgcacgatagtaacatttccccttctccagcccttttcatctcgaagcacttacaacgttttagaaatctcggaaccccctccaaaggagaggaggtgctctgagccttccggaagggcctctctcttccaaggacacaccagcagaggaggagggtgcagagaagctgtgagggctgtgagtgctcctggaggcacacagcttttaccaaacacttccagctaagctcctgcccatactgccccatcccctcccctcctcccttcctggctctctcttccccttccttcttatcctgttagctcctgcgccagctgctggagctggggtttctgctgaatcaccacccagtatttagctcagccaagaggcaggaatacccagctcagcattttccaagagctgagtagttctctcttcagcatgagctaaacatggctcctcagctggcctggatcggggagaagcgaaaaactggacaccaagaaatccagggtggcctgccatgccaccctggggaaccctattttaatcctactcattactttttcagcctgggcctgaaaaattgctatctcacacaccaattctcagggctgatgtcccccgagacatggagcaaggtggatgagaatgggttctgttgagtctgcactgagcccaggagggctagcctgaccctccatcatatttcagtcttggaagacagggtgtggatcctgtgaggtttagttggttcttggaccagaaggcttgtaggctctgttggtgttcactaaattctataaacctggacccaggctgcaaaattcccccaaaacggttcagttataacccaattccaagggtagcttgtacttaaacttgctgaactcttttttcttttcttttcttttttttttttgagatggagtttcgctcttgttgcccaggctggagtgcaatggcacgatctcggctcaccgcaacctctgcctcccgggttcaagcgattctcctgcctcagcctcccgagtagctgggattacaggcatatgtcaccacgcccggctaattttgtatttttagtagagacagggtttctccacattggccaggctggtcttgaactcccgacctcaggtgatccgccctcctcggcctcccaaagtgctgggattacaggaatgagccactgcgcccggatatttttctctttttaataaggaacactttgtgaatttgcatgtcatctgtacatggggccatgctaatcttctctgtactgctccaattttagtatatgtgccgctaaagtgagcacaacttgctgaactcttataacagagatgccctttttt

SEQ ID NO: 1241693 - DNA, 4001 bp, Homo sapiens
ccaggacacaacgagctctcataaaggaactctggagagatgacaaagaagcatatctatgcctgaccgtcctgcactcctttttctgggaagaaagtaaagccccctaccaaagatagcagaacaatctctcactctgaagtgagggcaggaatagtgagctattgcctgccatccatctccaaggcttctctggaaagaggatgtgctgtctagagacgaagctgtatttgggactcctgccctgcaaagtacattcagggggtttgagtggcctgcactggcactcttggggccacccaggttccccaccttcagcacctcccagctaggacacatattttacccatcagttcctcctcaactccatattctacacattctagttactcctgattccctctgagagcttcaccgggtcctccgtggctgttaagaaacaggtggaccccaccaggcaactggagaaactgcaaactctccacttaccgagaggcacaatctgtcccctcttttcttccataacttccccatctgtgaaatgggaataacagccctgtcacagctacttcacacagtaaaagtgctgcataaggtggaaaacgctaaaataaaaaggcagggcattgctcttgctatttttaatacctatcccatagtttcatttaacataaaactgcaaaatagctaccaaatataccttaaaagcccatccccagcctgggaataatagctgcatacaaacttgttcaggtccctcagtccctccttaaacctattgaactagaacctccaagtgtcgagaccaggacctgtatttttaaggagttcccaggcaatgctaatcatcagccgggtttctgaccacgatttgctccattctatgaacactgggcagaatctttgcctggtttggaggaagagatgtatgatgtatttcctatgcctctcaaacttgaccagtggaggtgagttacagctcaggtgactgacaatccttttctaaggaataggaagaacaataatgctttcgaagggttaagatctcacaggaggaccaccagaggggagaggaggggtccgcgggaaggaatggaactcacctacgatgataccacaggcactgaccaatccgatctctttcttcagggctactccgccccctccggaaccagcctcggggctggcgtccgactcgcccccacctgggtgtttcttttcggtgttgtttcggtgcctggctccttcttccatccttctcagtaggattgcaacctcaaaagctgcctccctttctaaatgcgtattcgtgtaaatatattgggagagagctttgaattagaacgtccttttccgaaataggaaccactgctactctctaaaaaaggcaagcagataaaagagaacacgaaaaatattcctactccgcattcacactttctggtcactcgcgtttacaaacaagaaaagtgttgctaaaaaaaaaaaaaaaaaaaaaggccaggggagacatacatttaaatataaaaatagaactgtgccagcgactccggctggaattctgctgaaagggatgtgtcttcagaaaccaggatggttctgctctgtgcaccaggcagtggcttattcagaaagtgagcctggatttcccttcacctctccccctaataaaacaggagactgcctttacctccccttagttttttcttttatgatgaagacaaaagtagttttcattaacggtaggaaaaaagagcaatcctcaggtactttcttctcttctagaaaaacaaactgtgaacctgacggtgttgctctagatctggtttccacctgctttgggtttcttttcccttccccgtcttctgcttccgcctttcccaggtgtcctcttctttctcgctggtcttcgtgcccttgttttcctcttttcgatccccgttctactgcacagccggccccatccctctggtttcgggagagtggcttctccacacactaacgtgcttctctttagcgaggggttttattcgcccgccgaggctccgcccctgcctcctctgctcccctccatcctcagtcccgtctcctccctcctctgcaatttaagtattagcacaaagcccccaaacagcactgagaaaatggactaagttatttctttttgcaatcgtctctcgctttctccatctttctccttgcaaccaagtggaagtaaactccttccacgtcaactgttccgggagagctcattagctagtataatgttacaggtcatacagcatctgtgagctttataaatcagggaacagttgtgccgatacttttaatgccatcagaaataaactagccaatgtattaaaaaatatttaggactggatcctgtatttgagaatacaggagagaacgttgaaaggacatcatcttcgagtttcctaaaaatagggggaatcgacgggtgggggagggaaatggaaggaattaacaatgggaaaaaggttcttttagcgtaattgtgagctacgaagagtacagaggaaacaaaatcgccaggcgcggtggctcacgcctgtaatcccagcgctttgggaggctgacaggggaggatcacgtgagcccaggagtctgagaccagcctgtgcaacagagcgagaccccgtctactaaaaattttaaaattagccgggtgcagtggtgcaggcctgtagtcttagctactcaggaggctgaggctggaggattgcttgagctcaggaggtcaaggctgcagtgagctatgatgacgccactgcactccagcctgggaggtagagcaagaccctgtctcaaaaacaaaacaaaacaaaaagccagaaaaaccacatgcacatacaaaaagataaaaaacaaaatcaccaggtagccttgttgttcacagctcttatttaggactggctgaaacatgaaaaaaaatgactcaaaccctgatcctgcaacttctaatatttttgcatttataaactatttgaaaagcacacatggggaattatcagtatatcgctgatcatgaaacatacttgttgatgttagaataactagcttattaccatatcgaaatgatgcctccactttcttgaagaatttcactcagaaactgctgccttaaggtgagagcaacaatgtctatttataattgtaaattatttcgaaaaaacagcatgaagcaatatagtggacaacactataagtctaaaataaagttatttttagccttattaaatatattatgcaaaattatttaattttaaagtgggcctaaaaaattaagttcccccaaactgacccctaactacaaaaatttggcctcactttctggaaaatgttccaaaagattttgggttttaaggaaaataaatacttaattccttaaaatgaggtttgttgagctatcatagcaaaagctttttcaaatggggtaaagtccaatcagcagtcatctgcccccttgatcactcagcaagtattaagaggtttcaaaggttgggaggaacttcctctcctccttttgctagttcaagacacagcaaattgaaagactcagcaaaaaaaaaacaacaaacaacaacaaaaaaaaccagacaaggcagggaatatatagcacgaaactccatgggagggaatgagtcatgggaaatgaaaaaatgtcgaatttgcctctagcctttcctgacaaccttagaaagcactgaggaaaaatttgatagattcatttgtatacattcagatttgaagacttctgctccgatttcaacatcaccatataaaacaaataatgtttctgcttcttaaacgtgagttctttcagtaatatttggtagttctaatttatatgatgcagacttaatgtgggataaaacatgaatgtgatgaatttgaggtctcttgctaaaaccagtgcaaactgataacgatatggtaagctttagccctctcaaattatgaactaagaagctaagggggtt

SEQ ID NO: 1241694 - DNA, 4001 bp, Homo sapiens
atataacacatttaaaattctacatctgcctggagggcctttaatcaaggatttcaaaacactttcccagatcttgcccattcatctttaccacatccctgggaaacagctggcaggtaggtagcagagcattaaaattagggtactgtatcattatctttgatatcagcactatttgtttagacagcatttttttctgaagaactaaagagctccatacacattatattatctgattctcacttagtcatacaacatcccccatatttgctgacttgcaggtagtttggaaagctttggatccacagaaatgcattactttactgcctactccctcccctcccactcctgcataattcacaggcacttcccactgatggctggctgactttaagctgccagtaccatgggctggaccacctaccttgtctatcaccaagacacaagcaccctcagcacatacattcagttttatgtcagtgataccaaaggctgtaggaagaacaaatcataaattccctcatcagatttcatttgagtctagtttgttgggttttaaaacctcacttgtatggctattagatggatttcatgattagtatgaagatacaccattgggaatggatctgcagggtctaccaatcatataaacccatggttgaggctaagcttctagcacagtctctgtccaccttgaaagtgggcatcacctttacaattggcccaggggattgctttgatttgtaagaacttctgtatttccctttcactgaagtcatcaggcaagtgatattcttctgttatgtacttatagtacatgttacagttgtaaagaatcaatcaattgtataattgtttccttatttgtcttctccactatcctaataagctctacaagggcaggagctgcatttgttctaatcacccctatatttccagagttaagcacacatcagatgcttaataaaaatatctgttgaatgaggctaggcacggtagctcacacctgtaaccacagcactttgggatgtggaggtgggtggatcacttggggtcaggagttcgagaccagcctggccaacatggtgaaaccctgtctctactaaaaaatacaaaaaaaaaaaaaaaaaaaaaaatcagccaggcgtggtggtgcacatctgtaatcccagctactcaggaagctggaccacaagaattgcttgaacccaggaggcagaggttaccgtgagctgagatggtgccactgcactccagcctgggcgacagagtgagactccatctaaaaaaaaaatctattgaatgaatgagggaaaaaataatggcatttatcacactgaacattctctggcttagggcttctaatcacaccctttctgcactggtgtaagttccatgtccgggcatcataatggcccccacccccatgccatataatcacgcaccctgggaaatgcagccttgccaaccctcccccttcattttcctcagtccttgagaaacacaggtgctgcttagatagaagccttatatttggcccagtctcttccaataatttagttgagctctgggctcagaatttttatatggcctgctcaaaaagcccagtgcttccagcaaaatctctcacttgcacctgtccctgtggtatggagagagaaacacataaactctggggccatagaaacttgagttaaaatcttagttctactgcttatagctgtgtgaccttggccaaatctcttacctctttgagcttccgtttcttcagcagttacctggagatgataacattcacattgggttgtcgtgcgggtgacatgagaaagcacaggcagcaggctcagcaagtgatggttccctttccttcccctctttccttgaccccttcctttgacttatccaccctcctggctgccagttatcgtctggatgcctctagctgtcattccctaggttttcggctccatgctggaagagttgatactcagactatatttagatgccttagcgctttcatttttttataccactgtgttgctatggtgatggtggggaggggaggggaaggacagcttgaaaggaaagatggagctcagcggtgaggatcggtggccttggctgtggactgttcctggctggtactctccaaggagatttacctgtgcattccatcaggagatgcagtaaggagacaggaggaggcagtgcttagtaaaggctcgcaggaaaagagaagataaagaggactgactgttgaaaactgctcgctacactggcccagacacagccttaactccaggaaccttccttaagtggcttctctagcaattgagtcaggagacagcaaatggggttgggtggagaaatgacatcagttatgttggagtttggaagatgttcagaccagactccttcacaggaagaaagtcccatctttataccatggcccaggattgtcatggattctattgattaaggaaaccaaagttgtacacgggcagaaaagagaagtccttttatttgtgcacggagctccatacactcagtggatttgaatgcctacatggtaggctccaagctgatgtaaaaaattgcactgtagaatgatccagtgttcctaaaatggttacacatcatttcactgggtcctcaaaagtggcctggtgaagtgggattatctttacatgaggaaatgacatagataggttggcaacttgcccaatgtcacacagctggtaaatggcagagcagagaattgaactcaagccacctggactccaaatctaatgttctttccagtataccaatggttaccaaaactaattatttaaagctgaagaaaatttatgtgaagatgaaagcctttggtgaaatagaaccaaacaaagcggatacaagccgagacactcaagttgaagtggagaatctcccttcgacaaaacctccttccacttcacctgccagaagagagggtcctaggcagcacttctataagggtagtggttgaagtacccatattagaaacatctggtataattgtaaaagtgccaattcctaagtcccagtcccagattctaatttgtagatctggggtacttttctttggacaagcacccaggaaatttggataaatactaatttaactggagttaaacaaacaactcttgactcagaaaattgggagatggaataaaattgcatcacctatctctttttcctatctgattcctcgagctcatttttagcagcctgaagtcaggcatgtcaaaacaatcaggctggattgtcttgtgaagttttccaactgccctctgggcctccatcagtggctgatccctgggctctaggctatgtgggtcatcaaggtccaggtgaggccacagccattgtctgaccttggtggggtcatcattgtgcctaacagcagatacaaggagactctgggtggagggcagggaagaagggtattggattcaagagcacaggaggggatgtttatcagatgaaaagtcccaaaggagcatgcaagattgggactaaaaatatgtttattggccaaagcagaaggtttgggaaaatctgcagggaaagaatgcctaatttctcattcatcaaagggttgaaagaacagtatgaaaaatgaaggagattctgaaggtgctgttgaagggagaagtcagtgtaagatttttagttctcctaaattcggaggaccttaggatgctcccctcccttataaataacagcttcctatgggcaaacactgtgctttacatacatttaatccttctcattgaatccttctcagagcactattaagtactagtagcatttctattttgcccatgaggaatctgaagctattagaagtcaggtaactttgtccaaggtcacccagctaggaagtgacagaactaggatttgaccccagtggtctgattccaagacccctgcatacttgtccaaaaccgactgaccctaaataggtgtaaatagtc

SEQ ID NO: 1241695 - DNA, 4001 bp, Homo sapiens
cacattccacccccgctcaactccctcctccccccacccccttcgggtgtttcttgaccacccaggagcttggctgcgcctgctgcagtctgcgtttctgataaattgaaaccagttttaattcttctgcccgggagacctaaccgccgaatgcgttcggaggtatgttttttaatcgccaggaaagggggagagagagagaaagagagagagagagagagaggaaaggaggagagaagagaagagaagcggggggcggggggagagagagagagagagagaaggaagctgcgatgagcgggtaaatttatggtactgcattaaaggcatttcttctatttaaccccaccccgccaccaccaccactaccacaccgttaaaaataaaatacaatgaattaagacgaagaactgcttttttccccggagcaaattgctttcatcatctttcccagtggctcgggtcctctgggcaggtcagccagggcctgtaggagcagcagcgctagcctctgaatcagggctttgactgtgtgtgtgtgtgtgtgtgtgtgtgtgtgtgtgtgtgtgtccgcgcgcgcgtgtgtgttgggggatcgggggagggttagttatatatttcgattctctccaccgagtcccggatcacgcagaccaccaggggctggagagtgcagcactggagaaaccctccttctccctcgcccccttggccccagcggtgggtgctctggggctgcagctcccgacccgcggcggtggagtcccgagattggggtgagcgcgtgcgtgcgtatgtgcacgcgggcgcgcgccgagtggataacgcgcttccctgctagcccccaaacccggcggacactcacagcaccagaagcacaacacgccctggcccaggtggcacacatatgccgacatgcatccagcacacacaacacagcagtcagtctccccaaacagcacccgctaccaacccagcatgctcacgatccaactgtacccacctgcccaggcatctctctctgcccctccccacccggcggcaccctcctgtagacacccactctgccagatctgcccccccaacactgcatacacaatgtacactttccggggcaccctcaccccacttctcctggcactaaatccacaggaaggcggttcatatgaatgatcttgagaaataacttaaccccgttactcacaatcagggatcctcttaggggcatcccaagccccccaacctctacctcccatgtctcggctgcccgctaagggggaagggcaggaggctcaccccattactcaccgtttcctctcggcctcccgagcggagtgggcaagggaggggggtgaggaaggtacgcgatgcccccgccgcccggcgcctcaccggtcgcagcggctcatcgcccccgcgggctgcccgccggccgcagccgcgtccggggcatgtcagtccgccgccgccgccctcccgccggggttcgtgggctcgcagctgtcagggagctgcggggcagcgcatctggagcgcggggtctgggagggagggtgtctggggccagggcgaggggccccgggaggggtccttccgcacggatttcagaaagagggaaaccccgacccagagcggtgactggaatctacgcccgggagaggcccggagtcccggccgcgggcggcgggggattcctgcaggaaggggcaggaaggcaagcagcccggcgcgccctggcggctccgagggacctgggctcgggcttgcggtcgcgtcgcctgggctttccctgggctgggagcgcgccgggtctccgccttgcacgctgtcaccgcgggagacgtctcggcctcgccgcgcgcagaggggacgcgcggagaggctggtttctgggcgagcggagagctttgcccattaagctgccggaagaagccaaatcaaaaagccaatctccaagcctccaaacggaacgtcaccctatcagctgggagacagcgccgcactgactgacaagccgcgcatatttatcctcgcgcgcggaggggagactctcagaacgctcctcgaccagcagcgaggaagtcgagcccgcatcccgcatcccgcatcccgcatccagagcccccgagggacgaattcagatccaacccctgccccgcggccacccaccctagtcgttggagcctggcgcccgcgcctcccggccggcagcacgtcaaaacggcggcgcgtcctgacctggattccgccgagttgggagctccaggcagcaggcgggcgcgcggcaccggctttccccttgtcctcaggagacgctgcctgcaattccgaaattaagtctccaccaaacacatctgtggtttttaaatatagcagggaactattacccaggcagggtccacccaggcctaggggaggagttgagggggatggagattggcagcggagggaaaagaaaactccttttttccccctctttttttcttctcttcttggtgcagaacccagcctgtcattttctcaacccaagtcaaacaacagtttgtgagagacgcttgggtgagctctggtatgttggcttttcgggtttctaaagctaaaaataagagggggctgcctcccaaattgctgcttactctgggcctggaggctggaagagagctggtcctttgatgcagcagcgggactagggcttggggcttggctcaggcgaagtgtacacacgtagccttaaatcagatgcctgtaatttctgctatatttgtcaggcttggtcctagaggcatgcggggtgggcaagccactcctaagaatggggtttcaagccctcagcttatcggtggcattaggcagatctaaaatgagcctggtggctggccttctgtagcgacaccagtgcagaaaagtcagaatgtaagggcaggaagttgttctctttcaggcctctctgctgcctgaggctaagtgtgaggggccaacaaatgataataatacttaccaaatagcagcaccttttaagggccaggagtggtgctagtgaatttgattgtattacctcatgccatcctactaaaactctgtgagctaggtacaattaccaactccatttttttgttgaggaaattgagccttaggttaaataaccatcccaaggccacgtgcagcagagccaaggattgaaataaaatgcaaccaaccggagttgtgctgagacgtcaacagtgtgtgtgactcctgagatccctggctcctttgcccggctgctctggagcaaggcttggttcaaacagattaagggggtgtagagactagggaatctctaagcctgagatggcaggaggtctttgctggtcctttgactcagtgttccgttagcaagctgtgtggtggtttctggcctgagtccggagtcagaatcctggatgtgctcagtaggagcagtaggagtgctttcagacccctgaacctttatgggtcttgaatttcatttaaagttagggctgggactgactttgaaaggtttcaatagcttctaaagttgtgggatctcaggatatgtcagttactgggacttaccttgtgtctgctcccgtggagagtcacaatgctgagtctacacattgagagtctacagtagagacaaagagatggctaatgggcacctaaattgatagagtttttaggtagggcaattttgaaagatacatcaaattccttaaaaacgtgaatgcctgtgacccagtaattttactggaagaaatttattctatggcaatcattaaggatatgctcaaatatttagttacaaggatattcatggtagtgtttttaagagtgaaaaattggaaacatcttaattttccaacacaacaaattggtgaagtaaacatgttttgttgacataatgctgtattctaccactgtaaaaatacagatgcagcattctgtgtactggtgtggaaaggtttttataatatatcgtagacagagagaaaaaaaac

SEQ ID NO: 1241696 - DNA, 4001 bp, Homo sapiens
tttttataatatctatttagttctcctagttcaccaaaacctcactggttcaacaattgcctatatttgttctaagtctcttcatccccaccactaattgtaagctccctcagcatataaaccactatgtttacagtgaccaataaacagcagggcctcaatattggctaaatgaataagtaaaagtccactaatccttccaacaatccacagagactaaattttgaagggctctaatggttaagtcaaaccaactggcaagatcaaggtctcacagaatatgatactggagaacaaaataatgttaaacatatgttttataccagataattaaagtcctagaagacactgatttcaaaacaaaccagctctggaaggtaaccctcttcctaaattgcctaaaatggtgaaggaaaaacagctgcaagcaccaagaacaatgcctaccacagaatagatactcaaataaatatttgctgaatcaatggaacaacaaagagaaactgtttcgaagctgtacataatgctgactctttttaagggttttaaactagccctttattgtctggaaacttgcatccgcaagatgctaatgaaactcctcagcctttccataaagtttcacagggactacgggagactttactgggcttggtcttcaccaaccacatgtttaaaacacggggcacaaaccaacctatttcccattctactactcacatctgagccactaaaaacttagaagaaactaaatcttgctccattttgtttccaggggttgacctgaaacatgaatatctacaaaaagagtgaccacgaatgtttacatgttggtaagcaaatataaaaacctcatctcaaaactgcagctgacaaaaattgaaggtggtgaaagatttcagaactaattattccaacctttatctgtagactaggcctctcccgtaagtttcaattttagttaccgtgaaaataactatcatttgctgagtacttacactgtatctaacacaagtctaagaagtttgcatataaactcaatcctctcaacaatcctatgagttgggtattattgactccattttatcgatgagtaaactgaggcccagttgtgagcccttttcccatactaacttcagttattcaagtgataacaacgattaaatggccaagttggaattctaaccccaacggtctagcttcggagtccacttctcagccacaatgatatacaacctttgtccaattgcctgacggaaacctcacaagtttctcaaagtcaacacattcaaactttactcatcttctcttggcctgctcctaacttctaaacaaacaattcaccaatgctaaaaacccagaaatcatttctccctttcctttattccgtacacttctcccacttaagccatcacgaaacggcatctaatttgcttttaaaacattaatgcatctgaccaccatccttctaccatcgccctaattcaggtcctcacgttttaagtaaattaatgaaattgccttttagctcctctgcacgcctacaatcttgccaccttgaatccatcctccacactacagtcaaaattatcccttctaaattgtaaatcttggttaccaagtaataaatctttacaccaaatcactcctaaaggcaagagccggtgcattcgtgaccccaaaagctcaagggacatccctaaacggttaactgcaaacaaaatttctttctgctcacttgcatgctcaggagcagtctcctaattcagccaccacgctgacttaagtaccctgcaaaaagcagaagctttgaggatcacttggacctaaaaattccactactcccacatctccatcactcactcgacgccgcagtccaaggaattcttctcacaaaagcaaccggctgattgatacttctacgcagcgccgcagcacctctcgctgctgaggccgccatcttcagactaaagcaccttctcgagccgaggtcgcggccccggaaaaaatttccggatccggaacacgagagaatctgcttccggatcagagggtataggccgcgagatggggaagatggcagcggccgtgggctctgtggcgactctggcgactgagcccggggaggacgcctttcggaaacttttccgcttctaccgtcagagccggcccgggaccgcagacctggaaggggtcatcgacttctcggcggcccacgcagcccgtggcaagggtcctggtgcccaaaaggtacagagagaggagtggcgcgcgtctctccatcgctttgccccgcgtcttggagggacttacgtgtcttcttcgcctcttttcacctccagaccgattgttattgaacgattcctgacctcctttggctgcagagtcgaactccccactaaccgtcacacttagcaataaagcgttgagatgcctgtttctttaggcggccattcctggcgggggcgctcagtcaaaagagcctgggaatccgtgtttatttcttactgtaactgtctcctcacatttctgtttgggtttttgtaaaaccccatagaacgtctttgtagacggtagggtagacttctgcagcttaaaaaaaaccactcccgaggaatcccagaactgacagggatgcggcgctgtttgttaagccactgtgcgtaaaactagtccctgtcttctcctctggctcttttagaaggaggtcattgaaggattctgagaatccctccgtgttgaaaataaatggcaaacaagtatatatggaatacaggcaccgttctctctctcagcttttccccatggagattaagaaggggaacacagtccgggagcggtggctcaagcctgtaatcccgcacttcggaggccgaggcgggtggatcgcttgaacccaggggttcgagaccagcctggggcatggcaagacccccgtttccgccaaaaatacaaaaaattagccagtctcataacctgttctcaagtaaatagattttttaaaaattatttttttaagggaacataacaggcaagagggaaaacggggaaccaaaactgtagtccaatttatattttctttctttacaatccactttaacgttgaggatatgcagtcccttaatttgctcttggtgttgtccacagatgtctagatgaggcattctttccaagcttcctaacagctctgataaaattgggatgctacagtattaagtgttaatgattgcatacttgagctcagcttttcagcaccttcatttgttagggaaaaaaagtggtcttagagttgtcaaaatacagaaagtccacaccccaataataatatactttttctctccagagcgcttcagactctcattcagctccttttacctacattttaccataatatgtacatgctttttagaatgtcagccatcagggaatgagccattatgtgtctagtacaggacctaaaacagtactaagtacagtatgtgttgagtacatgaaagcttgggtgtttagttcctcagctcaaagcagattaaagtagtaattaagagaagttactattacaagccagctgatgagactggtggggaaagtggtggttaacagtctggcaagggaggaaagagaaaaccttttataaaagctcagtggtgtcgttcagtttagcatatgatagaataggtccactaacatcacctctgagagtgtgttgaattatagtgcagtattaagtatggcctattaaagaaatcatgacaaaatgcttaaaagtgttttaccagtgcctaggtacctggaaaactcagctgatagtactgtcagagggtttcatatagcccttttattatagagactggttatacatcagcaaacttttggtattttgtccaggaatctccacacttggagaagttgataagataaaagatcattctctttcaaagagaatgtttcatatatatatatatgtgtgtgtgtatatatgtgtgtgtatatataatata

SEQ ID NO: 1241697 - DNA, 4001 bp, Homo sapiens
aaactaatgtacaaaaagaagtggaagataacttactttcacgtttggaagtaacaatttgagaatagttttaccccacttgagtattttaagtgaaattcactgtatatcgccaaaaacagtggcaatccctacagagaataagccttttaaaatatgaaacagcacatgtggaaaaaagaaaaaacgtgaaacacttattttcaaacaacttagtctttgaaccttgagggctgtttcaaaatttgtgaagcataaacactagggaagatccgaaaggttttaaaaattatctgccaacttctctgcacctgttaaccaaattatgaacacccatttaagcaatcaaaaaaagctcatatgattccaactttgcaagatgtttatatagtaagctacacacaaaattctgcattactataaaaaagacaaccaacactggtgaacgaaaatcttcgcaagggaaagcgttttctcttagtgtagagttgccagatacagtgttgccaagcttcaacacgatcagaaacatgtagcaaaaagatgtttaaaaagaaaaacaaaaaaagcacagcaaaacgttcttcaaagtgtgaaaggtccaagaactttcttagctccaagcaaagtttcatgcctgctttacagatgggtgaactaaggcagcagatcggattaatcagtgtctttctcaaggtcactctagtgcaaaagaacagcacactccggactccctatctcaggtcctcgacctctccacactccagggcggcacagctcaaacacgcttggctctcctcgtacccaaaatgccaccaggcactcagagaaaggaaacatttcaagcgctctccggggagctcccgcaagactggggtacctggggcccgtcctcccccgaggtggccgccctccccagccgtccctctgttctcgtggagcgagcgccatgccccgcaagaaccagggaggcggcccagggccgtgggggctgcgagggtcccgccgcgcggggcttcacttaccgtcgctctcagccctgacaagcagggacatgcccttcagccgctccacgtagccagacgacacatgcccggtgccccggtcgtcccactgccggtcctcgttgagcgtgtacaccttcacccgccgccgggtgtcggtcatcgtgccgcccgggaaccggggcgggggccccgccagtagacgcccaggaaaggggccctggagaggcgaggggcgaggcgtgagggcgcccgcgagcggagggctccccggcctcactgccgccgctgggcgccgcggggccgcgccgccgcctgcatggcccgctccagggaccgagctctgggccgccgcctttcctcgcctccggctccccggcgctattgtccaggcctggcgagcccggcgcccggcagccccgagggggccgcgcagcgcttcgtagcctcccgccccgcagcgctaggaactcggggctcccgtcactgccctgctcccgcctccgccatgatctccgcgaagcagcttcccgcgccgccgccgcctcctcaggccgccgccgccgccgccatattttccttccttatacctggccctgccaccgcggccagtggctcccttccgctccccctgttttaaacgtcagaagccgacaggcgcctgatcctgctgcaactgctaccactgcccgggagactctgagggcccccggccgcccaagcgacccggactagtggaagtcggtttccctccgccgccgtctcttccgtcttcctcacacagccaaaaccgccgccatcttggttcgcccctcaaaagcggcgcgcggggccacccagggagcagctgcaggggcggctcgtagccccaccatttaaagagacagcagcgagaccgggagccttactgcggcggaggcttccgacggaggcgggaggcgggcgcggagttgccgaggtggcgggagcgcagggagcggaggaggcgggacgcagattgcgccggtgacagcccgaggctccctcccgcctccttgcacgcaccgtcgtgcgagcgctgggcggtgtgtgcgtccgtcgcgccctgtgttcgtcatcagccccgctccaggatgcacgaggggcgtggatacgtttgcggcctctgcccgcgggccccggcgcttcggcctcgcctccgcccgccgccaccttcccttgttcctgccccgtccctgcctctgcccctgcccctggcctgcggacgccgggcagcgtgggcctgggcccctacccgcttccgagagcgttttcccggggccgcctttatggctgagtcgggcgctcgggacccacccggcgccttgcggacttgagggaatgaaatggaaacgcttccggggaaggtcgcgggtgtgggcgcctaggtcggcgcagccttgggagccgccgtgggtcgcggactggcgtggccagtgtggaaacttgggactgtttgcgatttctgggcgtgggaccgagttccaagtgacaattctaaaacttcaccttacagcctaggcaagccccaagtgctccattccttcatccctatcagaactgtctgccagcctttcttgtcggaaaaggaacttaaggcgctcacaaaaacaaatgcgacactgtgtaatcgggaggagtaattctcagcattaggtagtcctgtgttttgaagacctacttgatgtcaagtattgttgatcttcacaaaggaatatcattctcgttcctatcatgcagctcatatgccaccattttggtggcttttaccatttgccaggccttgccaggtcgggcttgtccgctcggaatataatgcagccacacacataactttaaattttgcagtagccacaaaaagtacgaagaaactggtgaaattagtgttaacgttttagtgcggtattttcaaaagttatttcaataatcaaattactaatgagatatacgtacaatgtcttaaaaatgtgatatattttgtccttccagcaagtctctgttgggatactaaattttcatcagaaatatctacgtttagattttattgaaaaaaaattttttttgagacagggtctctctgtcacccatcctgaagtgcagtggctcagtctcagctcactgcagcttcaacctcctgggctgaagcgattctcccatctcagcctcccaagtagctgggaccacaggtgcgcagcaccactgccagttaattaattaaatttgttattatttttttttttcggtagagacgggtttcactgttgcccgggctggtagagtttattaaatttacagttgaaaatgtagattcacatattctgttattccaatcatacttaaaagttttccaaaagctgaatcaagtatcagtttttaaatttagctgggcgcggtggctcacgtggtcaaggagttcaagaccagcctggccaacatagtgaaaccccgtcttcaccaaaaatacaaaaaaattagccggtcatggtggtgtgcgcctgtagtcccagttactcgggaagctgaggcaggagaatccttgaacccgggaggcggaggttgcagtaagctgagattgtgccactgcattccagcctgggcaacaaagcgagactctgtctcaaaaaataaaataaaataacaatttaaatttaaaaattaagtaaaatgaaaaattcagcttgtgagttgcactagccaaaatttgaaggcctggtagccacatgtggctagtggctagttttggaaggttcgagtgcttgacattgccaggaatcttttaaacttgcaatgtggccgggcgcagtggctcacacctgtaatcccagcaccttgggaggctgaggcaggcggactgcttgaggccaggagttcgagaccagcctggccaacatggcaaaaccctgactctactaaaaatacagaaattagccaggtatggtggtgtgcgcttgtagtcccagctacttgactgtctgaggc

SEQ ID NO: 1241698 - DNA, 4001 bp, Homo sapiens
gcaaacaaacgagccccccaccatttgtctcagggcctctctcctttcgaccctcctgtgggcggccatccagatttcagtcggggtgctctggtctgcatctctgtcttgactgttcctaattattggagggaacgcatggctcgcctgacctcagagtttaagagctctgagtcctaatatcaaaccaagcagcttcatttaaaaggcatcctcatctgcatccataaaagtcactcctggagcccttacttgccccagctttgggaatgcctgctgtcgaggatttatgacacgccctggatctaatctgccacactttaactgctgctgttgcacatctggtcataaaagcaagggctggcccaacacggggacaaacacttttctttcctaaatggctgcaaatctgatctcacagtgatacctgggcttggatgtaatcaacccagcatctgggcagtcattaagacttgtcaagcattgcaagactttttctccacacgacagctataaagatgattctcatatagtaaaagctatgaataaacaacctgcaatctgaacaggtggtaaagggccaggcccaaggatgttcaagaaagaaagcacgagttggttgagccaaccttgttttcacaaagatcctagctactttcacatggactctcaggctgccagttaagagtcaattgccctgacataaactgatgcttggccagagattgcctggattaagtttggtcaaaagaaccactaggtcgtttaatagtacatgtttcaaggcagtgaaattctttattagaccaattggtggggggtgttgcggggataatctagaccagaaatgaacacaatactgtcggttccaggagattttacaatgccctggacaatctgtcctgtgcacagaattggcaggtttcatgtcgttcagaaactccaatcagaccaaggttcaacgagtaattcaacctcccagcactgaacccagggggagagacccctgaacattgcgcaactctcccctcccacctctttacagtaccccacctctgaccctcttccagtgcctgcccggcaggaggtgacattaaaattatctgctgtgggttttacgagcagtgatcgctttttaaaacaacaacacaaggtccttgtgtggctcgcgggtaacctaaaactctccaggcagagctgcacccgcccccgtcccaacccccgccgcctgccaacaactccagcgcgctggaccgggcgccagcgtgagaccacagggaagccctgcatgagcggagagcgagcttctctccgacgcaggaggcacctctgagggtcttgagcaaaatgcaggagagaagagattgggaaagaaaacccaccagtgacagttcggggacaggggagggatggtgggtcaagaaagggagagtggtggtggctccaatgggagaaaaaaaatatttcagcaacttcaccaagcccgcaggggacctggtagtagacagaggacaacaggtctctgacatctctcttccccctcctccttccctcagggatgaggggggaagcaacctcccctccctccgcaggtgggcgcaaagctgggggcgcacttaccctggggcctgtggtgcggtggccgcgagcaggggacagctgcaccaacaccagcagcaagtggggcgtgagcaggcgggcgcagcgcgcgggcagcatggtgccagccaggctgggcagccggcagcgagcggggttcgcgggctccgcggggcgcacagcgcgcctcccttccttccttcgctcggggccctcgcggcggcggggagcgggccgtggtcctgcggcgggggctcgcagaggctgcggtcaggggacacagtcatgaaccgcgcaggaggggagctggagcgcgagcgtgtgctctgcgcgcggcgctagctccgctcggcggggcccaggcggcagcaggttggacgcctgagcccgggccatgggaattcccgttataaacccccgggaggggcggggcggagcacggcgggcctgattgacgggccaagaggcctgttgaagccgaccctctggcaggtgaaagccaatgggagaggggcaagaggagccactcgtggtcaaccccccgccgaggagctccgcgggagtaggccccgggagagagtgggataaagagtaactttctcccggcactcctgcccgaggaagcctgagagagccccagcagccggcacccaccagaaggctcacctggctaataataatgccttaagcatgtatatttcttagctcaagctcgtgattgtcccaacatcctggtgaagtaggcagggaaaatactcctagccccatttatcagatgagaatgctgtgacacgaaggcgccgagagatctgcctccctgctgcatctgggaagagtaactgggaagtcgctggatgacccgcacagggtgggctgtggcgttggagtggggaatgggagcatccacttctttcaaagactctccctgggaggtgacatcctgagtctcacagcggctgccccgggagaagtcgcaagggacaaggtgaagcgtgtgctgggcattggccgctggggagggcctcttgggtacggtaaccccctacacacacacacacacacacacacacacacacacacacacacacacacacacacatctcccagccctatggtccgtatgatccaggattggaactcaggcatcctagcttccccctctgaactggagggcaaggggcagcctctctatagcccagcagctctggaagaggcgggcagagaggccctggtcccctgatgggagacaaggaggaaaagtatagatgaggaggcggcagtctgaggatgcagagatcccagagatggggtagaacaaggagaggagatctctcccgggtgcccgaccctcttggagaggacagctcagcggagcttcagtcagatgttggggggctctgcccagggccatccccggaaggccatcttgggaatggtcacagctgcatcacaccggctcctcaacagagcaaggtgctcagctgccttcagtgagactgacatctccaggaaatcacagggaagggggcgggggggcgcaaaatgaaacccagagcgatctccttatgtggagaacaacctttagtgcttacttccatcagtatgggctacttcgcagggagggattcttttctataatttgattgtaagcatcagtgccacactccccctccctatctggtctgagaggtcctaagattagctctgctccctcagggcttctctcctggattccatgaaacagcttcgcacctgactcctgaattcagttttgccctctctccacactggccccatccaacctccacacggcagccagtgtgtctattcgctatttagaagccagtgatccttttaagcagcaaaccggaactcaccattccctgcttaaacgacttcccctctccccattgccctctgacaagaaagctcagactggatgctggaacaataacaaagtacttgtggttctccaaacaaaaatgaagcgcacttctaaaagaatggtctatcttttcctccactgggaatgagtgctttggtcagacagactctggagctgtacagcagggttcaaatcctgagtctgccacctagtggtataagcttgaagaagtcacttgactcatccagggtcccgtttttctctctgtaaaatggggataaaaatagtatcccctgccatgagatgttgtcaaaagtaaaggagatggagtctttaaagcccttaaaataattaagtgaaaagtatcacaatatggcatttgaagaggacaggacaaatgcctcatctcattttatcctcagaacaatcttctgaaataggtcagacattcctactttacaggtagataagtgaatactccatgagattgtgacttgcctggcctcatttggctggc

SEQ ID NO: 1241699 - DNA, 4001 bp, Homo sapiens
tacactgacagagagaaaatgagtttttacattttgttcagaaaaagttttaatcataaggtttaactcattcagaaaatcagttatttcgcctttttaatattatatgtactatggtaataaaaatagattcatccagtcactgtcctcacagaggtcagtctagtcaaaggaaaattttaaaacggtagtaataatgaacatttgaccagcctggccaacatggtgaaatcccgtctctactaaaaatacaaaaattagccaggcttggtggcacaagccgtagtcccagctactcgggaggctgaggcaggagaatctcttgaacccgggaggtggaggttgcagtgataggagatcgcaccattacactccagcctgggtgacagagcaagactatgtctcaagaaaaaaaaataataataatgaacatttattgagcacttagaatgtatttctgatatatcagctcatttaatcttcacaactactatgaggtttatcattgcctctattttacagatatggaaactcaagtaacttgccccaagtcatagcggaccctgcaatcaaatgcagccaattgggttccataacctatgcccttaacaatcccacactgccttttcaactataccattacaacaaaatgtggaaagcggtgacataaaataaaaacagggtgctatgcggggaaaaaacatgaacagcgtactcagtctagaagagcaaaaaagacttcccccgaggatgtcatttgagcttaaccctgagtgaagaataaggtggacaaaacaagagagttgcggtggaaactccaggattaggaaaagcctgtagagggcccaaagaaaaaaaaaaaaaaaaaaaagcagctgctggagcaagaaagtgagtgcatggaggggactggcaggcgaagctggagagataggcaaaggccagtgaggaatggtcttggcaagtcagagaattcaagcgttatcccaaaggcaatgggcaccactacagagtaataagtcggggagtgacataatcaaatttgcacttttgaaaaacaacttttgggccgggcgcggtggctcactcctgtaatcctagcgctttgggaggccgaggcgggcgggtcacgagatcaggagttcgaggccagtctggccaacatagtaaaaccccgtctctactaaaaatacaaaaaattaaccgggcgtggtgccgggcacctgtaatcccagctactccggaggttgaggcaagagaatcacttgaacctgagaggcgaagggttgcactgagccgcgaacgcgccattgcactccagcctgggcgacaaaaggagactccgtctcaaaaaaaaaaaaaaaaaaaaaaaaaaagacaactttggttgttggaggaaaaattaattcaatcttgaagggttttgtctttgcttgtgtgtttttaaacatcaggtcctagaacaagactggggaagggcaaatgatagtggcctggctcagggtggagatgggagagaggagtttagaagggaggccaggcagagacgcatatttgggaggaggccgcaacaaccatcagggcacaatgaaatagagcagggaaagcgcgttgcctgagcacaggggaaggtccaggagtcatggaggcaaccttcggtgactgccgctcttctcagcccttcacaagtgcaatatcgccgggaaggaggcaactttctacaccacctgcgggcagggagaggcgggtggtggacaagaaacacccaccagaagatagtcccgaacttcatgtttctccagagctccgtgaagtcctcgaagcgtacactgtccgtctcctggaagcggctgagcagcgcctcgcagtcggtctgcaggccgggaggagtccccatggcacccgaagcccgcacgcctccgaagcccgcacgcctctaacggactagccagcggtggtcgcccaggaaaccaagcccgaacggcccgccccctacggcgtgcgcacacgcgctccgtgatgcattatccggcacctttagctccgcctttatccgggctcttgccaccggtcgtgtgcttactgcgcgtgcgtgaaagcgttctgatgttttactggctgagattgctttcacccagagtgctgagatccacccttctttggaagaggtttacgtctaaagtgttgtgtttgctcacgagcggttttaggtcttcattttccgctaggttatgtaacttgactttacccttactagcactctcctttaaactgaccctagtgtgacataagtgaacttttgagctaggaaagaacagtcccaaccccaaccccactcccacttgggaagagaagctaaagaaggcttgctaggaaacaaactgcactcattctccttctggtcatcgagaaccctaatactctgtacccacataatacgatgcttaatgtgcggccctctctttgtagccctggcattctgcaaccactcttgaaaagaagagctgcatttcataccctcttgtaaacagccctcctcctgccctgccacgcattcacccctgtgctacatagcacttagcagaaaatacctacttgttatattcttgttatattattatttggatgaattgcctttttgtgtacacgctgccacctagcttccttcctccaggagctagctatggagtaacattttgaactttagatcatttctctgattgaaaggtaagctatcattctttagaagaggtatcctgatataatagaaaaacattgggctttctgtgtgtaaatggagtgtcaactcactttacttttctgatccttgacctgtttttgtttgtttgtttgtttgtttggatttgtttgttttttgttttgagacggagtttcgctcttgttgcccaggccggagttcagtggcgcggtctcggttcactgcaacttccgcctcccgagttcaagcgattctcctgcctcagcctcccgagtagctgggattacaggcatgcaccactccaaccggattttgttttgttttgttttgtttgtatttttagtagagacagggtttcaccatgttggccaggctggtctcgaactgctaacctcaggtgatccgctcccctcggcctcccaaagtgttgggattacagacgtgagccactgcaccctgccctcttgacctgttttttaaatgttatgtaatattttatgtcacagaaaaatttatgcgatgtgtgagataaaaagcatagcagttaaacacctgtacacctttcacctgtgtaggaaccagaacattaccaacgccttcacatcaatctgcgatttcctcctctgacctattcctttgactgtaccctactttaatcacagctactggttgggcacggtggctcacgcctgaaatcccaacactttgggagacaaaagcaagaggattgcttaagcacaagagttggagaccagcctgggaaacatggtgaaaattagccgggcatggtggtgcacacctgtagtcccagctactcgggaggctgaggtgggaggatcatttgagcctgggagatggtggttacaggagacagaggttgcagtggtgagccgagatcgtgccactgcactccatcctgggctacggagtgagaccgaatctcaaaaaataaataaataactaccttgaattttgtttctctttctcatgtatatattttatcacatatgtatgtatatttaaacggtatattttttagttgtggttggttttgagttttatgaaaatggtattgcaactggctgggcgcagtggctcacgcctgtaatcccagcaatttgggaggctgaggtgggtggatcaccaggtcaagagttcgagaccagcgtgaccaaaatagtgaaaccccgtctctaataaaaacacaaaaattagctaggcgtagtggcgtgtgcctgtaatcccagctacttgggaggctggggcaggagaaccacttgaa

SEQ ID NO: 1241700 - DNA, 4001 bp, Homo sapiens
gtcctcaagactggccatttaaagatcgcattctgccactgcaattttaagcacgcaatacccatgacaggccagatgatgtggtggctcacgccagtaatgccagcactgtgggaggctgagatgggtagatcagatcagttaagcccagttcaagaccaggctgggcaacatggcaaaaccccatctctactaaaaaaaacaaaaattaactgggcatcatggcaagcgtctagagtcccagctactctagggcgctgaggcaggaggatcacctgagccttgggaggttgaggctgcagtgggctgtgattgggccactgcactccagcctgggcaagagtgagaccctatatcaaaaaataaaataaataaaaaatacccatgacatctctagaaatttttcctgtgtgtccatttcaaattccaccttttccacaaagtctcccctcataactttactagtctatgacacagtgtctcacacctggggagcactcaaatgtttgctgcctgtaacatttactaaacaaactcttggctgggcatggtagctcatgcctgcaatcccagcactttgggaggcctaggtgagaagattgatggaggccaagagttggagaccactctggccaacgcagtaacaccctatttctagtttttttttaaaaaaatttcagatgccgggcatggtggctcatgcctgtaatcctagcactttcggaggccgagacaggaggactgcttgaggccaagaattcaagaccaacctggccaacacagcgagaccgcatctcaaaaaataaagttaaaaaaaaaagcaaaaaaattttagaaacgagggtggggagaaaactctccagcccacataacttattccattcaattctttttgcactaaggttagtattacacaaatgcacattttgtgttctgtaattgttttatgtctgtataccttgcacccctatcttccctgttgccaaagacagattttcttctgtgtacacaacccccaggacagagcaaggcaccaacagtaattcccaaaataattttttgattaaaacttttggagtcatactgtcatcagccagaaaaaaaaacatgcgtgaggagaatgaagggtgttaaaagagctcaagctgatgtcctgaaaggattactttatctataaccttcctgaacactagccttttcctgttgagttcgcatggaaagtttttccacttaaaatggggcagcaaggctgggaactagtaggagtagcgtaacttctcggactctcccactgaaaagcatctttttcttaaaggcggagagcactttacagacggttactaaggtaaccggaaacagcaaaactgaggtggttctatctacggaagaaattctaagctccaaagttaaaatgcggagcagtggcgcatatcagcagacggcggtcactactgtggctcatttaaatctgtgttcagctccgggcctcttttttcaggaatccttgtttcgggacacccagtggacagcgaaaggagagagaccaccacaggcaaacggccggaaagccgcgcagtcgcagcccgcgcgcttcactccgcccaaataagccactaccgtcaccaaccccatctcgttcgcccgagccgcggacctgagggagcgctgtccgctccccgcaagatgctcacgcgaaaaacccactcttcagtgtctgagaccactccgcagctttcggcctcggtgagcgggtgaactaaacccgggaaaccgctgaaagaccccagcttcgactaggcctagtcgtagcggcggccagcgggagggcgtagccgtagtcttggcccacgtcattctgtgccccgggtcaggtcaccgcccggagggtatgggaagagaaatgaagaagactggtactcccagacccttccgtatcgaggaccccaatcaacaacccacctggtgagcgccatcttcttccgcttcttccagcgcgagcgacagcaccgctgggcgggtctttccagatgatgaggagcggaaaggaaggagtgcgcgatgcgcaggcgctctggccgaaaaggccttctgggatttgtagttctttgaacaggagtaccgtttgtattctgaccagaccaagcggttatcaaggaataatctcttcagctagcaacaaatgcataactcgatcgcttatatgcgacatgatagggcgttccctaggcaaaatatcaaagatacagggagatgccttttaggccgctttattacgttccttactcagtcccgttccccgagaaggggtacaaaatacaaaagcttcccggggacagctactttaagtaagagtgatagggcgtttaaaacgacaggtaataatgagactagctaatggagagtccttggactctctgaaaacattcacactcaaaacttttctttaaaccatatcctctcacccgccaaaacactctcttggggagatatttcgtaatccttggtaatttaccgagtgtctgggttctctgcccagggtatgacaaggctgaaatctcataggaggctctggagaaaaatccatctcctaactcattcttgttggcaaaaatcagttcctggcggttgtgggatcgagttccctgttttgttttgtgctgttagtggtggccaccctcagctcctaggggtcactctcgagtccttcccacatgagccctatttattggtagttcacaacatggatatttgctttctgaggcacatctttctgactcctcttctgccactgttggagaaaaatgccctgcttttaaagggctcatgtgattagatcaggagcacctggataatctccctattttaagatcaactcttggccgggcgcagtagctcacacttgtaatcctagcactttgggaggtcggggcgggcggattgcctgagctcaggagttcgacaaagcctgggcaacatggtgaaaccctgtctctactaaaaatacaaaaattagctgggcgttgtggcgcgctcctgtagtcctagctactggggaggctgaggcaggagaatcgtgtgaatcaggagacggaggttgcagtgagccaagatcacgccactgcactccagcctggcgacagagtgagactgcgtctcaaaaaataaaaataaataaataaataaataaataaataatataaaagaatagctgggtgtggtgatgtgctcttgttttctcagctacttgggaggctgaggtacaagaatcgcttgaacccaggaggtggaggttgcagtgagccgagattgcaccattgcactccagcgtgggtgacaaagtaaaattctgtctcaaaaaaaaaaaaaaaatcaactctgccacaccgcataacagaatcagaatcttcatagtcatggccccaggggttatgtaggtcaggtactgtgggggttgggtgaggaggagatcttgggggatatcctagaattctgcctgccacagcatgtaaaccaaaaaaacaaaaagaaaaaatcttttggtaaatacaggattgttaatcacattgtgtaatataacctgcatggcctgggagcccgaagattagagtttaagatgtagctttggctgggtgtggtggcttgtgcctttaatcccagcactttgggaggctgaggcgggcagatcacctgaggtcgggagtttgagaccagcctgaccaacatggagaaactgcgtctctactgaaaatacaaaattagccgggcgtggtggtgcttgcctgtaatcccagctactcgggaggccgaggcaggagaatcgcttgaactcgggaggcggaagttgtggtgagccgagatcgtgcgtcgttgcactctagcctgagcaacaagagtgaaactgtctcagaaaaaaaaaaaaaaaaaaaaaagatgtagcttcagcaccaataaattcttatagggcaagtcatttaatttatttgggccccagttttattgaa

SEQ ID NO: 1241701 - DNA, 4001 bp, Homo sapiens
acttaggcccaggagtttgacactggcctgggcaacatggtgagaccctgtctctataaaaacaaacaggccgggcgtggtggctcacgcctataatcccagcactttgggaggccggggtgggtagatcacgaggtctggaaatcgagaccatcctggctaacatgatgaaaccccgtctctactaaaaatacaaaaaattagccgggcgtggtggcgggcgcctgtagtcccagctactcgggaggctgaggcaggagaatggcgtgaacccgggaggcggagcttgcagtgagccaagatagcgctactgcactccagtctgggtgacagagcaagactccgtctcaaaaagccaacaaacaaaaacccagctaggcatggtggcccgtgccagtagtcccagctacttgggaggctgaggtgggaggatcacttaagcccaggaggtcaaggctgcagtgagctataaccatgccactgcactccagcctgggcaacaaagggagatactgtctcataaaaccaaataaataaataaaagttttataaaagtcatcagttcatactaactacctcatctgttattacaaacagcaataacatcccacaatattttatcacctaccaaatatgcactaacagatgtctctctcacattaaaacggataagaaaaagcaaaagggaaaactgaagtgcaggctgtgaaatgtgaaggaaccatggaaccttgctgaatggtaattatcatatatcaacattttccaagtgctcacttgtacaagggactataaagattaccacccttcagccaaggaaaaagggggtggagagtggggtgggagggaggaatcagagcccggaaggctctttctgaagtagaatgcaactaacctcagaacaccaagggcagaatggaggttatcaaaggcctggcggagtgtgtatgtggggggtgagtgggtggagcgtcgatgttggtcaaagggtacatacttgaaatttgcttagatctcaaatgttctcacacaaaaaaaaatggtaactaggtgaggtgatggatatgtcaggttgattttggtactcatttcacaatgtattcgtgtattaaaatataatgtataccttaagtatatacaattatcaacagtatttgtcaatatacctcaaagaagctaagggggaataaaacaccaaggaaatcctgccaaagacaggatttgttggatattagaaaaagtaaagataccatgggctacctgcactttgcataatctagtagggcactggacaggagttgattcggctactataaaaatccttgcaaaatggtaatgtagactacacctgtactatttgagagagacagaagggtgggcgggagcaagttcgagatgtccacaccgggtgaaaattgagggtgccgctgggaaggtccgagaatgggttttcatggccccaaagtgtcgagggagggtgggggcgttccatctcccgcctccatttccacttcgccacctgcaccccgccccgcgtgggagtggaggtccaccagaaggcccgaacagcggcgggggacaagaaagcggccgcgggtccccgggaatcggagccgagcggcccctagggaggaagggctgcgggagggtggggcgcggtgcagcgaggaaaccgaaaggaggactacggggagggagtgccgcgcggctggggacccatccccgtaccacacccggggacccaggatggggaaggagggtccagggtcccgcgagcgaaaggaaggcagaacttactccgcggtcctcttctgagaggaagtccgggccgtcgtccaggccttcctgtggggtcggcgggcacggcgcgccggggaaaaggatgagatgggggagacacaaagggagacattagtgacaggctggcgcggtccccgcgcccgccccgcgcccgctgcccccaccgcgctcccgggactcggcgccgcggagaacacccaccatcatggctgctccgaggcgagggccggcgcaggcgcgcatctccctgctgccggagggagccggcggccaggagcggggcggggcggggcggaggcgaaggggcggggcctaaggacggcccgccccgtccccggcgctggtcgctcgagtccgtgagcgaggaaggttaacagggccttctgcccaaggtcaaggcaccgaagtcgggagagcctgaagacccagacctcatggctgggggcacctcgcagctggcgggctctgaccagggaagggccaaaggccacccagggagctctccagttcccctgccccgagggctccagcgaaaaacgatgcaggcgccctccggaagccataatacatcatctggtctttgtattatgccacacgataattaatcacaattaatatcattttgcctatggaagttgctggaaacaaggaccttcacacagtcggtaatcagggactataatcaagcttttaccgctggcgaggtaataactacctcagagtttggggcactaatggttgcgaactataaaaatgagctgttttcattacaaaaatattcctttcctttgttagaagaaatttccccacacctactctaactgtccaggtggttagcatcacacgggatccacaggcatttcaaataacgggagaaaatcatacttaatcctagaatctacacgttcctgagcttgcattcagttaaggaaaggcatcttcagatgttcagaccagaaacccttaacccattgaaatccgtactctaggggccgggcgctgtggctcacgtctctaattccagcactttgggaggccaaggcgggcggatcacctgaggtcaggagtttgagaccatcctggctaacatggtgaaaccccgtctctactaaaaatacaaaaattagccgggcgtggtggcgcgtgcctgtaatctcagctacttgggaggctgaagcaaaagaatcgcttgaacctggaaggcagaggttgcagtgagccgagattgcaccactgcactccagcctgggcaacagagcaagactctgtctcaaaaaaagaaagaaataaatccttatctcccttactcctcatatccaaccaaatcctatggcttctacaattgattgtccttcatacctcttttttttttttttttgagacagagtctcgctctgtcgcccaggctggagtgcagtggtgcgatctcggctcactgtaagctccacctccagggttcacgccattctcctgcctcagcctcccgagtagctgggactacaggtgtgtgccaccacacccggctaatttttttgtatttttagtaggacaggatttcaccatgttagccaggaaggtcttgatctcctgacctcatgatccgcccgcctcgacctcccaaagtgctgggattacaggtgtgagccactgcgcccagcccatacctctttaattagtccaatttttccagttctcacagcaattaccatcaactctcgtctacacctttgcaatactctcctgactccactattttccatcactttatcctattttacacactgctgccagttttcctcctaaaacacagatattgatgattatgctactaccctgttcagtaatctttacaagcccccattacataacgattcaattcctcagcctacgatttcaagccttctacatttgaatccctctctactctgccaggccctccatcctattttattgaagtgaagctctcaaaacaatattaaacttaactgatattttggccggacgcagtggctcacacctgtaatcccagcactttgggaggccaaggggggcagatcatctgaggtcaggagttcaagacgagcctggccaacatggtgaaacctcatctctactaaaaatacaaaaattagctgggtgaggtggtgcgcacctgtaatcccagctactcgggaggccaaggcaggagaattgcttgaact

SEQ ID NO: 1241702 - DNA, 4001 bp, Homo sapiens
ctctataaaaacaaacaggccgggcgtggtggctcacgcctataatcccagcactttgggaggccggggtgggtagatcacgaggtctggaaatcgagaccatcctggctaacatgatgaaaccccgtctctactaaaaatacaaaaaattagccgggcgtggtggcgggcgcctgtagtcccagctactcgggaggctgaggcaggagaatggcgtgaacccgggaggcggagcttgcagtgagccaagatagcgctactgcactccagtctgggtgacagagcaagactccgtctcaaaaagccaacaaacaaaaacccagctaggcatggtggcccgtgccagtagtcccagctacttgggaggctgaggtgggaggatcacttaagcccaggaggtcaaggctgcagtgagctataaccatgccactgcactccagcctgggcaacaaagggagatactgtctcataaaaccaaataaataaataaaagttttataaaagtcatcagttcatactaactacctcatctgttattacaaacagcaataacatcccacaatattttatcacctaccaaatatgcactaacagatgtctctctcacattaaaacggataagaaaaagcaaaagggaaaactgaagtgcaggctgtgaaatgtgaaggaaccatggaaccttgctgaatggtaattatcatatatcaacattttccaagtgctcacttgtacaagggactataaagattaccacccttcagccaaggaaaaagggggtggagagtggggtgggagggaggaatcagagcccggaaggctctttctgaagtagaatgcaactaacctcagaacaccaagggcagaatggaggttatcaaaggcctggcggagtgtgtatgtggggggtgagtgggtggagcgtcgatgttggtcaaagggtacatacttgaaatttgcttagatctcaaatgttctcacacaaaaaaaaatggtaactaggtgaggtgatggatatgtcaggttgattttggtactcatttcacaatgtattcgtgtattaaaatataatgtataccttaagtatatacaattatcaacagtatttgtcaatatacctcaaagaagctaagggggaataaaacaccaaggaaatcctgccaaagacaggatttgttggatattagaaaaagtaaagataccatgggctacctgcactttgcataatctagtagggcactggacaggagttgattcggctactataaaaatccttgcaaaatggtaatgtagactacacctgtactatttgagagagacagaagggtgggcgggagcaagttcgagatgtccacaccgggtgaaaattgagggtgccgctgggaaggtccgagaatgggttttcatggccccaaagtgtcgagggagggtgggggcgttccatctcccgcctccatttccacttcgccacctgcaccccgccccgcgtgggagtggaggtccaccagaaggcccgaacagcggcgggggacaagaaagcggccgcgggtccccgggaatcggagccgagcggcccctagggaggaagggctgcgggagggtggggcgcggtgcagcgaggaaaccgaaaggaggactacggggagggagtgccgcgcggctggggacccatccccgtaccacacccggggacccaggatggggaaggagggtccagggtcccgcgagcgaaaggaaggcagaacttactccgcggtcctcttctgagaggaagtccgggccgtcgtccaggccttcctgtggggtcggcgggcacggcgcgccggggaaaaggatgagatgggggagacacaaagggagacattagtgacaggctggcgcggtccccgcgcccgccccgcgcccgctgcccccaccgcgctcccgggactcggcgccgcggagaacacccaccatcatggctgctccgaggcgagggccggcgcaggcgcgcatctccctgctgccggagggagccggcggccaggagcggggcggggcggggcggaggcgaaggggcggggcctaaggacggcccgccccgtccccggcgctggtcgctcgagtccgtgagcgaggaaggttaacagggccttctgcccaaggtcaaggcaccgaagtcgggagagcctgaagacccagacctcatggctgggggcacctcgcagctggcgggctctgaccagggaagggccaaaggccacccagggagctctccagttcccctgccccgagggctccagcgaaaaacgatgcaggcgccctccggaagccataatacatcatctggtctttgtattatgccacacgataattaatcacaattaatatcattttgcctatggaagttgctggaaacaaggaccttcacacagtcggtaatcagggactataatcaagcttttaccgctggcgaggtaataactacctcagagtttggggcactaatggttgcgaactataaaaatgagctgttttcattacaaaaatattcctttcctttgttagaagaaatttccccacacctactctaactgtccaggtggttagcatcacacgggatccacaggcatttcaaataacgggagaaaatcatacttaatcctagaatctacacgttcctgagcttgcattcagttaaggaaaggcatcttcagatgttcagaccagaaacccttaacccattgaaatccgtactctaggggccgggcgctgtggctcacgtctctaattccagcactttgggaggccaaggcgggcggatcacctgaggtcaggagtttgagaccatcctggctaacatggtgaaaccccgtctctactaaaaatacaaaaattagccgggcgtggtggcgcgtgcctgtaatctcagctacttgggaggctgaagcaaaagaatcgcttgaacctggaaggcagaggttgcagtgagccgagattgcaccactgcactccagcctgggcaacagagcaagactctgtctcaaaaaaagaaagaaataaatccttatctcccttactcctcatatccaaccaaatcctatggcttctacaattgattgtccttcatacctcttttttttttttttttgagacagagtctcgctctgtcgcccaggctggagtgcagtggtgcgatctcggctcactgtaagctccacctccagggttcacgccattctcctgcctcagcctcccgagtagctgggactacaggtgtgtgccaccacacccggctaatttttttgtatttttagtaggacaggatttcaccatgttagccaggaaggtcttgatctcctgacctcatgatccgcccgcctcgacctcccaaagtgctgggattacaggtgtgagccactgcgcccagcccatacctctttaattagtccaatttttccagttctcacagcaattaccatcaactctcgtctacacctttgcaatactctcctgactccactattttccatcactttatcctattttacacactgctgccagttttcctcctaaaacacagatattgatgattatgctactaccctgttcagtaatctttacaagcccccattacataacgattcaattcctcagcctacgatttcaagccttctacatttgaatccctctctactctgccaggccctccatcctattttattgaagtgaagctctcaaaacaatattaaacttaactgatattttggccggacgcagtggctcacacctgtaatcccagcactttgggaggccaaggggggcagatcatctgaggtcaggagttcaagacgagcctggccaacatggtgaaacctcatctctactaaaaatacaaaaattagctgggtgaggtggtgcgcacctgtaatcccagctactcgggaggccaaggcaggagaattgcttgaactcgggaggcagaggttgcagtgagccaagatcatgccaccacactccagcct

SEQ ID NO: 1241703 - DNA, 4001 bp, Homo sapiens
tgtagccatttgactgaaacaaatggaattgtgaaaacatgatactagcaaaaacaagaatacattttttaatatttgaaaaatttactggataattatttaaacaaatcccactttaaacaaaaaacactaaatacccacccaaagcacccctttagtaacatgagatattaataacaattacttttatacatccatgagtatctcctatatactctaacaatgcgacggaggtaggtgtcatctccattttagagatgaggaattcgattttcagtaaaggaacatattcaaggtcacacaatgtgtcagttagaattaaaacccaggactgttaaactcggaggctcaagcttttaccatacatgcaaaatctgcaaagaaaattgttctttaacctatgaatcaaatggcttgattgataagagaaaatgacagatgtgtggacatcaatcatagtctcatgggtattacagatattatagtgaaggcattttgtagctataacttgttccaatttgcagattcttcttatgctgagctctgaatagtactaaccagaaatctcaccacgctttattcaacatagagacgaatattatgagagttcatcttgaactctatgtactctagccaatgatattgttacttgaacgaaaaaatttataagccagtctatccaaaaaacaaatgatctccaaaaaaaaaaaattaggtcactcagaaagcatcatctctggtaccactgctctttcgggagatcaacagtgggttatttttccacaaatcccaagttgtttttaagccaatcattcttcctcttcattcatatacaaacctcagcgtctagcaaggctatctggagctctagtactaaaaacaacgcctcacacaatgccacccacggtaagaacacgacggtttgcctgtgtgtttgcaacttttcacaatggaactagattgaaaaaaacaatagggaaacctcttcaacagaaaaacgtctcaggtaataaaataaatgtgattgatactggaaggtatcacaaaaacgcagaaaaattctcaaagataagtacaaatgaaagaatatcattctgaaggttttcatcacaggctgctgtaccaatatggagaatgaagatacaagaaaagcataaacttaaacttagtggccaagactttagcagatattgcatggatcaaatgtaagtgctcaaggctactaagttataactcttcttttggttataaatattcacttcagtaaactttaggtgggatctgaatagagaacacaagttactttcttcataacggatatatagagtcgcaaagaataagcattaattgagcattaattaattataccttcaggtaccaagagaaccaaccggaacagaaattaagtcattccttctttatctctacagaagcgacaaggtgagggcacgaaggatgccaagattagaggctctagaagatctcgccttcttttccagagaagatgctcaaagatctgtctgctaactgggccccaagaaagagaccggatccttttagggatccggatattgtttcctgggaggagagcctggagggcaggaacaagaccccggcctgcgaggccaggcagcggccacccttcccccactcacctcccggagcgcagcttaactggggttgtgcgagtaactgctgccatcaccatcgccatcagtctgggcgcttgcttaagtggagaggggaggcccaaccactcctgcacctcgtgtaggtcttacaaagcagatgcttttctgccacccccaaccccgcttcggcgttccggtcccaacccagccgtcacggtcatcgcctccgccggttccctgggcgccgccaccacttccgtgttcagctccctcccttcctccctgatttgcccgggcaaccggctaatttccacgcggagggcgccgcagctgacgccaccacccggcgacctctgtcgggacctgcgctgggcgtgggcgggtcggcgcaggcgcagtgtggtgagcgagccgaagcgcgggaagcagctcttgtggatcctcagtggcggaggctcggtcacccgggtgagtccccactccggctgcccgcgtccaccaaggagatgcgtgttccctttccggcttattgtctgacagaccctctgccttatcccgctggtgtcactcgggtgggggaaaccgggctgcggagaacgggccctagaggagactaagctctcttcctatccctagcctcgctgcttttctcttttgaaataataagactggcttttataaaacattttcagataggtaaaggaaaacatgcctgccacacggaagccaatgagatatgggcatacagagggacacacggaggtctgttttgatgattctgggaggtaaggttctttgagaaacaacgttttaggtgcaaatgttaaaacatttatccttaaactttatatgtgcagtcagctaaaaatgactcatgcggatagaggaataatgttgaaatctaaaatggcacacatatttctttagattattgtttgattcgggccgtcatggtagttgtagtatatcgacaaagttataatcgtacttccagaggagttggaaagatgcgagcttctctccatatattttccccttccctgcatcttacattattaattttgtcagatcactagttactgcctacttgtcaaattcagtggcctgttctgtttggaatgatatccttccatgcctttagtgatgctatttccctttttgcttatttttttttaactttttgacggcttaaaacaattttttcctctgattcctaaactataatattttcctacggttattctggtcccttttatctttccaagtcccattcttacgcactactgctcgattgcacggcttccactgtcgcttctatgttgattgattcattgaaaaaatacttgtgtgtctcttttgctggggactacagatagaatagagcgaaccagacacagtcttttcctcctttgagcttaaggtctttttggattgacaggcattgaacacaaattaatcacaaaaataaatgtgtatttagaaacaagtaatatgtgcagtgataaacatgtatgaggagaagctcatctagttaaaggagtcagggaaggcttctttggacaagtgtttcttgagacgccatctgaagacggagcaggcattaagcagtataaagagatgagtggtggtggcggtggggtggtgatgttggcatagtaagcagaggcaatactgtgtgtaaaggcccaatggggccagggatcatggtatgctcaaagaactgaaggaaaactagccttactaaaatgtggagagtgatgcagagtttagtgagagatgaatctgtgaagttaggcaatggatgtcctatccaagaccttctggactttattaaggaatctcgttttatcctaaaagcactgagaaggtattaaaggcttgaagcagagagatgtgatcaggtttgtttttgagaaaatgcatggaggatgaattggaaaaggagcactcatggatgcagaaagactgttagaagatacctgtattagtttgtgtaggggcgggttgcccctccacacttgtgggtgtttctcgtaaggtggaacgagagacttaggaaagaaaaagacacagagactaagtatagagaaagaaataaggggacccggggaaccagcgttcagcatatggaggatcccgccagcctctgagttcccttagtatttattcatcatttgtgggtgtttctcgaagagggggatgtgtcagggtcacaagacaattgtggggagagggtcagcagacaaacacgtgaacaaaggtctttgcatcatagacaatgtaaaggattaagcgctgtgcttttagatatgcatacacataaacatctcaatgctttacaaagcagtattgctgcccgcaggtcccacc

SEQ ID NO: 1241704 - DNA, 4001 bp, Homo sapiens
taacatagtatctacaaggcacctgagttccaggaaaacaagcacaatataaatgcaaagtaatagcaccaaagcaatggactaggattggatgctaatcttggcttctccagcctaacttgaaaaaaaaaaaaaaaaatctgggtctggtgcgaggtggtttatgcctgtaatcccaacagtttggaaggcagaggtgggcggactgcttgaggccagaagttcaagaccagcctgggcaacatagcataaccctgtctctatttgaagaaaaagaaaacataaatctgtttctggacataaaggattattagaatcaaagctacctattgaacaagttatgcaacacacacccaaatactatttgctaccagaaagttataaatgggtatatacctgcgtcacattgccaacaatataggcctacctgattactgcactcacacttgtctgtggtcaaagggctaattactatctaggcatttccccctttgcttttaattcaggccagagttcattttcaccactcagcacacttttcatttctttccctctccttacagaattgggctgcacatggaagtaaggtcaatttaatactttagcacttggtataccaatggaataactgtctagctgccactagtcatttctgccaggttctttaaaaagatacgacttagtgtttgccctgaggaaagcaatacttccttgtaagaattatgaaaataagggaaaatctgcaactctcatcgcatgaggaaaatgtctttaactttaaaatacactacttcctttcatttatagaaatttaatgtctgaggatatattttccaagtatagtcttttaaattaatctttattttttccttattttagaatgtattcttggttattttgcacaaaaggcagaagagactaagtctgcattaacggcaaagaaagaaagcccctgctcaacaggcatgacagctgatcacgcacctattcacagtctttaaatgtcttgatcttacagaaggatttattataaaaatgatcgtatggttactacctaaattcacagaggaagaccgccaccatctacaggaaagatgcaccctagcaatgcacccaaacatgaaagactgatttgcaggagttgcccctttcttgttccttaaaatgatttcaagtcctaaatcgcaatttggtcgtgaagacactgaagacactgaccaaattttctaagggtaatctcttgtaaacaggtaagacaccgtttgcaggaagtgggaaggcgctttaaatttaccttgagaactgtaaaatgaataagaatattatgactcactgacatttcacacatgtgaaacatccatattacaaaaaaccattgcctcataagtggatacccttgacaagcaaaccgcctagggggaacactcccaaagaacttaattaaaagtaattacccggcctgaaaatgtgcttttgttttagaaactgtctaaataccagcgggactttctcttgcccgattccagcctgaggacaacaaattggtcaacggcggaagttgcctgacgaaatgactgcaacatgaaatccagttttatgatcataacaaaaccttccttccgggaccaggcaaaaaaaaaaaacttgagaaacgtccttcagaatgcaacaggcaattgtgagccccccattgccagccaacgagaaacggctcggccccggggactcgagccctgtgggagggacgacctgctccccgttagaagctcggggggccacgggccacccgccggccgccccgcccctagcactgaccttccgcagggccgagaccaacagtccccgccatttcggactgttctcctcgctgaagaactcgtaaggctgcggcgcctgctgcatggccccggcgacagcgcctccgcatcgggggcagcccgcgggccgggccggtggcctgacaggcagggcgcgggccgcctcgcctcgccggcggccgccgcctcccgcccgggccgaggctacggccgaggcggctcggaggcggcgccggcgggctggcggagaccccggggtcggcttcctccgccgaggcggccctcgcctcccgcagcgcccgcagaggaagcgcggcgacccgcaagcccgggcgaccccgggcggcgacctcctttcccggcggcgctggcccgcttctggggcggctcctcctcctttgtctgggttcgcggcccgtcaggggtacagctggcccagccccgccccgactcccgctacggccgcggcgggcggtgagcagcggcggcggcggcggcggctgctcgtctcctcatcgcctcctccccgccctcccagccgacagcgccgcccggccctgcccactcgagtcacctccacagagctctggggaccgacccggagtgcgcgtcgggcgagcgagcctcgctatggcgcgcacagcgctggccgccgttgctgcccctttagcagcagcgcagagtgccttggggtcgccgctgagccctgagtcccagcagccgaggctcggcccgccccctcggcccggcgctcattatcccgaatagcccaagaggcctaacacggagcatgcgcgccgcggagcaggcacaggcgccagcccggcgcgggggtgcggggcctggggccccgggggagtccgcttttcccgagactgtgctgggggccgctccagactcttcagtttgactgctttttacccatatgctccctcctctcgacctgcttaagacaatccggactcggtgccactcttgtagcgctggagccccaggactaccgtcgtgggaggctgcatagggacgtggagagaaaggggcattcgggctggacaggatatttaacgtatttgtgctctacgtggcttgttttcatgagtaccgtatgtttacacaaagtaggtactatatataatatatcgttaggagatacagtaactatttcttagggtgatggtgtggggaccgagagatgaggcgtggaaagcccttagcctggtggtagggtcagaaggggcagatgacagtgacgttgatcaagcttgaattgaaaggtccttcacttgcacgggcccctgtgcgttcacaaaatcatatcgtttttacaaaactttcaagatattttcgaattgttttcttaatcgtgtcatccaaattgtgtaggcttcaggtcctacaaaacctggatcggcgtctaggaaacactcattagcaacccagaaaagatcctgacaagcttttcaatccaaagaggcataggctctggtaactcattaccacaaatttcatcccactaaagaggctgagcacattacttttaacaggttgtaaagaagatattttactccctgtccctagccaccagcagtgagaaagggaaaagacgaacagggtacaaaaaataagtcagtactacaattcagttccggcatcagtagctgagcaattattctccccaaaacatgcaccactttttcatttgggcaaaatcagaatggcagagttggaaaataagattatttttctaatccactaaagtatccactaaatcaagaacatcctctaataaatggccatatccattcacatgtacttgggataaaaggtgggatggtaaaatgcttgtatttctcccattaatgtttcagtctgtgagagcgaagactttggcttatatagagggtccttacttttctctcctgttcccagactccagctataaactactgtgatgtcaaactactagaccatgtatgttctctttactcataggagagtaaacttgttagaaatctcattcttggctaggaatatcagaaggcttttctgggccaagtcaggcctgaagacatattttgtttagctaaggctgtatttaaatttaattgttaacattttaaaatcaagaggcttcatataaaaatgtatattttcagcttctcttgacaaagatctggcaacact

SEQ ID NO: 1241705 - DNA, 4001 bp, Homo sapiens
gaaggcttgccttacaaaagaatgtctaaaacgtgattacagtaagagcatgacaaaagataatttttctttagatgttttaatattttatgctctgaaataactaaaagcacctcctaatgaaatctaagaaatttattctcaattattttagctgtgtctaaaattatttatggtttcctattaatttacagtacatgaaagctgactgccctggttatttggtgattacatttattttaaaaattcaaaataacagtatttgacattatcatatattatttcctaaaaatgaagctaattaaattgtgcaagttgtaaaaatataaacctttttacatttggcatgaacccaatttttaaaataattcaataaacaaatactgacaacttactaaatctaccatactctaaatgttacatttatcctttccccctgcccatccctaccatgggatagtaagtaaatgcattggcttcagatttatattcttcacctagattcaaatcctgttctgccgctgtgatcttggcaagttatttgtgatcttttgctttagtttcttcactatgaaataaggctaatgcctatcaaggtatttttgtacattaaatgagataatttggaaatagttcctagtacatagcaagggtttaatgttagtttatatgcaaaatttcttaagatcataaagcgttttgatttgctttttctgaaacctaggttggtgaagtgtcagaatagtttgctgatcaatgaatagttatctcctacattcggagtagcacttattttgatcaatgactatataataaaggcagactcattcaaagaaagacatcaaggaatcatctagcagcttggtttaaaggcagtcttttaaatagataaaaacactgaattgggaggggcggggagtctataaagattgcctcatttgactcgaggaaagaatgatactggctcagaaagtgtgaaaatgcaaattatttggtttgggccgatttgtagatatttaagattgtatttccccacccccaaccccaccacatgatgtccacctgactcaagaaatcagtagagaacaggtgtatatggtgagtacggattgctgctaaaactgcagtccgctgaccagcaacaccgcattacttggaatttattataaatgcaaaatctcagccacccccaagggacctactgaatcataatctgcattttaacatgaccctgaggggattcctattcacagaaagttacagaaaccctgggttactcagtagctttgggggaggtagttcgttactgggagatttcgtatttactgaccacttcaaatgcgccaggatcttctctatattatctgcatttaatcctcaagaactccatggcctgggtatttgaccctcacgttcaagagataagaaaactgagggtcgtctccatggagagcagaggggtttgatttggggcccggggaggtctgactccaaagaccaaacctggttcctctgcctgggagctactgaggttttaaaggctgcacgaccctgagttcaggagacaggggcccctggtgtcagggcgacaaattcagggcaaagaagcggacctgcgaggctggcaagcaggctctccctcttcctttgcgcaggcctgggcagctccaggcaacactggcgactcagccaggggtaggaagcgccccaaggggcggccttgcactcagctgcccggacccgaggctgggagcgccgcctggagcgaggggcgaggcggcggtagcccctgacagctgccctttacctctccggctgccatccatgcttagtcctcttgcagccgccgcagggacacgctgtatccccttcggtccttcccgcggccgggcccagccccggcagtggaggactggaaaagaggagccgacgggggctgcagcagcagggaaaccgttgccaggccgttgctaagggctgggtccagtgagtcgctattgtgacgtcacggcgcaggggacgtgcgttccgcagccccgcctgcgggatacccggtactaggaggacagttgcggacggagagacctggcggggaaggggcatcgagccccagtctgttgctctgggatcctgccagtcttccgcagagcgacctcctgtcaggatccgagtcaccagcacctggcaggctctgtccctgcgggaagagcagggagaggaggtggactcatctggcatccacgtcccctgggtcccggagaaaagtgaaacacaaatgttagctgaggtcagggtaacatttaaccagttccaaataattaaatttcaaagcagtccgtgaacttttggattagtgaaaatcctaggggtgaaaaacatctacatatttacatcttaattcttaaccttaataataagtttgaatttcctttctgctcgccaagcttccccgctcctgtccctgcctcccttttatcgtaagtttcaatccatttttatttataatggaagagagctgcaacatgaataaggggttgatttattgatggctttctataatttgtttaattttgaagcagttacctttgaatccttggaaataacgtcagatcagggtaggaagcattctgtcatgtaagacttctcagcccaaatgtccattgacattttgggctggttgtataattctctgttgtgggggtgctgtccctatgaactgttttgtagcatccctgtcctccgtttactagaagcaagtagcttctcagaagcagaccccacccactccacctccaatcctgacagtcataaatgtctccagacattgtgaaatattccctggggggcaaaatcgcaactctgttgagaaccactgctgtaatgaaaagagtcctggttttggaaccagatatgtagaacttaattctaaattttttgctacttaccagcttgatcttgaattagtttctaaaactttctgagccccagttttctcttttctaatgtagattgtgaaagttgtcagaatcaaaaatagagtcacatgtgttagaaaacctgacaagtggaactggagaaggccatgaaggagagttctcatccatgaatgcctgataataaaactatcacaaaatactgcgaaaaccacaaccttgcacaaagacctccaccttacccaaaaagatacttctatgaggacatctgtccagcaattgtctgtccaaccttgaactgacatcacccttgttattgatgcttggagccaaggctaattacctcaaaacaattatgtaatcctctcctttttttattttttaaaaaaacttttttttcctttaattccttgaatatgcaaacagtttgccatggcacgcatattcctattgcaatgcccattcctgggtaaatgtcattttcttctgtagagttgaggactaagctctaatttttttatcttgcccaaattcctatctaaggtgtctagggagtcatgccctagaaaccataaattcttatcagatgggttttatttgactctatataccatgacttactttccaatctgattctggcataatattatgagacaaggaaaaaaaaatcaaaatatttaaccccaagatatatttccttgccatatcttgaaattgccctgcaaaatctcttgtgggaaaaaaccacattctatagagaatctcttttcccctttgttttccttctttcctttccaaatccaggagataaccaactaagagccaggcacccttttaggtccgacaagacaaattttacaatctgctctctctctgaggtctgctatactgagagcttcctctgcacaataaacttggtctccacaatcttttatcttaaccccaacatttcctttttattgatcccaggccttcagataaactcaaccaattgtcaaccaggaaatgtttaaatttacatactcattgagttgtcccacctttctgaaccaaaccaatgtatttctt

SEQ ID NO: 1241706 - DNA, 4001 bp, Homo sapiens
ttttccttgcatctcttccttggctctctcattgctgtttaatttatgtgcccatcctacagttcttctctaattccactcatgctaattaattgtgaacatagttcatttttccctaatagattttgaactcctgagagacagacactatactgaattcatctctgtggttcccctctcccctttcatggttggccaggggtttagctttaaacatagtaggagtacaacaagcaactgttaaaatagaatttaccttggtttcttaaaaaagataaaagaatctctgcacaaaggccagtccccactcttaccttgctttggcaaatcttacggaatatggtacccctctccctccacctggatcgccagggtcattgcagctagatccagccagcacagagatataagaaggtaaaaccagactgacgacaaagccaatggttccaagtttggttggcttaaattaacatacacaaaagcaatgggtcaccgttatggtccgtccccaagggaaaccaagggagaattttgtggggtcaaggagggtgagaaggagataaagaaagaagaaagagagtttcctgtaaagagcaaggacaccaggggtaatgactgagacccaagtggattccttgtcatgacaagggagatgagacaccgcagcattcctttcccggcatgagaagcccagacactcccaagatgtgaggtcattatggtcccagaggggtccagggccctgctcaggcttcaaggtctgccagggactgtggtatctgggagctgagtacagggagggagtggggaagaggattactacaaccttcaatttgggccataaggtatgggggcagcgggagaatcactccagaaagtgtttatggggaaggttgtactcttcttaggaggtggaagacggcaacagtcaatgatagggaaacaggtccagtgtgggctgctgactggtggatcaggtgaaggaacccaccttccacacatacacacacaaccccatgtaactcaaactttcttattggccgaagacttaaggtcggaatatacttaccctgggtcaagttcagggaggcaatagtcacaggagttggggaaaaaaaaaaaatcccaagaatcagatatcagccaacagggggaggagaagtcatttctactagagatttaagatattctccacccccaccttctctctctctctctctctctctcacacacacacacacacacacacacacagagagatctattatgaacctgctaagcaaaaatctaattccagtttaaggatgaaaggtttcatcaagaaaatccttcctgaggcagtggggaggatgttatctgttctcgatttcctatccaatcactccttttgggactacagagaggactatggtaattcctctctctaggcccaggcaggaaatcggggttaaccaggaggccctgtgaacctgcgcccggctgtccagccctcagacactgctttgcccagactctcgtacttctcacttggccgcaggtcactcaggacagaggcagagggcaggccccacctggtcccagctccagcacctccttgcttctcagaggccttgggggcagaggctgcctgagctccctcccaaggggacccccacctccctgagcccgacaaacacgtctccatcactgccatgccagggctcacccaacacacacagaggattcacactaggtggggagggctgtgaaccttgtgactgtgagaatgccctccaacccttgtggccccaaacagtacctgccaaggcctttatccgggacctctcaaagagcctggctgagctgttgtcattatccagctcgtcgtctggggcgtcccagcgggcattgatcctgctgtaaggtggctggttgcccacattttcaaactctgtggccgatgtcatgtcagcaggctcttagcagctccgcctgcctcagtcttcatggaaggatccctgggggacagcaacacagtcagagggttatctctctaccccctcggactttttctccggggaaacttattcggagcatccaacgtgagtagatcctgacagaagcagaacgccatgtcatctgcctgggcgtgcttcctaccagggtctctgggtcgtttgttataaaatattgcagcagcagcagcagcaacagtaccggcagcagtggcagggatggagagctgcacgtagcaagggtcaggacggccagcaggtggagacgtcagtcgcagccagctgcttcctccagaccagccgccccgccgcggggagcaccccgggagagaggaagctctcctgggagccagaggcagcagggcacaagctggggaaagcaaccctcaccctgaggactaggccaggacctaacctggtgggggagatggggacaggccaggggaagggagaggctggaaacaggctgagtctgacccatatgggaaccatggggagagatggatgagagagttaagccgccactgacgccaccagcccggggcagctgcactggggggacttcactcctcccggaggctttctgagagccctctgagttccttcccagcagttggtattcagaaagctgacctcgcattttagggcttctttggagcatgaccaggtgctcagatgaggtctcctgttgaattccaggacagactgagcaacccaaaggagcctgctgtcccatcaagcacgtggcagtcggggcatcccatggacaatggaaccgtgcattgtgagtccatgtgatgaaccagcgcatcaggagcactgggtcctccctcacccgtcatcagtcattcctactcactcattcattcatttacagttaattcaaatatgtaccaagctccaactaggtggcaggcactgtactaggcaggggcaagtaagacaggaaagtcatgtcctcacagagcttggaatctggtggcagagacacacaattaaacaagcaactacaagaaggtgtgatgtgtgtcatggctggcttaggtggggactcggcggggactggtatcagggaggggaagttgaagcttattcctaaaggaagcttggaggtacccatgaagggacaggtgggaaaggacaagagtccaagcaaagggaataaagagtaggtgtaaagtcctgaaggtaagaaagaacacagaaagctttgagaactttaagaagtaacgggaaggcaggggtggagtcaggggagaaaagtgaggagggggccaggggagccaggcttggtcttcaatgccctggaccctaggaaaactattagctttcttcatctgtacctgacatttggtcctctttctagggatcttaagggactccaagatcaagtctgtaagagaataggggacccagagccttcacaaccaagagagcaaagcgggaggcagggaggctgtgaggcagacctgtgatgggggttgacagccagtgagctgtgagggagaccactccctctgtgggtgtgtgcacccacggcacacacacaggctcatatctgacacactgacacacaccagcacacacatgcacatccaccaggcacatgatcacggaggcactgaagcacattcaccagcccaagtgtgagatggcagcagggctacagccttatttttcagatacagactcacttcagactgcattttccccaacctgatgaatccatcccaccacatccttgtgaggtaagataggagccaggattacccaccctaattgccttgggagaaaaaccaaggcctgctgcaggaggaggcctccccagggtcatccggtggaatgactgcggctgggaccaaaggccaaactggagcgcagtttatcccccttgaccagacgggtttcaggagggcaggtggggaaaggactggagcacagtttatcccccttgatcggacaggtttcaggagggcagctggggaaaggactggagcacagtttgtt

SEQ ID NO: 1241707 - DNA, 4001 bp, Homo sapiens
cgagaccaacctggccaacatggtgaaaccccatctctaataaaaatacaaaatttagccgggcgtgatgacgggcgcctgtaatcccagctactcgggaggctggggcaggagaatcgcttgaacccagggggtggaggctgcagtgagccgagatcgcgccattgcactccagcctgggtgacaagagcaaaactgtctgaaaaaaaaaaacaaaaacaaaaacaaaaaaaaaatcatacctcaatgaaattcacctgcaaatgtattttctaactcctacccgttaaatttccctattacattctataccacaacaattttgtcttataagtcgtttacattgctaggaaaacgacaaactattccactgcttataatgagctgactgttatcacttcctccctcacacaattatttctttaaaagtgaaaacaaatcttttgatctgtgtattacttcgctttgacaccttacaacttcaggggaggtcaagtctgctttacttatttttcccctcaactcagtctcaatatctcaacatgacctggaaaaatgctttattttctgcttcgcagcaaacagtaacagacctatccatcataactactcatctggggagtagttatgttaaagccaaattaagatcaccatcctatcaaactgcaacagtcacactcccgctaaagggaaacagagtactttctaagcgttccttaatatctgtacaagacttaaacgtattaaagtcaactgcaaaattatcgcaacactctcttccaggaacaccgatcttgcatctttttaaccagctcatctttaaaaacacatttcaacagaatatctgtcagtccagaccactgtaaggttgataataagcattgtcttgaatttagaacttttcaaaatattttagaactgcctgaacttggttgatgattcagcatggttaattagtatagagtcatcgcaagtcaccaccaggctaaacaatccccttgtgtgatagcactcgtgttcaggaaagggtcgaaggggccacctaatccaacctggagcctggggtagagtctcaccaccggcagagttaagagaatgatgctttcgagggaccagcttggattccctgccagatctatggaccaatgtcctggttggggactgaacgtggtagtccagaatgtggttgggagaggctgggtgtgtttccatctgacaccaccgcctaattttctttgcttcttaaggaccccatgggtggttttctttggacgactgcaggactttaaaaggaagcaataacctcaggggtttgagaagggaccctccggagcccttgggcggctcccactggagtccgaagggcccctcatcgcttcccctggggacagcacacacttctggcagaatggggcagagaaaagtacccggagctctgagcagaacccagagctccgggagtaagacctccaggcgcggagaggtggggagcccccgagccgtccttgagcctccaggctcgtggaggtcgggccagcggccggacactgccgcccacacctgcgaacggcgcccgccccgcggattgcccagcggatggcccggagacctcgccccgcccggccgcccctccgccagtccacaccgccaccccggccccgccgcgcgggcccctcgtacctggccggcggcggctgcggctgcggctgcagcgctgctcctcacgtacccgttccgtacttccccgttcgccacgcagccattcgcccgcaccgtgcggcggcagcagcagcctccgggctccggccgcatcttcctggcagcaccaggcgcaaggcaggctctgtaggcggtggcagcggcggcggctgctccaagtcccgctccgcaccccacccacctccccgaaaccggaaatggctgcagcgccgccgccaattcccgggcgggccttcacagagggcggggccctctccgcagaggaccggtctcggccaaggccacgcagcgaagggaaaaagcggcggggacctgccgagagggatgtggtcctgaggaccgctgaccaatctggaagagaaggaggcggaccccatgctgctgcctggccaatcacggacgagagcaaagcgcctcgccggtggagagggggcttctctagagggactccagggcctggcacctgattggaggccgcatccaggtccggggtagggcttgcctgtttaatggtccagaccgaggaggaggcggagcccagggaaaagtagccaattagagtgtgaggaaataaaaggggctgagccgaagtctctagagcgggttcccaggttctccaggacaggtggcgccctctttgcccttgcctcgtgggaagttttggagtttatgtcctagcccaagacaggcagctcgcttatttaattagctgattcctctgtgagtgtttatagaatagattttttgacaatctctcatcattcttcaatatgcgccacacattcactatttctgaattattataagtaataattcagatgccttttcacgtgcccttcacatttgcccttggcagggttttctatacagtctcctttaaattaagtctttccttcaaagttagaaaacctggtctaattccaactctgccaataactggaagctaaaacttgagcactgtgtttaaccactttagaagccaaattctttaaaatggagttaatacttcctgcttcatagacttacagcaagaattatatcattaacccattatgcacctcttataatactaggcttatagtaggagtataataaatattattttctcacccttttagttccatcttcccatggggttagaaagcaaggaaattgatctacattacaattagagactttctgttatccataaagaatttagtatcataattgagagtatggactctggagtcggtctgggttttaaatcctagctgcgccacttactagctgagtgacctctatgtgtcttcatctgttcagtggggacaataatagttgtcgtgaagattgaataagtttatgtatgtaatgtattttgtacaggacctagcaattagtaagcattcattaagtgttggttactagtaattgctaaatgcacctatgagaatccgtgcattctttccccaccctgcaggagctttagaaaggaggtccacaaggtattggttttgcatgacttaggagctgaataatctaacagaaggtgggatcattcatcccacacatcctatttgagttgacaaacactattgatcccaaagtgaatatacatctgtatgtataaggctaaaaaggaaacatgtggctgtgcttcatggagcttacatttcagtgagagacaagatatacacatagaaagaaaacaatagttaaagaccaacctaaggctggagagattaggcaacaggagttctgatgagggaagctgaatggcagtgatgagtctaaccaggtagaaagttttcagggcaggaatctggatggaagcagggctaagggatttaactgaagcttagggagtgagctgaatgactctggagaaggcttgcgaggaagatgtgcaatgagacagatcttggaagatgagcgggacttggagagctggaactgagaaggatggggagggtgttctgaggaaaccttcagaaactcgggtgtcgagtctagaaagatcaaagcctcacctgcaggctaagaggagtaaaggagtctggctagatttgaggagtcctgttagccgatccctcctcagggggctggccccttgtcttgttccgccacttactcactatgtatagtcttggacaagtaatgcaaactcagccctggtttcctcactcatcttacaaagtgtgtacctgtactacttaccttacaggcttctgtgagcatcagtgatatacagatgatctgattacttcacatgccattgctaaatcacaaaaatgatgctgcag

SEQ ID NO: 1241708 - DNA, 4001 bp, Homo sapiens
aaatttgaaataagatttttttatcttaagtttaaaatcataaggttctataatattggatgtcagttggttgcagttctcacctatttgaaaaaaaaattgaaactacttgtcgctaaaccatggtaactcaaaaacattaaaggcaaatatctactaaggcactatatttcatttcataatttatttctccatcccccaaaaaaggcatcacctagttatttataggacactatcactattgcaacataacagaaaaatcttaacatcattgataactgtagcattttagtgtgtaaaatctatattagattttaggtgtcaaatctatactagattctaatagtgcactctacattcaacctctgatttaaagagtttcattttaacccagcattgtttaaattaattttaggatgtgttatgtcagtcaagatatacttgcttctactgagagacttctattaaatatgcattcaagtatatattttacaaggcatgaccttgcgagccctaaagagtgagactaaactgcagctacaaataaatggtgcaggaaatcaaagcaaactatattcagagtctaaatccaaaatatgcattctggttcttaaattccaggtttggaaagaaatgccaacagtaataaataaataaactgctttgaaagcatctcaaattcctcaaaagtgcttaaacaaaagactcagctttgagtacaaccttaagctatctcaaaacaaataaacacacttgataaggcttagaatgaaattacctcagtcactcactggaatgcaacaatgcattcgcaaagttattctgaagtaagctactccaactaaaccacactgaaaaggagagaacgtggataaactaaacatgttttgtgaaatacctgttttgtattggcctgagttttttaaaagttacatctcattcattatcagtatttaatctgcaagaatatcatcaaaggatgtcaatatggacaagcagagacaagaaacatcagactttcagggagcctatcttcacaaccctgagttattaactgaagttctcaaagttagatgagttaagatacagacaacgtgctttgcacaaatgctttgcttatagtaaccactcaatagtcattaacaagaatttattaactatccaccaaaacacagtttcaaaccctaccgacaactaaccacaaattgcaccacttttcgggccgacttctacggacggtgcacagaagcaataaatacacttttaaaactccccaacttgaagaccaaaaagatacaataacttaaactgctttcaaaaactactggagtgtcatgcctacaaattcagaacctggcttaaaagctagttaactgactagaattcttggtagacccaaagccaactaaatcaggaacacttaaaggtcaaaggcgtccaagccgggagcgatgtgctccactgttacatgatccccgcctcctacaggaacaggggactgaaccaaaggcagttgcggccgaagtgcaggcgacacacagggttacacatcaccttcggagatttcctccaggaatcaagacgcttcccccttgggtccagcgactcacaggtgaccccggatctcaagagttctcgtctcccccaccccccacttaaccccgcgagcgccgccctcggcccccagacctccccctgcacccccggcttccgcgcacaggaccggcggggccgccgctccagcctccaccccaggcccggggcctggggaaatgcggccccgcggcccgcgcccccagcccggcccccgcgcgcgcggccgggacaggatactgaacaccgtccgctcccagggctccagcatgtagagcgccgtgaccagcaggtactggtagtagaaccaggacatctgcttccaggcccgcgccagcgccatccccgccatgcgcctcccgcgatgcagctcacacgtcagtctgtccggccggccgcccgctcacgtcctaaagcccccggccgccaggcccgcccgcccgccacccagcgcccattggcccgcccggccccgccgtcacccgcggcacgcccagacccgcgcgcgccccggccgccggcccccagccccgcccgacccgcgctcattggccaggccgctacctcgcgtcgcgtcgtcccctcccgtttccccgcccgggcatcgcccacgctagccggagaacggtccccgcgagagcgcccagccgcgccccaccccgcccgggccggccggtggtgggcggggcgtcagtgccggccggggtcccggggcccccgcagcccagcgggcgctcggtccgtccagactggcccagagcgcttgcggaagaaatatttctggaacacttgttatgcctcaggcatccttctgagaaggaggattgccagggagaaccggaatgccttcggttccttaccttgtgcagctggcggcctagctgggagacaagcattaatcaagtcgtgatccgtgtaagaggagataaggggctgagagagggtgaggaggcgaacgccacctaataaggaggtctggaaaggcgtccttgtagaagggatgcacattcggcctccttcctcccttcccccacccatgcacacacacacacacacacacacacacacacacacacacacacacacccctagacggacataacccatgcactccctaacccagagaccacttaccaaaaacatctatctgcccacctcttagtggctgtaggtaaccaccaagtgggtcaaggccagaagcgcgctgatctagtgggttctgcagaagacaggcagcttgagattggtgtgagggctggtgatacttccctagagatgcactcctggatgcccagattttcccactgccagatgggccagcaacattgcactggccacaaggagctccatgcactggtgtagcatgtgaactgccacaattaaatggcctgctgtttaaatgttaaaagtcttccaggttaaacatactactgcttaaactttaaaagtttcatggttaataactattcattaaaagtaccaagtgccggccaagcgccgtagctcatgcctgtaatccaagcactttgggaggctgaggctggcggatcacttgagtccagaaggtcgagaccagcctgagcaacatggtgaaaccccgtctctaccaaaaaaaataagtaaatacataacaaaaagttagccaggggtggtggcgtgcacctgtagtcccagctactcaggaggttgaggcgggaggattgctcgagcacgggaggtcgaggttgcagtgagccaggatggtgccactgcactccatcttaggtggcagagcaaaagaaaggaaagaaaggagacagagaaagagaggagaaaacagaagagaagagaagaaaagaaagaaaacagtaagtaatatcaagtgccagacattgggatagcaagccagatagactgagacctgccttcataaagtacccagtctgctggggaagagaggcaagttaatggattacagtgaggtgtggtaaatgatatttttgtggatcgtatcctttaggataccaagatagcccagacaaaatcagattgggcttgtgaaagtcttctgagaaatggtgcttgaactgagtgttgaaggacaagcagaaatggaagaatgaatgagcttggggaagagagggtgagacagacattctaaggatgaagttgtgatgtttttagaagactggaagaacttccatgtggctggagcaaaaagaatgtatatgcagtagcaagagatgggcctagacagcaaacagggaccatattctgaaggaccttgtttgagaagctaagaaatttttaacttgatgtccaaaagttactggagccaacaacttaaataagattttctttcagggctgggtgtggtggctcacacctataatcccagcactttgggagtccaaggcgggtggatcaca

SEQ ID NO: 1241709 - DNA, 4001 bp, Homo sapiens
gacagtgcatttggttttggacctaatgagtttgcaagttttaggggaaagtacagaactatcaactcatgagatggaggctaaagaataaggtttaggcagggcatggtggctcacacctgtaatcccagcactttgggaggccgaagcaggcggatcacttcaggtcaggagttcaagaccaacctggccaacatggtggaaccccatctctactaaaaacacaaaaattagctgggcgtggtggcaggcacctgtaatcccagctactcggaaggctgaggcaggagaattgcttgaacctgggaggcggaggttgcagtgagccgagatggtgcctcggtactccagtctgggcgacagagcaaataaggtttggaaaagaacaaggtttggaaatgaaaagaataaggtttggacatggttggcatatagggacaatgccatggaagcaagcgagaagcctcgaggagagcctgtggaagaccatttgggttatagcaatgactgagggccaactaaaaggacggcgttaaccaagactgaaaataaccaaagagataggagcttttactaattccctttccctttctccatggcacataggagaaaatcaatttttaaaaagctacatttatggttatcttactgtaatcctgtggcaggtccagaatttccaaatagatggggacagaggagtaatctggaaggaagacttgaagatgcttttgcatagtactctatattaaggtagaaaataccagttggccatatcaaaaaactgagaaaaagcgatttgagggaaatatttccctcccctttggcaccacgattgctgtattctaggcactaaaccaaaccaaacctcttacctaatctcctttcttcctcaaaacaagcctattaagtagatgaggaaattgaggctagattggaatagaaactggctcagggtcacaaagcacctaaggagcactttagctctcccacagctttctacagctctttatatgcaactagtgtttctcattacccatcttgatataatgtgtatttatgtgcgttagcttctcaatggcagagttagtgttattcatttctgtatccttgtagccaagaacaagtatatattttgttaaattaagcatgtgaaagaatcaggtgaggatagcatgaagaaaggcagcaggggaaagtttcaagaaatggatggtcagcagcgtcaaatggtacagagagagctatcagtctatcttaaatcatcattggcattcaactgatattccatattcgtttattgaacgtctactacacgcaggacattgtgttaagcactacaaacacataggaaaaataaaagtctcgtacaagtaaaaggattttcggggaagtagcttcatctaaattcttgctcaggaaagcaaaacgaagactcaggcctgcaactgcctacatcttatttggctcaggtaaatcggaagacaactcaaaaggggcacagcgcatctttaataaaacttctcatggaagacgagataaagagccacagaaactcagtctcggtaacgatggccggtggccacggaggccgacttcccccggagtctctcgcctcctgagcagcgctggggctgcccctcgctccccctccgtagtctggggcgggaaaaagcagacacttaccgcaaaagacaccgctaaagccgtggccctgaggggccgggaattccttagcgaggccccacgccgtcggaagaaacccaagaaagctgggagcagacagacaggtatgaccccacaacccaacttcccgaactagataaagtagggtcccaacgcccagcaccacgtcgtcaactcccaccagctggaagaccaacggagtgccagcgaaccttccgcccaatgaggaaacgtcaccactccgcgtagtccagcctttctataggagaatctacttccgcttccggggcacaccgccgcgttccttctacgcggctcctgaaacagtttagatgtttacttgcttacactggtttttggtttcagtttcctaccgctgaataactgcaggagtaaagttagtggtaaaataggaggctgtctagggacgtgatttcggggaagaagtcaggcctcgacgagccaccttaagaaaagtgactaggcggagcactcccagctaagagcggaaagatgagagatagaggtgtgactgaaggcagggatccccaggcgcacgtgagacctccgtagaggggcggggcttagggctttgcagaccggaggcttgttccgcggagggtggggcggtctctgcttgcgcatgcgcaatgccagccagtgcctgcgcggcttgctccagcaaggtaaaatttcccactgcgaggcaggcagtgatgctgcggccgcttcgcactgtggctcctgccgaccgccaggcgctgttacagtggatgcgaactaaccgtaagtgtaagtgaccagagctagaggcaggtggtgggggcaaggatatgctgcaggcgctgactttgaggacttaagcggggtgaagccaacagccttccttgggatcgttgtgctggtctctgctgtcttggggggtagattgaccagggctttgagtgctctaacggaaaagagagttagttgctcgccacacgtagacaccaattaacaagagcgagccctagtatacaagaagagggattttatttctgaagccagcccgcttcgtctttggagcaaaaaagcgggcattttataaggtacaagaggaaatgagcaagaggtctctgctagctggtgccttatctaccgggtagttgagttggtgcatttctgagcagaaataagttgtaaaagtggccaagtgggcatgctttctgcttacccttctgaggcgaccgcctggcggtgggagttgcgtcttggatctcgtagatgaatttgctctgtagagaatggtctggtgaggggagttgagaggttattttgcagttcaaaaagggctaagtggaaagtgtagtggggaggggaaaagaggggaaaaaataaactatctcttggaaaatgggggtaatcggatacagtaccacttggaattaattgggtgtgggaaacctggttctgagtggtttgtgagttttcagcagacttcggacaagcctttagagctccttgtgcctaaccctttttctgaaagaaaatagagggttagccctcctccccattactcccacaaacttgttagaattggtacgttgccacctgaaaaagcattttgcaggagaggttttaggctgtagcgttagtaggaagtgttaaacgaaaaaccttagccaagttaaatttaacattttgagcaaagaatgattcacgaatcgggcaggctcagagagattgcagcgcagccaagtgttgaagatttatagacagaaaaaggctgcagtgagctttgatcccgctgcttcactccagcctgagcgacgcaagaccctgtctctttaaacacacacgttaaaactgaggaaatgtggtagctagatctagttactgaaaaatgggatagatgtattctggcaaagtaaagcctgatgaaagctcaagaaaataggatattcttatgtttgttaactatagcaaactatcctatgcctgtatgcgagagtgtgtgtgtgtgtgtgtgtgtgtgtgtgtgtgtgtgtgtgtatgtgtgtgtatttattttttgagacagagtttcactcttgttgcccaggcggggctgcagtggcgccatccagctcactgcaacctccacctccctgattcgagcgattttgagtggctgggattacaggcgtccgccaccacgcccggctcatttttgtatttgtagtagagacggagtttcaccatgtttcccaggctggtcccaaactgctgacctcaggtgatcttcctgcctgggcctcccagagtgctgggattgcaggcgtgagccaccacgcctggcc

SEQ ID NO: 1241710 - DNA, 4001 bp, Homo sapiens
gttcaagccatcagatatcacaagccattctaatgacttccgtcaatagatttgtgttctatgactcatatagattcatcaagaacaactggctaacgtgggaatagaagaacagattatacggcaggacccaaaatcatcactgctaatgactcctgaatcttaaatgctacccctacaataattgttcaatgcagccatccacccttcacataccgtctatcatttcgaggtctgcgactactaaaacggtcagagtatcgtcctctacctcttccacctcgtgaccgagccctagcatgttcaatagtaaccctacaaaaagggaagaaaaatctccgttacacacttaagctacataaatctacttagaaaaatatgccagcagacccagtctgctctatgtcccagggttatctagttacacaggaatctcacctttcactacagagttcttttccatcaagctcatacacagcatcatctgcatcccttggatcctcaaattcctaaaatgtaagcataagactcttaacattggctttagaagagtattctacaacacattaagagcactgaaatcaggagacagaatgggaagagtatcttaacgacactgccatacagtcaaacctaatcaaggagccactgggagtggggttccagtgagccggcaagttaaagttgttttcagcctcaataaaattcagacataaggctgggtaacattttctgaaggcaaatattccacccggactcaagatcgaaaacaactgcttatcaaaactctacctacttagcagataattcacccagttctaaatacttaccacaaaaccaaagcctcttttcagatcaatatctcttatccgtccatatcccttgaagaatctttccacgtccttctccctggccgctggatttagtctcccgatgaatacccgacagccactcatgatgtccggctagtacttcctattagaaagtaattcaatcgagataatagcaatgactgtcacagagaaacgcctgattaaacaatcaaaaacatcaacggcataaaatgtttacacagtgatgttatgaacgagattgccaacagagcctctaatgaggccaggttacctgcagacaaaatgaaaacccagctccctcccaacacggtccgctactgggcccagaccgcagcaaccgcaacgcccactgccacctttccaactgcgcagccgcacactctccgggctctccggccccctcccatctgccgcagttaggaaaggccgagaagtgcgggcggagccgcccgcgccctccgcaaagccagcccaatggcggcctcgcgggcgcgtcacagcgggtggaagccagaatctcgcgacgcctcgaccgcgcctgcgccaacagcagcgggcgggcgctctgcggccacaaaatggcggcggtggaatcaaaggcagcagagctgcgcgtgccaaattccctcttcccttctcctcccagcaacccccttctcgggggtcactgcggccgccctacaaaaggcccagccgcatcgccagcaaagtcagggagatcccggcccactattctacgtgtccaggagatgaagacattaagactggcagggacgggcgcacaaccgctgtgtaaaaacgacccgaacagtgaccgccctttcacctcagtacccctcaaacagtatgccaaaagggagacgtgccccagcgcccacctcgaatcaactgcgctcattagacgccatcctccgcaaagagagcagccccggccgctcacgatctgagcggccatgaagaagcctcgatccgagaaggcttgccctcaaagtgagccactcacctaccggacggggtctttggcggctgagacccagacaggtccgtagtctgcgacggagtcgtcgacctccacgcagaccaggacttaactcgtctacgccactccacaactgacgcacttagcagctctggcgctccacaaaatggagggcgcgtcctacgtcacttccggggacgcccctgggccttgggtccaccccgttggacctagggaagacggaagttttgggagggccggaaatttaggaggatgtgggcctctctgacactgcgagtgaccgaaccctgctcccgcggtgggtggggtcgggggcgagaactcgtttgggctcggccggctggtgccggagtctggagggacatctgttgacgtcgttcgcccctgctaagtccttggcgttcggttcatcatcatctctcccagaagagtctcctgagaaaagtggcaacccttcttgtatctaaagtttttcttagacacccagaagattactaattaggagaaacttagctttgcagaaatacctggcctttccttagctcttgctgcttgcaatttaaatttgccctcaaagcagggagctcctagatgttcgagttcttttttcaaccatgccacagctgtgtggttttgttgtggtgagaagactaaggcactgaagtattttttaaatgaaaggattttcactgatgaaatgttgaaaatgggactgcagctagaaggctgtcttgaattgaggctggaatacagatttctgcatgtccgtcactctgggagagtggctggaagaggtttcaagctgttttttgttgttttttttgagacagtcttgctctgtcgcccaggctggagtgcagtggcgcgatctgggctccgcctcccgggttcacgccattcttctgcctcagcctcccgagtagctgcgactacaggcgcccgccaccacaccggctaatttttttgtatttttagtagagacggggtttcaccgtgttagccgggatggtctcgatctcctgacctcgtgatcggcccgtctcggcctcccaaagtgctgggattacaggcatgagccaccgcgcccggcctcaagctgcttttaagtccaaatggtatttggttaatcctctccgttcagatttctgtaatgtaacacatgaaagtttacaattctttagaaacagacaatgccgtgctttcaaagtgggtgtaaaacacagccctccatattaactcccgcgttgtcccgataaggttggtagacctagaaacttaggcataaagagattgcttaacttcgctttaatgcttttatgtagaacccagtgcaccccatttttgagaagtgcctggaatgtggagttgcatgcttgcaactagagttaaacagagaaaaagtagttccggaaggagagcaactgacccttaactcgacctcaggggcctttaggcactcagaactgaaacttggatagtttgtaagggataagcttgtccattcatagttatatgtacaaataaaaagagcctcagtgaagttagttacctataatgtgggagttaaggatgggtttataacacaatatgtatttaatgtatttgttcaatgaaaagaaaaaaatgttacctagttgttggcctgatgaacattggcattttataatgcacaaattgtcccaaaccagttggtatttaattacatttgtttggtttctgcataataaacaagtcttccgattactttctacatttatgtttactgtgaaagcaactatttttatttcactcactaccacttttttgtttttttttttttttttttttttgagacggagtctcgctctgtcgcccaggctggagtgcagtggcgggatctcggctcactgcaagctccgcctcccgggttcacgccattctcctgcctcagcctcccaagtagctgggactacaggcgaccgccactacgcccggctaattttttgtatttttagtagagacggggtttcaccattttagccgggatggtctcgatctcctgacctcgtgatccgcccgcctcggcctcccaaagtgctgggattacaggcgtgagccaccgcgcccggccttgttttgtttttaaggctagtaaagtgaaccagtgc

SEQ ID NO: 1241711 - DNA, 4001 bp, Homo sapiens
ggcaagttcaagccatcagatatcacaagccattctaatgacttccgtcaatagatttgtgttctatgactcatatagattcatcaagaacaactggctaacgtgggaatagaagaacagattatacggcaggacccaaaatcatcactgctaatgactcctgaatcttaaatgctacccctacaataattgttcaatgcagccatccacccttcacataccgtctatcatttcgaggtctgcgactactaaaacggtcagagtatcgtcctctacctcttccacctcgtgaccgagccctagcatgttcaatagtaaccctacaaaaagggaagaaaaatctccgttacacacttaagctacataaatctacttagaaaaatatgccagcagacccagtctgctctatgtcccagggttatctagttacacaggaatctcacctttcactacagagttcttttccatcaagctcatacacagcatcatctgcatcccttggatcctcaaattcctaaaatgtaagcataagactcttaacattggctttagaagagtattctacaacacattaagagcactgaaatcaggagacagaatgggaagagtatcttaacgacactgccatacagtcaaacctaatcaaggagccactgggagtggggttccagtgagccggcaagttaaagttgttttcagcctcaataaaattcagacataaggctgggtaacattttctgaaggcaaatattccacccggactcaagatcgaaaacaactgcttatcaaaactctacctacttagcagataattcacccagttctaaatacttaccacaaaaccaaagcctcttttcagatcaatatctcttatccgtccatatcccttgaagaatctttccacgtccttctccctggccgctggatttagtctcccgatgaatacccgacagccactcatgatgtccggctagtacttcctattagaaagtaattcaatcgagataatagcaatgactgtcacagagaaacgcctgattaaacaatcaaaaacatcaacggcataaaatgtttacacagtgatgttatgaacgagattgccaacagagcctctaatgaggccaggttacctgcagacaaaatgaaaacccagctccctcccaacacggtccgctactgggcccagaccgcagcaaccgcaacgcccactgccacctttccaactgcgcagccgcacactctccgggctctccggccccctcccatctgccgcagttaggaaaggccgagaagtgcgggcggagccgcccgcgccctccgcaaagccagcccaatggcggcctcgcgggcgcgtcacagcgggtggaagccagaatctcgcgacgcctcgaccgcgcctgcgccaacagcagcgggcgggcgctctgcggccacaaaatggcggcggtggaatcaaaggcagcagagctgcgcgtgccaaattccctcttcccttctcctcccagcaacccccttctcgggggtcactgcggccgccctacaaaaggcccagccgcatcgccagcaaagtcagggagatcccggcccactattctacgtgtccaggagatgaagacattaagactggcagggacgggcgcacaaccgctgtgtaaaaacgacccgaacagtgaccgccctttcacctcagtacccctcaaacagtatgccaaaagggagacgtgccccagcgcccacctcgaatcaactgcgctcattagacgccatcctccgcaaagagagcagccccggccgctcacgatctgagcggccatgaagaagcctcgatccgagaaggcttgccctcaaagtgagccactcacctaccggacggggtctttggcggctgagacccagacaggtccgtagtctgcgacggagtcgtcgacctccacgcagaccaggacttaactcgtctacgccactccacaactgacgcacttagcagctctggcgctccacaaaatggagggcgcgtcctacgtcacttccggggacgcccctgggccttgggtccaccccgttggacctagggaagacggaagttttgggagggccggaaatttaggaggatgtgggcctctctgacactgcgagtgaccgaaccctgctcccgcggtgggtggggtcgggggcgagaactcgtttgggctcggccggctggtgccggagtctggagggacatctgttgacgtcgttcgcccctgctaagtccttggcgttcggttcatcatcatctctcccagaagagtctcctgagaaaagtggcaacccttcttgtatctaaagtttttcttagacacccagaagattactaattaggagaaacttagctttgcagaaatacctggcctttccttagctcttgctgcttgcaatttaaatttgccctcaaagcagggagctcctagatgttcgagttcttttttcaaccatgccacagctgtgtggttttgttgtggtgagaagactaaggcactgaagtattttttaaatgaaaggattttcactgatgaaatgttgaaaatgggactgcagctagaaggctgtcttgaattgaggctggaatacagatttctgcatgtccgtcactctgggagagtggctggaagaggtttcaagctgttttttgttgttttttttgagacagtcttgctctgtcgcccaggctggagtgcagtggcgcgatctgggctccgcctcccgggttcacgccattcttctgcctcagcctcccgagtagctgcgactacaggcgcccgccaccacaccggctaatttttttgtatttttagtagagacggggtttcaccgtgttagccgggatggtctcgatctcctgacctcgtgatcggcccgtctcggcctcccaaagtgctgggattacaggcatgagccaccgcgcccggcctcaagctgcttttaagtccaaatggtatttggttaatcctctccgttcagatttctgtaatgtaacacatgaaagtttacaattctttagaaacagacaatgccgtgctttcaaagtgggtgtaaaacacagccctccatattaactcccgcgttgtcccgataaggttggtagacctagaaacttaggcataaagagattgcttaacttcgctttaatgcttttatgtagaacccagtgcaccccatttttgagaagtgcctggaatgtggagttgcatgcttgcaactagagttaaacagagaaaaagtagttccggaaggagagcaactgacccttaactcgacctcaggggcctttaggcactcagaactgaaacttggatagtttgtaagggataagcttgtccattcatagttatatgtacaaataaaaagagcctcagtgaagttagttacctataatgtgggagttaaggatgggtttataacacaatatgtatttaatgtatttgttcaatgaaaagaaaaaaatgttacctagttgttggcctgatgaacattggcattttataatgcacaaattgtcccaaaccagttggtatttaattacatttgtttggtttctgcataataaacaagtcttccgattactttctacatttatgtttactgtgaaagcaactatttttatttcactcactaccacttttttgtttttttttttttttttttttttgagacggagtctcgctctgtcgcccaggctggagtgcagtggcgggatctcggctcactgcaagctccgcctcccgggttcacgccattctcctgcctcagcctcccaagtagctgggactacaggcgaccgccactacgcccggctaattttttgtatttttagtagagacggggtttcaccattttagccgggatggtctcgatctcctgacctcgtgatccgcccgcctcggcctcccaaagtgctgggattacaggcgtgagccaccgcgcccggccttgttttgtttttaaggctagtaaagtgaacc

SEQ ID NO: 1241712 - DNA, 4001 bp, Homo sapiens
cgtcgctgttggccgcggtgcgagagaagaccacgatgggcaggatgacgagcagcgatagcacccacacgcccaggtttactaccttggccacggtgggccggcggtagcgggccgccttgatgggatgcaccacggccacgtagcggtccacgctgagcacagtcagacagtagatgctggtgaacatgttgaccgcgtccacgctgagcacgaggcggcagagcagcgcaccgaagggccagtggcgcaacaacgtggaggtgactaggaagggcacgctgagcatgagcagctcatcagcaatggccagatttaggatgtagatgttggtggccgtcttcatcttggcatagcgcaggatcacgtagatgaccatagagttcccacacagccccaccaggcacaccacggagtagatgaaagagatcaggatggcgctgccctggccctcgctcaaggtcccgttctgggacgcatttcgccctggctcctccatgccgtccgcagcgccggccccggggcccctgctgccgccgccttcgccgcagctgcccgggctggggctaggagaggaggaaggagaggaggcggtgccattggggaacatcccagctgaggggggccagtggggctgccagggctggggctttctcctcgcgcacccgccgcctgcgccctccctccccacccgaccgcttgcctgcagcccacagccgcccagcgcctccgggtagagcgcaaccgctgcggggagcgcggctcctaccggcgccggcggggcgcacagcccagcggttgcctgggctctgcagtttgcagctccggggtgcccgggcacaggcgaccgtggagaggagaggccaggatgtgggagcaccgcacggcacagccattaactggcgcggctctggactggtaaatgattaataggcaccaccagcgcgtcagcagctacgaaaaaagggggtggggtggagaaagggaggagagcacataggtggcttgtcccccccgccccccatttttttccttcccagtcctgcactctgctcaactttagtggctccttccggggttccctcgcagcaccatctgcctcttgctctcagaggaaccaagagagttcctcggccttactggagggcgggtgggaaccaaaggtatagattctgtctcattccactcctctcctacccaaagcaaagactcaaacggatccatgaacatggatgtctggagttcatctcagtttccctccattgctgcccttttctctggagaccccagcttctctcccgtcccgcagtccagaaccctaaattccctcttcccaccctcgcttgccttgcagctcagacccgccagggaagttccgggccctccttacccaaagtgcgcaacctccagactgagacgtagatggtcggtgcaaagtgcatgtgcggtctgttagcaggttgacgatcttcgcgcagaccaactcccttctttgcgcctggccccagcacaggtgcccacgcaattactcttagaatcgcggaaactggccctaagctgcgagcgttatgagaagaaaggacaaccaccgtgcgttaggggcttctgcgctataacacagcaggcagcttaggctattgggagtgttcagggacctgagtgaaccattcgcaaatctcttaataaagctcgtagcgctcagagccccccgtgtctcccacaggaatatcgactgcagaaacgaggacgcgcagctgggagctctggaggagcttgagactccctccagaaacgtgccaggcgcggtgttgggaatccacctaggtgttcactcgggaaagataaggctgcgccgcttggaagggctccacccgcgtccctgctgtactttgtaccctggagagttggcgggttctggcagacgagagtttaaaggcttgggcgggcggggacgccagctcttctaaatccaggtgaggagctgccgccgtgcgatgaccagacctgtcaccaaccccaggaacggcagggcgacattcgagtttttccgggaagagctaggatgtcagctctttctgaggcttgatttgtgagctggctctgggtcacgtgcccaaaccattaggagatatcaatgtaggcaagcctgaagctcactgacttcatttaagaatcaaaacggttttcccgtaagaaagaatgtatgttccgttatcaggattttaaacgaaccctgggacttaccaccattcttactctagggtctctttggctttccaactgttcctgtggaaggaagaatcacactccatgcaacttccctgttccttttcataaacgttgctttgctcggtaagatccctgcaagcctttatttgaaactagcctgttcacaggaagagtgacccgcagcagcttagtgctctgcctccttcaagctttgctgtctccagtttttccttagtttctccttctcctcaaccaggctgtgcccgctgtactgtaagtctcagttttcctcctctcagtagagtttactccaaggagaggctaaactcctcatggaggctatctgtaccggtccagaatgaagaaatggatgcagaaattaaaaacaaaaaagtatatttcctaatgccctgttgctttatccaggtaatcacttacatatactgcatgtgttttagttcccaaaactaattgtcttgaacaggaaagaataacttctgtagtgtgttgatgatagcaatcaaagactaaaataaatgacagactttcataggaatgtgtgcaattattaatgaggaatgtgctaggatggaatttgaaatttcatacggctgaaactgttttaacccattattttacctgaacaaattgccttctttaaagtggaatgtacaattggtgtttagttatatttatttttcctttacaaatacagcacatatggagagaaaataaatgttcattaagttaaaagaaaagagagtgggtattgtcccagaatcccagaagagcattttactagccaagcctcatataatgccttagatgcctctgccaatcactgactaaagacacctgactatctgtacctctgggagcttggatttcaacagtcattatttagatgccttggctttgatcatggttgctctttgggaagtgtgtgatgggagtcagtgaaaaacagctctgttgttcagaatttcattaaattcactttcagctcatcttagggaaaatttctctcaattttgtggcctcatatacaaaagaagaaaacttaagacctgacgtgagaatgctttttatttttatttttttgagatgccacttttcacccactaggatggctataagaacatttttaaaaacaaaaaataaacgttagtgagaatgtggagaaattagaacactcatacattgctggtgggaataaaaaatgatgcagcaacttcagaaaaaaattttggcaattgcttaaaaagtttaaaagtttaaaagaatgaccatatgagccagcaattccacttctatttactcctcaaaattgaaaacaggtgtttaatcaaaaacttgtgcatgaacattcatagcagcactattcataatagccaaaaattagaaacaatccaaatatccatcaattgctgaattaataaattgtggtatatccatacaatggaatagtattcaaccataaaaagaaatgaagtactaatacctgcttcagcgtagacgaagcttgaaaacactatgcaaagggaaagaagccagacacaaaaggccacgtgtggcatgattccatttatatgacatgcccagggcaggcaatacatacagacaaggtacgttagtggttgccaggggctgggggcagaggggaaagaggaaggactgcttaatgggtatgagctttcttttttgagtggtgaaaatgttctggaattagatagtggtgatgattgcataacattgtgaatatgctaaaaatc

SEQ ID NO: 1241713 - DNA, 4001 bp, Homo sapiens
tccactaccaacacaaaattagctgggcacggtggctcacacctgtaatcccagctacttgggaggcttaggcaggagaatcacttgaattcaggaggcagagattgcagtgagccaagatcatgccactgtactccagcctggacgacagagtgaactctgccatcaaaaaaaaaaaagtagggaagattggttagtatcttagggaagagtgagagaaccttcttacctggctcatggtggcaaagagcaaacatgaggttattatacgtaatactaaaacactgtcatccagtggtatctcttttgttctgtgtttcagttttcatatctctgaatgcttgagcatctgcgattcttgtagcaattaccacatatagaggccagatctgatcgctggatgtaatgtttcaattacagagaaaacgtaagtctctggcatatgtgtatagttactatagtatttccctgacctctctcttttattattttttttaaagaagaaaaacagtagcaatataagtggaattaaaattcggatttcagcttagggaaaattcaaagggatttaaacacatgtgactgtcaccactcctcacttttaacaaatttacatgaacggtgagaatctttcaagacataaagtggtgaacagcttcacagcacgaatgtcgcacttactgagccctcacacctatgagatgggcatttttaaccaccagttctcatctcacaggcaaagaaactgagtctcagagactaagtaacttgcccaagggcacaaagatagtaagaggtcaaatggtatccgaccctagtcttaactcaggcacctaaccatgggattatagagctcaaatgataaaaccacccaaagaaaatgccaatgggtccatacctcattttacactggcaaagtgaagaaaagcacaaactagaaacctcgagccagcttgaatttcccagtgaagctggcatgtcccctgattcaaccctaggaccccttctccagctgttaaataccttcattccttcacagctttagattccatctataagctagggaccccccacacagatgcttccagccttgacttctcacctgacttctcctggtgcccactgagcatcttcacttcaacatctaacaagactctcacacttaacgcatccagatttgaccagcgactctcccttccctgaaatgactgcggcaagaacccttcccatccaagatgatggcactctacccctccagtccccctcgcccgaaacatcgagtcatccaaccttgtcttctcgcttcctctgacacagtttctctcatgttcattttacaaaaaggcagtttacatacatatttctcacatgattctttaaaatggctagtttccctaggacattttataagatttcgtttgagcataactcaccgtgagtaccttaactgaggtagtcacgtaagcttcgtctaacacagcactgtgtaacctacaaatcatgatgttcacctaccgctttatttttatgtgctatttgataaacacttacgtaacacttctcatctctcagacattgatgtcaaagtgctttactgttcatttaattaaattatcatataatcctcataaccctatgaagtaggttccctttacagagataaggaaactgaggctcagggagattaaatagcttacctgaaaccgcacaattcaaacccaggcagtctggctccagagtctgtacttgtaaccacttcgccctgctccatccacgagatgtacttttttgcctcgtgagttgttttcctatgagtagaaacatacatgcataaatgaacctgcactcttatctggctttcttatagccaggacccacctctgcaaagtgcctgacctgactgggtgcatattctctaccctcttcacaggaaaatggcaaccaaatgacaggagatcacagcccctgggcccaggagcactgtgctgtgaccagccaagtcacccagaccggagtctgatatgcgacagcaaacaactctgactccttgggactgcctccccaaggcctgctcaggaatcgggaacttaaaatcaaccggaagcagagcatgtgcgctccagggtgcctgagtatgatggatggcacagctggaggagctggctgtgttgcagacagcacagccccgcctatgccaattaggttgatgggtggtgactgagaaacatgctggatttactcaaatagatcctcactccctaactcaccaactttttagagatcataacaaaaagaataaggatgagatgggaaaaaaaaaaagagagagagaaaaaagtgtgctttgactgccctgctgatactgtgaactgaccgtgcaaaaacaaaagcagttttcctcctaccaggcatctcccagggtgtggccagagtgcacagatagcccctgttaactctttagagcacatttccttttgcttccagataccacagtgactcagggcatagcttctagatctaagcgattaagagaggtaggtttaaagcccagctccattacaacctttgacaaagtacttagctccagcctctgtctcatgaaatgctactcctcatgtaatgctactccttagatgagatgctactcctcctgaccttacagcgttgaggtgcaaattaagtaaaataacatggtataaccactcagcagtggacgtaaaactcaacgcatgatagctattgatagtgtttttgataatttcagcaatgataaaagttttccacccttcaactgttcaaagtctgaagtagagggaaatgtagggacacggaatgatttagaaaaaaatgaatattttatgtttggcaaggatggggaaaaacacaaagtattatttttgacagctctgagttcacataatagacgacatttaaacaacgtataactggatacgtctaccaaatatggatcaccccagccttatccacttaaccatggcattatcattattctcttttaaaagcttaagacaaatgggccaggcatggtggctcacgcctgtaatcccagaactttgggaggctgaggcaggtgggctgcttgaggccagaagttcgagactagccaggccaacatggcgaaaccccgtctctactgaaaacacaaaaattagccaggcatggtggcacacacctgtagtcccagctactggggaaggagagacatgagaatcgcttgaacccaggaggcagaggctgcagtgaactgagatcctgccactgcactccagcctgggtgacacaatgatactctgtctcaaaaaaaaacagaaacaaaaaccaaaaaaacttaagataaatgttttccgtttctaaggcaaacaaataaaatctgttttcatttaaagtatcccatttggtttttttaaaccagttagctaacttcaaagggcagccaatggaaggactatcaagctggcaatggtctagtgtctaacttcaaagttcaggtagatagaaagccactgatggtcccactctacttctcggcatttggcatgaaatatgcttgagaatgccctttcattcagatggtgtgtttgcatggacacacagcactaaaatggtaccttctttcaatgaaagccagggagaagcctgaaagagaagtgtacaatgatctcaccccaagcttaaaattaacaaggaccctttggggtcacagctgagagcccccatggggcataatatgagtaggagaaatcctatctaaatgacaggagccctagtgtcatcttaatgtcattcttagtgtcaccatccttacggagatatgaagtgacttaagctagacaccaccaaatgtcaggggaagcagggtcagttattatagaagcaccaggggatttctgcatgactttcaacaagtcatttgacctttccaggttagactgcaagtggagtaggaccaactgcctgcaagtttgacagagtttataata

SEQ ID NO: 1241714 - DNA, 4001 bp, Homo sapiens
tttgctaagtgaaataaaatggattagaggaattttccaaccaagtgtaaaacttggatttaaaatagtagagaagactgagcttggtggctcatgcctggaatcccaccactttaagaggctgaggaggagggaggatcatttgaggtcaggagttcgagaccagcttagccaacaaagtgaaactccatctccactaccaacacaaaattagctgggcacggtggctcacacctgtaatcccagctacttgggaggcttaggcaggagaatcacttgaattcaggaggcagagattgcagtgagccaagatcatgccactgtactccagcctggacgacagagtgaactctgccatcaaaaaaaaaaaagtagggaagattggttagtatcttagggaagagtgagagaaccttcttacctggctcatggtggcaaagagcaaacatgaggttattatacgtaatactaaaacactgtcatccagtggtatctcttttgttctgtgtttcagttttcatatctctgaatgcttgagcatctgcgattcttgtagcaattaccacatatagaggccagatctgatcgctggatgtaatgtttcaattacagagaaaacgtaagtctctggcatatgtgtatagttactatagtatttccctgacctctctcttttattattttttttaaagaagaaaaacagtagcaatataagtggaattaaaattcggatttcagcttagggaaaattcaaagggatttaaacacatgtgactgtcaccactcctcacttttaacaaatttacatgaacggtgagaatctttcaagacataaagtggtgaacagcttcacagcacgaatgtcgcacttactgagccctcacacctatgagatgggcatttttaaccaccagttctcatctcacaggcaaagaaactgagtctcagagactaagtaacttgcccaagggcacaaagatagtaagaggtcaaatggtatccgaccctagtcttaactcaggcacctaaccatgggattatagagctcaaatgataaaaccacccaaagaaaatgccaatgggtccatacctcattttacactggcaaagtgaagaaaagcacaaactagaaacctcgagccagcttgaatttcccagtgaagctggcatgtcccctgattcaaccctaggaccccttctccagctgttaaataccttcattccttcacagctttagattccatctataagctagggaccccccacacagatgcttccagccttgacttctcacctgacttctcctggtgcccactgagcatcttcacttcaacatctaacaagactctcacacttaacgcatccagatttgaccagcgactctcccttccctgaaatgactgcggcaagaacccttcccatccaagatgatggcactctacccctccagtccccctcgcccgaaacatcgagtcatccaaccttgtcttctcgcttcctctgacacagtttctctcatgttcattttacaaaaaggcagtttacatacatatttctcacatgattctttaaaatggctagtttccctaggacattttataagatttcgtttgagcataactcaccgtgagtaccttaactgaggtagtcacgtaagcttcgtctaacacagcactgtgtaacctacaaatcatgatgttcacctaccgctttatttttatgtgctatttgataaacacttacgtaacacttctcatctctcagacattgatgtcaaagtgctttactgttcatttaattaaattatcatataatcctcataaccctatgaagtaggttccctttacagagataaggaaactgaggctcagggagattaaatagcttacctgaaaccgcacaattcaaacccaggcagtctggctccagagtctgtacttgtaaccacttcgccctgctccatccacgagatgtacttttttgcctcgtgagttgttttcctatgagtagaaacatacatgcataaatgaacctgcactcttatctggctttcttatagccaggacccacctctgcaaagtgcctgacctgactgggtgcatattctctaccctcttcacaggaaaatggcaaccaaatgacaggagatcacagcccctgggcccaggagcactgtgctgtgaccagccaagtcacccagaccggagtctgatatgcgacagcaaacaactctgactccttgggactgcctccccaaggcctgctcaggaatcgggaacttaaaatcaaccggaagcagagcatgtgcgctccagggtgcctgagtatgatggatggcacagctggaggagctggctgtgttgcagacagcacagccccgcctatgccaattaggttgatgggtggtgactgagaaacatgctggatttactcaaatagatcctcactccctaactcaccaactttttagagatcataacaaaaagaataaggatgagatgggaaaaaaaaaaagagagagagaaaaaagtgtgctttgactgccctgctgatactgtgaactgaccgtgcaaaaacaaaagcagttttcctcctaccaggcatctcccagggtgtggccagagtgcacagatagcccctgttaactctttagagcacatttccttttgcttccagataccacagtgactcagggcatagcttctagatctaagcgattaagagaggtaggtttaaagcccagctccattacaacctttgacaaagtacttagctccagcctctgtctcatgaaatgctactcctcatgtaatgctactccttagatgagatgctactcctcctgaccttacagcgttgaggtgcaaattaagtaaaataacatggtataaccactcagcagtggacgtaaaactcaacgcatgatagctattgatagtgtttttgataatttcagcaatgataaaagttttccacccttcaactgttcaaagtctgaagtagagggaaatgtagggacacggaatgatttagaaaaaaatgaatattttatgtttggcaaggatggggaaaaacacaaagtattatttttgacagctctgagttcacataatagacgacatttaaacaacgtataactggatacgtctaccaaatatggatcaccccagccttatccacttaaccatggcattatcattattctcttttaaaagcttaagacaaatgggccaggcatggtggctcacgcctgtaatcccagaactttgggaggctgaggcaggtgggctgcttgaggccagaagttcgagactagccaggccaacatggcgaaaccccgtctctactgaaaacacaaaaattagccaggcatggtggcacacacctgtagtcccagctactggggaaggagagacatgagaatcgcttgaacccaggaggcagaggctgcagtgaactgagatcctgccactgcactccagcctgggtgacacaatgatactctgtctcaaaaaaaaacagaaacaaaaaccaaaaaaacttaagataaatgttttccgtttctaaggcaaacaaataaaatctgttttcatttaaagtatcccatttggtttttttaaaccagttagctaacttcaaagggcagccaatggaaggactatcaagctggcaatggtctagtgtctaacttcaaagttcaggtagatagaaagccactgatggtcccactctacttctcggcatttggcatgaaatatgcttgagaatgccctttcattcagatggtgtgtttgcatggacacacagcactaaaatggtaccttctttcaatgaaagccagggagaagcctgaaagagaagtgtacaatgatctcaccccaagcttaaaattaacaaggaccctttggggtcacagctgagagcccccatggggcataatatgagtaggagaaatcctatctaaatgacaggagccctagtgtcatcttaatgtcattctt

SEQ ID NO: 1241715 - DNA, 4001 bp, Homo sapiens
ttttaagtatgttaaagcagactgtacacaacttaaaccagttttgacttcagcttttttaaagttatgtaattttaaagcccaatattatatcaaaacacaattgtaaagcactgaaatgactaacaagtgttacttttttttaagacttcatacagtgtcaaaatacccaagtattttttacttttgaaaagtttaacttcacccactttgtggagtcatataaaagtttactagttcagaaccaaactaaagagatgcatatttgaggacaccctttctagttaatccaatcctcctcctttcagcactacatttgcctaacgattcaccataggcatatgacatatatgacagcaaatactgcttaccccctaaatacacaacagtctgaagaacaggtgcaatactatttagacacacgctttttccttctaagcctaaatttgccctggaaaggtatttaaaaataaacacaaatacccaagaaagttaaataaccctttcaaaaagatgcagcaattttgagatccaggacatgagctgttaactaccaacagcttccaaatgtgcagcctatcaaaggttcacattatgaggatcgagtcaagctcaactatgaagggttccgagaacatctcactttgcttctcctgcaagagtaagtaacatgatataactacgtttcacttcaagggaatattaaatctcttcagtcgtttcataaatacagcatcgatcgtctggtttggtttttttatagataaagaaacggatgggggaaaggagatctagtggagagtactgtaaaaagaaaaattcagtgctgaaagcgttgatgagtcactaagtaaggaataactacagagaatccaagtgagtaaggcagcatctcaggtgagaaagtacttaaagttgacgatgggaaataaaacttcacaggtcagtcccaagtcactgtgcaccctagcagcccaggaaagaagcgtggctgtcaaggggcaagcgcgtaccaagtctgagggagggggccagatacgccaaatcggaaaggggggtggtccggaaaaggggggtaagatgcctatcctagtccctctcttcgggctcttcatctcaagaggaacaaacaagagcaaactcagtgttgagaggccccaaaccggactctcccacagagaggtgctcggtcccaagccccggaggcccgggaaggccgcctccggaggagcccccgcagacgccatactaaaagccaaaatggctgccccgaggaggcccgcaccgcgtagccagtgaaggttggggagcaagcttatgcgggaaagagggagggggactccaggaaaagccgttgagaggaccatcacaacctgagcagcacaggtaggttccgctcggcctcccaaggcgccggctccggctgagtggagtccccagccccaccccccggccgggaacccagccgccgcagctcccgcacaccgaccccaacgaggtacctgcagttcggcccgttccacctcccagtgcgcccgctccatctcgaaccgagcccactcgtgctggatgtagtgcagtatccccgggatagtgtactgctgcggccgggacagctcggggcctgccgcgggacccgctccctcggaggccggaggacccccgccgcccgccgctccgttccccccgggcgaaaggcccaggttccccccaggtccctgctgctgccggggaggggccgccatccccgggccgccaccaccgcctccggcaagctcgtccattgtgtgtggggccccggccggggcgcagggcgagacgccgacagctgggggaagggccggagagggtggccccgcgctggctgcggggcggaggccggccgggagaggggcggggaaggggtcgttgctgtgtgcctgccgtgggtcagagcagggagctgccggctgccgccattacaatccctcctccatctgcccgtctcactcactcactttaggggaagggggggcctcggcgggaggggtggggggagagttgggaaggggataggcggagggccgtcactagcgcacagcatgctgggtagcgaacgcagcctcacgcttaatcgccaaatagagtccggcctcaccctacgccggcgcactgagaacgcagcccgggtcgccgttagagggcggggaaagagctcgggctccgcccctaggcccgccctcagacccgatccggtgtctggccgcagctaccggacacctgggctccgactctgacttttggaagcgaggcggccttaggcttcctggttatcagtttccttttagcaggccgtccccgggcgctgtttccttcccaggggtctctcacccgtgtcccggctttctgagctggttgttaacctggctggtcgctctggccgaccgcatcccgtctcggattcctgacgtttctttttcattctttgagtgtttcaggcagtcccaagggtgggccctctttcccttcctgtcactcgctctgcctctggtttcttagaaccagtcagttctctgctggcaaatagccaagatcctccggctgtggttactgattcctcgtctctgtcttgagcctgggctttggtcccatttctatgcgctcggtcgcccgtcgtaacttattccactttgcgtcccctcttctttccttttctggaatgggttgtgggggggttgggagagggggaggagcgattttttttttcttgggagaagaagaggtagtgaattcctttagatcttgacgatgatgggtagagggagagaagtttgaaggagactggctagactaacaatttgatacggtagaaatgaatgggctcacaaatattgtcatcaatagactattttgatcgaaacagaaaataaaagcactgtgagtacaacttaaaatcctagatgaatgttctcctgggtcattaaatgtttaagtgaatatggccgggcgcggctgctcaagcctgtaatcccagcactttgggaagccgaggtgggcgatcacttgaggccaggagttcgagaccagcttggccaacattgtgaaaccccatttctactaaaaatacaaaaattagccgggcatggtggcgcacacctgtagtcccagctcctggggaggctgaggcacgagaattgcttgagcccaggaggctgaggttgcagagagccgagatcgcaccactgcactccagcctgggcgacaaagcgagactccgtgtcggcaaaaaatttaaaaagtttgaggaatgtaacatatacataagagacaaggctaatattttaagtacaatagtgggtacttttatgtgcttagtttcctagaaaatatcctaatgcactagtgtgtttctaaaaattaatatagctaagaagcatttgtttgaaaaataagacaaaaataattaacaacataaggaaattaggttcagtaattatattaatagcgatgcaggaaaattgcattgaaaatttgttactttttaaaattttttttctttactgcaaaagccaataaaacttgtactatggagtatgcactaccaaccaatcaggaagtaatttcaaaagagattaagtaatgcatcttattttatcacatctgctttactgttattacagtttaatggaaagcagattggacctgttactcatgctgccatgttttatttctatatgaaatgagatcttagattgcagtactataatgttaaggaccatttcttcaaattattattttatttattttttttttttgagacagggtctcactctgttgcctgggctggaatgcagtggtgtgagctctgcttgttgcaacctggagctccctggctgaggtggtcctcccactttagcctcctgatagctgggactccaggtgtgcatccaccaagcccagctaatttttgtattttttgtagagacggggttttgtcatgatgcccaggctagtctccaact

SEQ ID NO: 1241716 - DNA, 4001 bp, Homo sapiens
tcagccttgagtttcaaactaaggcctttctgaccgtgccaattctggggcctaggactctgaatgttgataaggccaccccagtcatctcctaatctacatcatgctgccttcctcagataaatatgaggactggagctccaattcttaaaatcaaaagagatggatttgaggatagagaaagaaaaagggtaaacagatgcttccaaaggcccaagcaactaaaccacttggtgaggagtggacagagaggagagaagacctagatgtcttgttataattaagaattagctcattcaaaacaactgagtaaagagcacagagacaatatctaagacctgaatggtgcttttaaagttttcttagctcttttcattttcattatctcatctgagtttacaacaaccctgcaatggagggaggtaaggccacgattatctccgtttgacagaagagaaaacttaagttcagagtgactaatcatttgtccatcagcactgtcatcagctgtaaagctgaaacttgacctcaagtctgtctgactctagaactgtgtagtgtatccacattatgtgattcgcacatctagaaatcggccccaaagcagactaccctcaaggaaaaagcaaagagaaaaacaggcagcagaatggtgagcccctaaatcctggcacttgagcagtgtgagggtgtccctttaagaacgtaacacacaaacccaacagccaaggtgttcagccaaaaaagaaaaaaagagaggcatatttctagcctgcataatcatttctggaccgattcccactagcagcctctgagacgaacagcagctcacagcctcggctgaagctcctccacccccagggtggctctgactagggcgcagctctgactagtgtgcaggcaaaaccccaaaactcaaaacaagaagtgaaaaaagtggagccaggaaaaattcgtcggcatcctccacagccttacaatccgcacaatgccagttccagggtcctggggtcgcccggaaggcaatcttaggagagggtggaatgagatggaagttcctgcggacctaccgatcctattctctcccacccagtccctagggaagcgtaataggaaggggagaaggttcgttatgaaatcctggggccagaaccaagggcagatacaccccggggactttctcctaaagaacaagatgtctttccaaattctccacctgcaggtcctgtcctctgtgaagatgaacggggtggggtggtgaggtggcggggtgttgtaaacctgaggaaaggttggagggaaaatcaagccacccacctactccagccacgttgcccggcggtgttggtgaggctcgatgccggcgtgcacggcaagcgcgaattcggaacctggcgcccttgaccaagcctgagatcggaaagggggcatcgcccagggccagcgccctgggggcagggtgccgtgcccgccagaaaagctcgcctcagttttggcagtaatgattttcctagaagatgccagagttcgcgaagatcggagtgattcgcggatttctgcgctcaagctagaggcgcagcgaccccgagctcccccacactgggagcctcggggcagcattctcggggcccatgccatcgcggggacggtgcggaaaaaaaggctccatcctcaactttctcggaggaaatcgctccgttctgcggcttgcccaatactgcccgcacaacgggtcccagggttggagagaaccagggacacgagtccctctctgcgcgcacaaagcagctgcgccggggcgcgcggccccctctcccgccacccgccaacttggaagaatctctctgggagcctgcctactcccctggcctcacagccacccgcctcggacggagcgccaggcgccccaacagccgtggcggctgcaaccgcatctcccgggcttggcctccgccctgaccgcctggctcccctcgccccggtcctaccgtgcagcctggctcgcgcccctgccgtgccagtgcgcggcacgcgtcccagagcacgaggctcctccccggggggctgccccgcgcggggctccgggctccggacaaggcttagccggcccgggtgctggctcgccgccgctcgcggctcccgcgccggctcctgctgccgcgcgcgaaaagggaggggttggggggaaactcccggcaactccaactccgggcgctggagctccagctgcagccgcgcgcccgcccgccgccgagtgcgagcgcctgcgaagcaaacctgcccgcgcggccgcctctgagcatgctcagtgccgccgtgggcgagcccgagcgccctggcccggggcaaagagcagcggctaggggctgggggctgggggccgggacccgcgacccgccccaggcctcggagcgcggaggtggcagaggaagggaaaggccaatgtaggggcgggggccctgagccaaagacccgggagaaaccgatctgggtgcaagagccggtgcgactttcacggcttgtgggaagtttgtgggctagaaaggtgggctgcttctgtgagcttctctgtgagactatattcgaaaggacaaccaggaaacatttttttttttctctaggaaaaaacgaatagacccagccgatgggtttttatcctgtgcgctccttcctttattcttacgatagcaaactcaaagatctaatggggcctgacaggcactgtaactgggggaaggcgaactggagagagctccgaaggcagggccgcttatctgctctcagggtcccttgctatcgggcaagaattagacctagtgttgctagattttctgatttttccagaaatgacggagtatattcatgtacaatatcctgatttgtaaaatcttgataacaaattcaattttctcaaaacaccctggactaaacaaaacatatctgcgtcccctccctgctgaaccccccagacagtgatttgagcattgtgattctgcactcttttagcgaagtggtgctgagtgctcactgtggtttgggaaagtgctggaaaggatccaagatgattcagaatatcttcgaagtactactagttactaggggaaatgggttttcctgacagtagagcgctacacttaaatgctggagcgttcaagaagaaagacgttactaatgtagaaagcggttgtaagaactaacttttgggaaacatcattagtaaaagtatctgtgtggggagtcactgcagggccgataacagtgccccggaaggcacttttgagcctgaagcaataggaaaaacccctaaacttaccctgtctttatttaaaattttgttatttttcatcatgcatttttgatattaattttgatttttttaaatattccattaaaatattaaccttgattactgaattctttggtgaacctttaagtgctgtgactcacctcaccctagcctggccctgttggggtgttagatggtggtacacagacctgcttgtttggagtgcaaggggtaagcattagcatagtgaaataggaaagagggtttgagctgtggatgggggctcaggcagaagtcctgactgtcagtctgtggctcctgcacttagtttgtagactacgtggagatagcagagatgctgggggaggagacaatccgaactgaattctgtgaagatggacagggcagcagacccaggaagatggtttggaggggaagaatgggagaaacggggatacctaggatatcataaaactgataccctaggtatccccatttggtagctacagttttatgaaaatcagagaaaattgcctgaaaaagtaagtttcttttgctctgcctatctctgtagagacatgtcatggggctaccttagtgccaatgagtagtgtgccggggtcctggtcttaacctcagccatttccctaccaggcttccatgggcaagtggctcaacctctaagcttcactttcctcatctgtggaagggaaaa

SEQ ID NO: 1241717 - DNA, 4001 bp, Homo sapiens
agacagcgccactgcactccagcctggggcaacaagagtgaaactctgtgtcaaaaaaaaaaaaaaaaaaaaaaccatgagtatattcttgggccaggtgcagtggctcacacctgtaatcccaacactttcggaggacaaggcgggaggatcttgaggccaagagttcgagaccagcctggagaaaaaacccatcgctacaaaaaaaaaaaaaaagaaaaattagcccggcatggtcccagctactccagaggctgaggtgaaaggatggcttgagcatgggagttcgagactgcagtgaaccgagatcacaccactgcactacattttgcaacagtgatagtcacaaacaaagtctctactcttaaaacaaatgtaattgtcaagcatcaataccacaagagagccctccaaacaaaaatgtgaacctaggccgggcgcggtggctcatacctgcaatttcagcactttgggaggccgagtcgggcggatcacaaggtcaggagatcgagaccaccctggccaaaatggtgaaacccgtctcccctaaaaacacaaaaattagctgggcgtggtggtgcgcgcctgtagttccagctactcaggaggctgaggcaggagaatcgcttgaacccggaaggcggaggttgcagtgagccgagatcgcgccacattgcactccagcctggcgacagagcaagactccgtctcaaaaaaaaaaaaaaaaaaaaagtgaacctccaatgaagatattcaatagaataaatattcggaataaattgaatggtctcctaaaaatagggctttatttttcccaactactttaaaggtatttttaactagcgatgttagattttctttcttaatcctactaaagtatagctgagtatcttcgtcttgttaatttagcctccagaaaattctaatttagtagtctgcaatgccgtaaaatgttaaactagcaacagatgaaaaaaaatccgagtagaaacagcaggcagggatctaaggtggagtaaaaatagccacaaattagaaaccaggagaaaaggtatatagtattttactttcaatattaattttcctccaaaggtcaagatttctgattaagagttctcagattaagatgagctagctttgagacactttgttgtgcgggtcatagctttgtctaaaaacaaacaaaaaactttgggaaacttttcgaaggcgcgcttccaaacttcaggcgccgagtctatttcacatgtggggccatgtgtcccacaagtgaatcgtttacaccacagatattcctcaaaaggagactaaaccaacttcgctctcttgttactttgacaataaaagaggaaccttactccaggtcagtcctggatgccaagcctagggactaagggattgcttttcctcttctcaaatgtaagtacaccagacgctgcccctccgcggggtctggagaggacgagcaactcagtggggattggagccgaccgctcggcttcagaggtcccgggacgcccttaggaggcagggcgcccgtacaggtggcggctaagacggttggggactggggtcgcccctcggccggagccacagggagaggcctgtgcgtggcagccacgggagcgactcacctcggcgtcttccttgcactgtggaagggaagggaactccagcttcacgtcctccatggtgctggcccgcgggctggtgggtggggtgggagagtgttacacagccggccgaccctcgggctggctgcggcggcggaaggaaggagggccggcggagcggagggctgacaggagggcggcgggattacaactaacacacgcagactacagggtcccagtgactccagcagcggcggcggcgaagacagggaagaggagggtcgggcgtcttacacccggccgccatgccgctgccgtctccctcccccagagtctccgtacccctcaggccgcccaggatccagcacaggaaccagcccgacaaccgtctccccgcctccttcccgccccctccacccgcgtcgcctcagccaatcccagcccacgctcgccttctgcccgccctccgccgccgccaggtgtcagcgcgccaccgccctgctccgccccttcgctagagcgcagacgcttgggggtggggggggcggagcctcggatgctgctaggccacagctcacccggcgtggaggaggcggggctgcggtgggacaggacgagtgaaggtcctgggaaaggcagtggggcggtccgagccagctccgccctttccagacaggacgtagagcccttctttaacataagaacaaacaggcaaaacaggctacccaccagtggcatccgaaaggaaagctatagtttctcccctctcaaaattctgcgcaatctatgctgagtttataaccaaatgactaataaatgaagagttcaatttaaaatcacgtggtgccatacagaaaataaaatacccatcacctttaagcaaagaattaaacggctcaatttaaaattttttaaagtattttaagagtacttgaaaatacaactcagtttagattacctagaaaatatcaagaatggcaactagaaaaaaatcagaaaaaggaactgatagctgactcagtaaattgtatataatactgtaaaatttcttccattattatattttgaaataaaaataataaaccagatggctttcaatatcttttaaaaggagtttgccagcctgagcaaaatagtaagacccccctctctaaaaaacaattttaaaattccctgggtgtggtggcgttatgcctgtaaacccatggtgaaaagatttgggccgggcgcggaggctcacgcctgtaatcccagcactttgggcggctgaggcgtgtggatcacctgaggtcgggagtttgagaccagcctgaccaacatggagaaaccccgtctctactaaaaatacaaaaattagctgggtgtggtggcgcatgccagtaatcgcagctacttagaaggctgaggcaggagaaccgcttaaatccgggaggcggaggttgcaatgagctgagatagtgcaatggcactacagcctgggcaacaagagcgaaactccatctcaaaaaaaatcaaaaataaaaaaagaaagaaaggatttgtacaccaaattgattctttaaaaaaccaccgccagcacaaaggtaaaaggcaagatagtcactccttaactaaatgcaaattataagtgaaaagatcacatagatatttgacttaaacctccccctacattctactttttgtcacataaaatgcactgccaacacatagaaatagaactgtacaataatttgagtatgagatggctaacttgaccactccattttctattttaactgttcatcttctaaaattataaaaaggcacataatatcctgctaggaagtttttaatttgaagaattattgtataattagctaggtcatgtatttttggttctttagtgtttatgaaactgaagttgtcttttcttttcaccagcatctttaataattattgatgcccaatgatgattcctttgtgtactttgttatagcttttattgccagatgatataagaatcatgtataggtaacagaaatcatgttttgaacatttctgacactcctacatcccctacatcatacactcttagccaggtatccatacatacctaaagagtccttggatgagcttgggaaacaataaatttcctgaaattatagtatacgcaaaattgtatgttagaatttttcctggaagagggtccagacctccacatcctcaacagggacctatcgtcttacataaaccaagaaaacccagtcacatattagcaaatattacgttgaatcatactctttaaaaagttatggatgtgcatgtatattttcaattaaccaacaatgagcttaatcacagtagatgaagaatatgtaaacactttctgaaaggaggagtacagacata

SEQ ID NO: 1241718 - DNA, 4001 bp, Homo sapiens
atcaatatctaacattctcccaagatgatgtcattaaggtagtaagagggccaagataaactttaaagatttttgagatacaaaaaaaaatggtgggtgggaaataactttcatggatttaaagactatcagttttattaggtttgccaacctgtcttcaggccacagttaatttgtcatgtagaggaagtgagagctatagattagttttcatgaatggtatagagagaatgaaattatttgatgaatctgaatcactgggactagaaacaattttcataccaaaggttcacagtttcagggtttatgggtacaagagagggcttcggatttttagtacttactgatcattagaaagtatcaaggttttaaaatgtttttctaacatcgattatgtttgaataatatgacactgagagaagctgcaaaaaatcatttggtagaaattaatcaaaaaattaaaaaaaataaaatgttcagtattcatctagcatttagttcttatttttccttttcataaaatgcaagagaatcaattttattttcaattatctaatgtatttagccccaaaagatgaaacatgcacagacagctttaatatgaatggcaaggaaacgaccaattttaatggcttggttttagtagatgaccagtttgaaagataatttacaatgctgaaatgagagctgatcatttttctcaaaacgtttttcaggttaaaaaaaaatctttattagctgtatcttcccttgatgacagggttcaggggcaagacttaagctagccaactcagactgcatcacagaatgcaaccaaatgtttgctcaattagtaagttaacatcataaaaataagttttaactgtggacgtttttagagcagcaaaactgccgaatctttaaaaaactgggaactgccacagctcttttaatgaacacgtgccccggatacgctaccaaggaactaataaggttttaggcatcgttttgttttgttttgttattactaatgcctgcaggctttcagcgttaggtccctctctgtaacccacagcagggcctagaacatgaggcggttgcgcgtgagcagtatttctttttttaactccagcaaaagccccgcaaacgataaacgctaaaagcccgattgacatcctccttgcccttccatctctcctttacgaagacggttataatcctggcgggaccaggggtggaatattgtggttctggagggacagagcgagtgcgtgagaacacggcaggggagggcagcaagacgtgaccacggagtaggagggaaggatgttgcctcttctagggcgggaagagactgcgagaggtgctgctatgcatgaccaaggctggcacgcggggaagatggtgatggccgcaggacagggtgaatgcgggggattccctgttaaggggcagcgttcgtggccgcctccggtgaatgattcgggagcaacgaaaagggtgaggcacagaacccgggaattcctgaccgaaagagaaaaaagggcgccgagaaacagggttattatgggatggctaagggggctccctaggaaaaattacaggatcttcctcacccgccaattgctgtacagtctcttcactcgccgataataagcgtctttgtccagagtcacagccatagccccggacgccgcttctcctcgggttccgagaatcacgcgaggtcccggctcagccacccgctctcggcccaggaatcccgcactctcccaatgacccggaagtatcgacctcaaagatgccctttccgcttccgggtcccaacagcgttaggttttttttttgtttgtttgtttgttttgtttttttccaaccctctttcggatggacgggggaaagagagaaagaaaaacgagggaaaatcaacaaaatgtgcgatgcaaagagtcgattttcgcggggtttgtcaacttcgccactgccgcacgcgaatcgacgtcgtcacgtgacggtctgcctccgcccttattaactctcagcccagcggcggtttccaggacctcagactttttgccgaggcggcagtccctagacgaagcgaaggaggcggcgcctgccccgcccacaagagctgccgcgcgcgggtgttatagctccaccccatctgcaaaggaagggggagcggaaagagcgggatctagcgtgggataaaagtgggactactacagtgtaactgggcatgcgcccctcctagaaatgatgggaatgcaaaagcccttgactgctccaggactcgagggatcctcggtgccaggatgctgggtcaagcgctccgccgggacagaggactcataccagggaaatggagcccagcctcgtgataaactacgacccaagctgggggaggaacctagttttcgaaaggaaaataatatgcgcaagctttaactgagcagtgggatggtgtaagtcagaggaaacagatgacttgaggggctctacaaacttttagttccttcccacaaccccaccccctgagcccaagtcgcggcagcatccttccagtcggccagtccccttgctgcagttcatgaaaactggcactattctatggcttcccccaaataaccgttacttcagttaattagaaacaaaacataaatggttcctgatgacattcttgctccctgtctcttctaaaaacttggagtttgaatccagaagtttgcctacctaccatttaccttaaataattcccttgcctttagccagctggacagtctacatttgtatataccctttagaggagtacagatgacttgtctgctgtaaggcaatttagtataaacagtattgaacttaaggaaagtggtgctgaaattacccaccattaacaactcaaaatcaatacactgggtttgagcaaacatagaacaaaggaagagtggaaaaggattaacttaaatttattaatgccaaggggaaagaaggtaacagttcctgaccctccagctgtatccacagttcggccaggaacaggctctgccagaggctagggccagcgctacatagtctgtggttaatggaggtgactagggaggggtgagcacaccagctgctctagtctcctttccttccccagaaatgaggaagtggtcatgtattattttaggagttcccctgcccacccaatcctctcataattgggagcaatcaggtacatttttttttttttttccttttcacctcctggagtcctggacttccccacatctcccctgcccctcccacgtttccatagtccaagggccagagtaaatgaaaatacagcagccgcccaagcaatggggcccatgctggggcttcagtcatcagcatcttcactggagtctgagttagctggcatcataggatcatcaatgagtgagaagtccctttctgagctatcatagccctgagataagtcatcatcatcttcttcatcctcatcgtcatcctcctcaggttgcagtggtggcaaccgcaaggtagtaccagaggcggtagtcactggtgaagaggggtagccaggggctctcaagcctggatggtgatggtggtgatggtgggggtgggggtggtggtggtggtgatgaagcatggtgctggagtctacatgaggggatgatggtgcaccacccatcacaaatggcataaaaggcaaagatgcagaagtggcactgctgtgacccaaagatgacacagactgtaggccactactgctgtgttggaacgtgttatgcagagatagagacccagtgcttccaccctgcatgagggccatcatcttagaaaggtctggtcgcatcctacgggcccgcttcttgctgctctctggtgcaataggccctggcaaaacccggttgaacaccgtttcagtgtgatgaccctaggaggagggaatagaagataataaaaagaaagaaaggggaaaaaagaaaagaaaccaaagccaacagagtcctagcttacaatgcttt

SEQ ID NO: 1241719 - DNA, 4001 bp, Homo sapiens
tcaatgcagtacctgcaatacctagcacagtgcctggcatacattcggtatcacataactacttgggagtactgaatgaaagaatgaacaaatgaatcttatgcaaacataccgtaagtgtgtacccaggagaaagagtttagaatgctcatgatctgagaaacagcctgaagcagcagtgctttcagaaggttttagaaagactccaggttcaattttatcaaaaggtaaacaaaccagaaactagcagtataatctagtagttcagactgtgggctccaccatgagatacctatgtgacatgggcgagttatttaacttgtttggtttgggtctcaactagaagaatggggataataatatctacatcaaaagtctgttattaaatgagttcaaaaaagtaaagcccttagcacaaaggttggtactcagtaagtcctcaagaacctttccatattattgctgcttaaataccttctttcctgagatgtagacatacctcccccaactccaggaaaattttaatttctggttgaatatgcttctagctaaaaacacaaaacccagagaactcagaagtcagtgccaagcacatgtctctactagcctccactagatggtgacagtttgggtgtggaattcccaaaacagaaaaggtgtgtgtgcgtaactcctatgtatgtttttacaccagaggaacgaaaacagcaagaaatgaattaactactgtgaaggaaagacatacttcccatctctgtagatcaaaaaagggagtaaatccctaggcctaattgaactgagtaatcttactgcacctctggaagagcacacaggagcccagttagcgagagcaacaaagcccagcatgtcgcctgccactgaaagaaaattctgtgggaacaacagctttaggcctccttgcccagacgccaacttccctttaaccagcccaagactttattttgacgcctctttgctcctgggtcttgctgtccccataaccacctccccctcctgctcctaaattcgtccagggtaacttttctccacttcagcagctccccagccacgactcccatgagggagagtcagatccacactcatagctggggtctcaaaaccaagcgaaaaaaggaaagtctgtatgtacgtgcctactttttgaaagaaaatagctggtttcggggagtttagcctggttaataagagaagtttttgagattaaagagcagccgaggcgcgggggctcccgaatgccgcggtgcgcacaggcgggctctgagatttcctcaggaaatccaccttctctaagccagccctgccccagcgcaagccccgcagctttgctgggctgagggcagtaatgacagtggcacagagggcctctgcctacctcctctgcacccatcggcacggcgtctggctcttccggtgctgcccgggcagcgacgcgggacggcgcgccccggaccgcgggtcaccaagttcccggccgcaaaccagccgccggtccccccggccgcgcagcccccactgctggccggctggccgcgccacgccagcgcggggctcccagcggcgcggctcgcggccgggtgacagcgggccggcgcagagaagcgcggggagccgccgaagccggcccgggctccggccagcgtcactcctgggcggtgcgcgctggtcccgcgcccctgacagccggccgagcgcgtcgatggcacaatgccggccccgccgcccccgggccgcggtgacaactcacccgggagccggcggagacctccgggatgggggcgctcacagcttccacgccgccgcttgcgcgcgcccgcagtcttctcgggtctaggcgaggccccgcgtgcccttgtctagctcgctctggccggcgctgtgggcagaggaagcgggcgggagggagggaggaggtggggcggtcgccggcttcggagaatagaacgcggcggtagcgacggctgcagcgcccgcgtcactgacccagctgtaccgcgcgggcgggggaggccccgcggaggggagggggcggggaaggggcgggaaaggggcagggccaggcgcgcacgcaacggcgccggcgtcgcgccgccgcgaccgccccgccgggaggccctgcacgcacgcgccgccggccgggccaggtacccaagggagaagcgacgcggttggggaggtggggggtccttaaagagacagtccctctgcgctggagtggatggggcggtggcaccgactcagctggactatgcggcgtttccagtgcgctctccagttcgtttactattattattatttgcatgattgaattactattatttgcaaagaattgtactgccctgaggtttacaaggcttttggcgcatgttgccttgttagctcttgaattgctcgtctgacctagctcgtctgaagcaggttattatctccctgttaagcagtaatccgaactgtggttcctagcctgccaacattaaagctgcccggggggtgggtgggggtgaaaatgcagattcggggccccgaatgacctccagccattgtgattcagtggggtcggacttgggaatctgtattttcactagcattctgaagtgagtgatccttcagcatactaaaagcacacaagggatctcaaggttgagaaaaccgcagttcagagccaggactggcagagcccgggctagaagcctgccacattcctaactgtatttcccctcttgagccttgccttctggggctattttctagcacatactgagtgagcagtttgtgcactgtatggctacatcgtttattggtgatctctcatgcagtgtgtcctcggtttatgtgtttacagggcccgtggcgccttgatggggaggactctggctttttatctttgtaccccagggccttgcaccgtgtcggtctcagaggtcctccataagtgttaaggaactcctacttgtaaatcagtggtagagtccacatctggacctacagacttgtgtctttgctgcagcttgggtcaggcaggcctcttctcccagatgctcttggacaaaaggatacaccttctcagggcctctcaccaggcctagttctagtaggctttcgggaaaagcactgtgaattaacagggcatgtccttgtgaagtagcttgaaccaaataaacaggatgctcctccccatgcacacagacccatccccaaaagaacccttcccttctgggccccacagcaacctgtggctcgttgctataatgcctttttcataagtctatccttgttctgccttctttcttccttgccttcttgggtccagactcattagagaagatgggcacccctcccttcctgctcatttggggccacactgcccagaccactagaagattgaaaagcacaattcagaactacctgggtctgcctcagagcacaaccaaatcagtgtgggcagcaggaacatgccaggcagacccaaggctcagggaggggacaagggggaaggaagcaagggaaagggatggaggaagaattggagaagatgaatggaggaaggagaaaaagaaagaaaggaaagggaagaaagcaggcatggatggttcaggtcagatcaactgccaaagtaactgagcccctggctgtgcactgaagtcagtttggccattaagaggctcagtaacttcatacaagaactgccaccttataaaatcccttgtgagaccctatgcagatctgtccatcactacccaaaaatcctcagtcgggcgcggtagctcacgcctgtaatcccagcactttgggaggctaaggcaggcagatcacgaagtcaggagtttgagaccagcctggacaacatggcgaaaccccttctctactaaaaatacaaaaattagccaggcgtggtggcacatgcctgtaatcctagctattcaggagcctgaggcaggagaattgcttgaactcaggaagcagaggttgcagtgagccgagat

SEQ ID NO: 1241720 - DNA, 4001 bp, Homo sapiens
actttgttgtcaaaccaggttgataaagccggcatcctgtattcaagcagaattgaggggtttatgggtttaggacagcctcagaaagccctacagaatatcagggcttgaaatcttaactcatctagcccaactctcttcttttacagatgagaaaaatgaacccccagaggggaatggacctgcctgagacagcggcggatctgtgaccagaacacagggcttctgactcccagttaaatgcttttattctgatacactttaacatttcattccctcattttacacccgattaccgagtccttactatcttccaggtgctgttggggagggggtcatgaagggggacaaagagatgaaaacaacacaattcctgccttcagggagctctttccctagatctgtggttcttagggagaaaaaataaaaaccggtgagtcagactcttaccttatattatctcctataggtgatgatggaagaggagaagaagggagggcacacttttttctccttaaggtttataagtttggcttcactgattctgggaccccacggtggccaaggacaaagggagacatggccatgctgggagaagagggggtaggggtgacaataatcaggtcactgacagcaggcctggctaggggttgggaacagtgacagcagcgcacactggtatggagatgtacaggtggcaagcctccaatcaggtgcattgtttttcattgggccccaaggcagttccctgaggtgagcagagcggtgaccttatccccactccaggggtgaggaggatgaggttgaaagagcttagggaactagctaaagccagtaaatgccagcacccagccaggaactcctactctagtgctctttctacccctgggggtagggaagttgtgttgggttggagggtggggataaagcagtagaaagaagtggtcagccacaagggtaggccaattcttcctccacgcagttttattttgatcgctacattctgccagtcatagagaactctgctctgaagaactagaagcactttgcaggcctgaatgagctcattcagcgcactcttgccagaaagagagagaactcctaatggaggctctgtctagggtcaccagcacataatagaaaacaggacccaggttccctgactctttgccctcatgcgccaagagatgtgatgcaaatcctgcctgcttctgtgagcgtcaagagtgtcataggaaaaaaaattgaggtatcttccaggacctccttccttccctgaagaaatgggttaatccatcctaaggggccttggcccaagagccaatcccttggcccaagagccatttccagggcagagaaatctcagagcagggggtaccacagccacctcagtcacctgggtgaacaggtttgggtgcgagaagaggggagcttagtgaagcctgctcagattttgctagtgtcgcaaaaccttggtggggactggggtaccagggagtctgaggctctaatcagtatttcttgccgtcagtaggcaggatgtctaggagctgcctgaggtcagggtcaaggcctgatgttgtgaggttatggtgtcttgaccccagttcatcagccccctcccagcacccccagcctgcaggatgaggggtagggagggacgaagtgcaagccttggcggagcgcaaggtgcggccaagcagggagtcagagcccctagccccgagagggctcccgtgccctccccagctcactccccgctccgtgcctagctctgcgctcccgcggcgcccccagaccgccccttacctgtcccgccgcggacggtcccgcctcctccgcggggctcgggggctcggcatgggccggtgagcgacggcgcccccgcctcgcggtcgcggtggaactcccaggagggctcccctgctctcgtccccgcgtccctgagcagccgccgcttcagcaccgcggacagctcccgcccgcagcccgccgccgccgcccgccccgccccgcgcggtcccgggagccccgcatcctggccgggccccgccgccgccgccgccgcgcagccctcggcccggcccgaggcggctccgcgccgacttgggagagcagcgaggagggtccccctccttcccgcctcccgccgccgccgcctccctctcgcttccgtgctccgtgctcccttccacgctccggaatcagcccaccaggcactccggacccggctccggggcggggcggggcgggaagtcgggggagcccggaggaggcggcgaagcgaggggcgcgcagctggaacccgcgtacccgcttcctggagccgagccctctttcccagcccttctctcccctcctcccgcgcaccccagagcgatgggaggcccttgggcttcttgaagcattttggagctcctaggctccaaagccagccctgagtttttaacattgatctgccctaaaaagaaaaacaaacagaaagcatttattgagcacctactatataccagataccaagcccgataatgtgtttaatcaacataagctcatttaattttcttaacaactctattaggcaatatagtgcccctcttcccctcttcccctccccctgcccccctccccctgtcccccttccccctccaattttgcagaccaggacgctgggctcacaaggatgaaatcctgtgatttggagattcagtgctgtgctgggaagggcacaggttttaaagctcatggacctaagttttggtcctagggtcccacttgctgtataacctcgagcaagttacctaacctcttaaagcctcaggttcctcatggacaaagtgaggggtcatatgaggacaaaatgagatgacatacgtgacacattggcactcaataggcactcagtgagtgagcgtccccctgagttttcccagcaagagccctgagatccgaatgcaggccttttggctgctttgtctccaccctgtgctgctctttatccacctccacctgcgtttccttttttttttttttttttgcatggggatgccctatcttgagtgttaccagtggatgaacctattcttcgagcgccttcacaaggtcttgagtctcaccaaagtcccaggaggtcaggaggagagagtattctcattttctgaaggtaagtgtgggtttgcaaagtaaaccacagagcaggctgcagctggggctggaagacacaaggaaccagggtctggcagtgggattccactagcatccactagtctcctagcatccagctgaggatgctatagcacatagcatggtggactccaggactccttcactcccacaggatgtgggcatctggcacagttcggtgtagctcctagagtgcacagtaggagccaggagcaagtccacatcatggggcttgggtctccttcccttcaaggcaggacagagaactcccttatcctggggtctgtctcagggctggtattggtgtttaacttgttgggtgctaaatatattattgctcttcctgtctctgccccattagtggataatgcagtgagaagccccctgaggccagcaagggtcttggaccactcatctcaggcccatacttcatcttcacagacaccctcctcctcaaaacacagacatacagacacacacacaacacagacacacatagacacacacagacacacacacaagacattgtctctgatgtcaggccaccctcctgtacctttgctttctctggccttcctctcacaggggctcatggccacctacttggccttggcctccctctgctgctcccctccccaccctggctgtgctccatgcctgggctgcatactgaaatactaattgaaaggataataaaaaagccagtgaagcaaaagccgcatataaattctaaatactaatgttgataattacatgctgctgcctggagggaaaactcaaagagaggctgttggtgttgtatcaagggccctggcctggtg

SEQ ID NO: 1241721 - DNA, 4001 bp, Homo sapiens
tataagtaatgaaaaatataataatgaaaaatgaaccaattgcttttcacccgttcccttattaaaatgtgattcattcagtttttaaattttacattaactctcaccttatgctagtgagagcactactcagaataacctcattgtgactcagttctctaaacattctgtaatatcctacaacacaattaacacgaatccactgaaatgctaaaaaatttctaattaggtaaatttattcacatgatttttcaaacaattttaaggctagctgaccaaaagtggtttgagtttgattttttaaaaattcagataagctttgttaattcaaacatgtggacaaagacctaaacatttccactttttacttattttgacatctccattcttcaccacgaaaaaacttaatgaggattacacctgttcccaccgccccagggggctggccgggctaaagccgttcagtaattatctcaggaaaagcccttaagagtctccacagctttccagaaagacaacttggagaaggagtcatgcattaaagcatgaaaacacaccaaatattcatcccataaaagctgaacactctcctctgaacatgtttacgatgtctcagtggcaggtactggagtggtgagaaggccaggtgtagcccggcatggtttaattgtattccccaactctaaaaatgatcgaacccatcctagcatagccaaatagtatctgcaacgaagccttcggacttctagaaaagcacacaaaagttgcttcaaataaaacaaactcaaaaaaaaaaaaaaaagtgatgccaagtgtggagcggcttgaaagaaccctcacgggttggctccgacttgctggtgcttgtacacaaccgtgcctgcggcgtccagctcagacgctccctttcacggagggagggggaaataactttcggaaacagcaggcttccacaaacgcgaatgctacacaggacttctcagcctcaatcaaataaggcgctaatgttcccagcagcactgattccatacacagcccccgccccgcccttttcaacagaagaaaaataacctaaggaggagaaggtgccaccgtcagaccctaaaggcaatttcagacaacaaagaccccaagcaatcaaaatggaattataatcccggccgtcggagcgcccccccgcccccgcggaggcgctaggctgccgcacccgccgccgcccctccagtgcccgggccgcccgtccccgcgccctctccagccccggtgcgccccgacccgcgggttcccgggtccccggggcgagcaccgcaccgctcacgatcctgcaatctctgcgccgcggctgtccgccttccagctcacgcggcgttcaaaatctttcccgcccaggcgtgacgcgaggaatgaaaacaatcagcggcccccgagggccggggcctgggcccgggagggggcggccggggcacccgggcacagcctcccgcgcagcgcctgcccgagccgggcggaccggcgggctggggcccggaggtgacacaaagaacccagagagacaaacgccacccgctggcgctcgctccaatccccggagcgccccgcccgctgacaagtttacggcgccctccgcgcaccccgctctccccacccgagcaaagtttcctgtggcccggctcggaccccggcatcgggtcggttcccgtctcccgccgcccccgcccccggctcagagacctttccctctctcgcccccgccccttcccctccctcccactctctccggggcgcaccggggtgctggggccccgcggccgcgctcacccaccgtccgcccggccgaggggcaagggcgcgggccggggccgcccgaggtcggcgccccgcttgcctggctctctggatcgcgccttttgctcgctctccctctcgctttttcaggtccggccgaaggctctgggcgcagctgagcgcgctccgctccttggcgctcggaaagcggcaaaccacgccccgcgccttccccgcccgccgcccgcctccgggtcccgcgctcgcccctcggcggccagtgtagagcgcgcccgccagcgccggggcggagcagcaggccccgccgcagcccggggcgggcaactttctccccgtcttttgggacatcagaggtggtgtgagggagagaccacctcgcaatgcaggttcgcgacccttttcttacccggggctgggtgaacaggagccacaagctccctcaaaaagctcttctggaggatttcaggaggggtcttctccaacacccgtagattcctgggtcttggaagtaggagttagagagcagatctgcgattagctaccagaccatgagcaagtcatttcaccccgcgggctctttgtaaaacgaggactttggattcgaaggcctttaaaatctggatccgtatttcgtagtgtggtccggatcttggggtcacctggagagaaggggaggcgtttgttaatgcagataactgggttcctccttccccttggatgaggggaagtggagagctgtctcagtcgtccgacctgacatacatcatccaggtctgaaaactcactgcgaactgcatccttggaactgcgtcttgcaggtgccagtttgattttccagcccataatcagtccctttggacccaggatgatgccacttgacacccacttacctctagcgctgtgattaccgtattactaaggcacttgaagttccaaataaaaggcgcacctcactattattacattaaaaagcagcggattttcaatatttctctattgagtttctatcacaatcaaatttaactttttcattttttagacagggtctcactctgtcgcccaggctggagtacagtggcgcgatctaaactcactgcagcctctacctcctggtctcaagatatcctccagcctcaaccccccccccccatttcatccatttcattccccccccccccccccccgcttagtagctgggaccacaggcgcacgacaccacaccggtaatttttgcatttttttagagtcggggtttggctgtgttgcccaagctagtctcaaactcctggcctcaagtgatcctcccacctcagcctcccaaagtgctaggattacaggcatgagccactgcaaccggccttaacttttcttaaaactccaagttcatatatatgtctgtggctacagaatcttgcctgaattatttaagtgactcaaactagatggcaaagagcagagattagacgtttgataatgcattcagcaaacatatattaatgggaaaaattagttgtaagttgtacccacaatttggaacaattgtttcaaaaacgtttacctctgtgactaccaggatgattcaggcaaattatttgaaatgcacattttattaatggtcagtagctcaactcttcacaaatgcagagttccttgtattcctagattatccttccaatggtatcacttctcagactacctagctttgcatgatttattaacaatggcttgagtcacaacaaagctctataaaccaaaaagaactttctgggtttttttgtttgttcgttcgtttgttttttgagacagagtcttgctctgttgcccaggctggagtgcactggtgcaatcttggcttactgcaaactctgcctcctgggttcaagtgattctcctgcctcaccttcccaagtagctgggattacaggcgcccgccaccatgcctggctaatttttgtatttttagtagagatggggtttcaccatcttggccaggctggtcttgaactcctgacctcgtgatccatccacctcggcctccccaagcgctgggattacaggcatgagccaccgcatccggccatatgctgtcttttcctaaaaccactttgcttgatgggttggagagttgcaagctggagagccaattttagggagaagttgggctctaggatttgtggagctgtatacaaagcatt

SEQ ID NO: 1241722 - DNA, 4001 bp, Homo sapiens
cacagaggatgaatctgcctcccaggggcattcgttaccaagtgtttatctttcaccgcacatactgactcttctgttatcacacagccgattgggctgttatctcgggcctctccaaaaataaatgtgtcccttttagaaaagccctgctttctttgtctttcttctgtctgtatggcctatttgtgcagaatgaaaataataaaaaaaaaaccttcagatttgtggtgatacatctggcttcagacacaacaaaagggttgagattttgaaaccggccaggtgaggaacacaggcgtcatcacaggaagggatagccaagccacatgagccaaggatgtaaagcagaggtcagggactgcggtctttcccctgtcttattattctttttaaaaatgacacctgcttgttaagcaagaggaagtgtttctgaattggacacaaacagcccattatcagctgacttggatttgagcatgcaaaggcagaatctcctccaatgatgtaacaatattctctccttaatttctctcgctgctgccctaggctgccctcccaggagctgcctagccagagcatgccaagaactcaaggcagctgagggaaatgtaactaagaagaaacagccattgctataaacaacaaaccaatacaggaataataatcacgaccaatacaggaataataatcacgaccattacttctgaggaccttcttttacctttatacacaataatcttaacaactactaggtgaaatagctttagcctcaggtgagaaaggcttacagaagcaaggcgaagtgcctcaggtaccatggcaatggattggcagggctaggaatcaaatccgtgtccactgcagcacaccatcaatgattttttggaataggatgtatggacaaaaggttaacataacaaaggcttgaaggttggatgcagtggaccatgcctgtaatcccagcgctttgggaggctgaggcaggtggatcacttgaggtcaggagttcaagaccagcctggccaacatggtgaaacccccatctctactaaaaatacaaaaattagccaggcatggtggtgcacacctgtaatcgcagctacttgggaggctgaggcaggaaaatcacttgaacccaggaggcagagattgcagtaagtcaagatcgtgccagtgcactccagcctgggtgacagaatgagactccgtctccacaacaacaacaaaaagacaaaggcttgagagctcaggagcagtcaggaaagccagcaccttgcttgctcactatttgcacagacacctgactcgacagtaataatgactgttacaccacaccaacatacagaaagatggtttttggccagaacctatctctaagtctaatcggttttgccggggttctaatgaagtatggacagctcaacagagacactgtcaccataagaaaaccaactcaaaatatgcctggggaatgaatacacgcagtttacaccaaaatctctctctcttgcaaatgtaagtatgactcacagacataggctgtactcccagtgaagttaagacttacatagggtggtttataaggggtgctggacgcagggggaacaggtggaacattcctgtcaccttccatttgcttgtagtgatgctcgggacaggaagggctgtcgggaacatgccacgagtggccatccgaaatggatttacctgaaacgaaagacagcaagcgacagtctattctctcctactgaacgggtcacgggtgacatggcatcaggttacagtatgaaaatgagttctgcagctttccttgcaaagcatgcatgtttgcaaaatgtcagtatgtcccagaagagaatgagatgagtcatgcaactcagcaacactgtgccttcactagatgggtacacaacggagcacgaccaacatgatttgctgtgggatgagtggcgttttggagccagggtctcgagtggtagggacactgagtggcaaggccgggtctggggaccaagatggcagaaggcctctcaggagtgaggggaagagtgaacatcaagatggacttgggaaccaaaaggctcctcagggctctccccgacccaccatggcagatagggatggggctaaggatgaggattagagctgcaaatcaaggaaaggaaggttttttccctcctgtggcaaatcatcagcaccctttaccgccccaaccccccacccctttccaccaggggatcccagtaaagcaaggaaacagttccaaaccaagccaccatgaagaaagcttggcccatgccaaaggacttcagttagatggagaaaaaaatcatcaaaacaggcaccatgaaaaattccctctgcacaggcctgaagggaggagagggggttggcatcgagacggctctggcttggatggggttttgtaaggagcacgcagttatgggtgagtacggcagtgtaaatacaccatgacacaaggaccaaggcgcatggtgtccacagaaggcagaggtagacacgacatgggagcgaggttgaggatgcagtgtgcgccacaggatgctgccatgttgacacatgcatgggcgggggcctaccagaagacgctttcaaagtttttgtggtcattttaagatatgcctcaggattttcagggatttctacatctgaaaaagaacaatgtcatttgcctcactggaggtgcctgaagattaatgcccaagtattaacacacagtagaaacattgtcagctggaaggagaaaactaccctttatttttttaattaaaaggattttgaaaaccagaaagatttttttttccagccaactcctgactgtccaaagcaggacactgggtatcaaagggagaagctcagtctgcagacactctgagaaactcaactgaaagggagggtaggcacagtggctcatgtctgcaatctcagtactttgggaggctgaggcgggaggacttcttgagcccaggagttcaagaccagctctggcaacatagcaagaccttgtttctacaaaaaatttaaaaactagctgggtgtggtggcgtgtacctatagtcccagctactcaggaggctgaggtggaaggattgcttgagccctggaggttgaggctgcaatgagccgtggtcgcaccactgcacctcagcctgggtgacagtgtgagaccctgtatcaaaaaaaaatcactgatgagtctcccagacagccagagccatcactgagtaaccttagtgtctgaatgtgaatttcattttttttccccctttcattccacctgtgatgagagtgagccaattctcaggtaagttaagagatgggcaggatagagcacaggaaaccacagaagtcagggtcggccacaagatggactcttggtcattgagagctggccgtgttgctaaggggctaaaaacatagccaaacgggtcactttccagggtgctgggaacccagctgttacctgacagtgcgctgtagtatgggccctcctcgtcctcttcgtgagaggaggagccccccacgtcgcctgtgtggtcccactccagggggatggagtccacgctgacaggggtctcgcagccagaccgctcgtgccctggggccactagatgacacagggactgaggagatgacggttcctcgctctctccccgtttacgccaagaatcagtctggatttctctggggtcttccatgtctgtttcattctcagaggcctccttttcatcttccaagccctaaaccacagtatccagttgttagaattaatcaactcataggcttctgcaattagaagagcatgagaagtctgcctatctagcagtttccaaaaataactgccaatagtatttctaaggcagctttaaaaagatcaggttcccaggtcctgtttctggttattccagtttagacaatctggagtggggcctaaaatctgttattttcccaaacctccagctattttttcttaggaaaaa

SEQ ID NO: 1241723 - DNA, 4001 bp, Homo sapiens
caaagcatgcatgtttgcaaaatgtcagtatgtcccagaagagaatgagatgagtcatgcaactcagcaacactgtgccttcactagatgggtacacaacggagcacgaccaacatgatttgctgtgggatgagtggcgttttggagccagggtctcgagtggtagggacactgagtggcaaggccgggtctggggaccaagatggcagaaggcctctcaggagtgaggggaagagtgaacatcaagatggacttgggaaccaaaaggctcctcagggctctccccgacccaccatggcagatagggatggggctaaggatgaggattagagctgcaaatcaaggaaaggaaggttttttccctcctgtggcaaatcatcagcaccctttaccgccccaaccccccacccctttccaccaggggatcccagtaaagcaaggaaacagttccaaaccaagccaccatgaagaaagcttggcccatgccaaaggacttcagttagatggagaaaaaaatcatcaaaacaggcaccatgaaaaattccctctgcacaggcctgaagggaggagagggggttggcatcgagacggctctggcttggatggggttttgtaaggagcacgcagttatgggtgagtacggcagtgtaaatacaccatgacacaaggaccaaggcgcatggtgtccacagaaggcagaggtagacacgacatgggagcgaggttgaggatgcagtgtgcgccacaggatgctgccatgttgacacatgcatgggcgggggcctaccagaagacgctttcaaagtttttgtggtcattttaagatatgcctcaggattttcagggatttctacatctgaaaaagaacaatgtcatttgcctcactggaggtgcctgaagattaatgcccaagtattaacacacagtagaaacattgtcagctggaaggagaaaactaccctttatttttttaattaaaaggattttgaaaaccagaaagatttttttttccagccaactcctgactgtccaaagcaggacactgggtatcaaagggagaagctcagtctgcagacactctgagaaactcaactgaaagggagggtaggcacagtggctcatgtctgcaatctcagtactttgggaggctgaggcgggaggacttcttgagcccaggagttcaagaccagctctggcaacatagcaagaccttgtttctacaaaaaatttaaaaactagctgggtgtggtggcgtgtacctatagtcccagctactcaggaggctgaggtggaaggattgcttgagccctggaggttgaggctgcaatgagccgtggtcgcaccactgcacctcagcctgggtgacagtgtgagaccctgtatcaaaaaaaaatcactgatgagtctcccagacagccagagccatcactgagtaaccttagtgtctgaatgtgaatttcattttttttccccctttcattccacctgtgatgagagtgagccaattctcaggtaagttaagagatgggcaggatagagcacaggaaaccacagaagtcagggtcggccacaagatggactcttggtcattgagagctggccgtgttgctaaggggctaaaaacatagccaaacgggtcactttccagggtgctgggaacccagctgttacctgacagtgcgctgtagtatgggccctcctcgtcctcttcgtgagaggaggagccccccacgtcgcctgtgtggtcccactccagggggatggagtccacgctgacaggggtctcgcagccagaccgctcgtgccctggggccactagatgacacagggactgaggagatgacggttcctcgctctctccccgtttacgccaagaatcagtctggatttctctggggtcttccatgtctgtttcattctcagaggcctccttttcatcttccaagccctaaaccacagtatccagttgttagaattaatcaactcataggcttctgcaattagaagagcatgagaagtctgcctatctagcagtttccaaaaataactgccaatagtatttctaaggcagctttaaaaagatcaggttcccaggtcctgtttctggttattccagtttagacaatctggagtggggcctaaaatctgttattttcccaaacctccagctattttttcttaggaaaaaaaagctgaagtttgataatctaagttaaacaactttatctaggagataaggaaatggtggccaaagtttcattgatggttaatggcaggttcctccaagaatcagactatttttgaaaaggacatttgaatgttctgggtaagactcaaacttcaaccagatgcaccaggttctttctttcttatcctccaacttaattgctcagtgtctgtattctgcttgtgtcataacgtctctttcagtctaagaaaaatgactctaagtggctgtacttaaaaatgagaaattgtggggtaatttttgaggctgtgtctgatgaaataactacatttgaatgtggccagttggagacacaaaaaaagaaagagtggccagtcgtatcggtcaatggttgtcattcaagcttcaggcacacaaaggcagtacgctttgaacagtggccttaactccacctgaacttcccaaaagggcctttcgtctggggaaacatcaaagttgcttttgaaactcttgtgttttctcttccaaggtgagaacaaagcatcagaaaggcacaaatactaaaagcttccagcctctaagaaagagggaagggcaaatacattcctaagttactaatgtaataaaagccagaagagttcttcaagaattctaggggtagtgacgcatgccagacaagcccagccctgaggaatacttaaaagcgactcgtggagcatgcgcctcagaagtgccatgctttccactggggaatgggaacttgtaagttactgtggctctatattaataaaagtggaaattaaaatgttttgatatagccctttcttttcaaccaaaaaataaaccataattaaccattataagacaggtcccctaattctttaaaaatttggtctcacgtaaactctgagcagcccaggtgccatttctaggcagcagtgcccgtaccggagtgcaggaggtgagccgccggtggaaccgggagacccttccaaacacctcctggcagtagcggtggagttcctccagctcatcctcaatcagcacagcatccaggggctcgctcttctgaatcagctgctccccaaacacaatgagctgatcaatcttgttggtatttaatgtaatttcctgttggaagccctgttgagagaggagaaagaaaggatttcaaagaaagttaccctgagcttccactgcctgtttcttctaacagggccatagaaaagcatccaaatgtcattattgttgttttccttcacctactactctagctttagtttttaactaagtgacaatgacattttaagaattttaagtgattgtctatattccccctcacgggcactggcttttccaattaaaataattctaaaagtttgacacgggtggacatttactgttattaggtgtgagagaaagaacttgccatggcaaaacttgttgggaacagaacatttcccataataagccacgaatgggcatttgcttttgctgacacaataatattcactggtgctgttatactagggaaggcaaatttccatttctcaacctcttccaaaatctggccaaggagagaattacagtgagattagcctgtcatacagatatcagaaacaatgggagagcggacctctgttcttggccccactggtgacacccatactcctggaccgtaaagaacagtatccttgcacgtgataatctggtagtacacaggtgggatgtagcctggctgctttaagaattctgaaatttgctctcagagtatcgtgtgaaatttgcacttggccagctctcccacgcaaag

SEQ ID NO: 1241724 - DNA, 4001 bp, Homo sapiens
tgtgacagtggctggagctaaggctggtgtgagcttgtgaggtgtgacagtggctggaactaaggctggtgtgagtttgtgaggtgtgacagtggctggagctaaggccagtgtgagcttgcgaggtgtgacagtggctggagctaaggccagtgtgagcttgggaggtatgacagtggctggaactaaggctggtgtgagcttgcgaggtgtgacagtggctggagctaaggctggtgtgagcttgtgaggtgtgacagtggctggaactaaggctggtatgagcttgcgaggtatgacagtggctggagctaaggctggtgtgatcttgggaggtgtgacagcatggagagctaaggctggaaaagagagtggtgcagatagtgggggacttttgaagccaggtgaagtttgcttttcctttggtggacagtgagagccacggaaggttttagaggaagagaataacatcatgggacccacgttaggggtgtgcctcatacatgcttgtgcagttgccctgattgtttgcatacgtgtctccatgaggctgggaaccctcaagagcagggtgggcctcacccacctgcacagccccagccctggcatagggatggcagaaagcagggggtattccactcttgggtgatctgtgagggagcttcccagacagaaggtgaagggagcacagcagagagcttgaacgtgacagggctctgcaggcacaggaaacggtgtgaggagactccatttccccagttgcaaatgcagacaatggctcctgcctctggatgaggcggtgacactgaaatcaaacactgacttggaaaggtgatgaggattgttaattcccacggtccacttccagaaagggcatgagatatatgcaatatggtgcacagtgcacagaatcgagaagacagcacacacaaaggaaacacacaaggaaccagctgtggggtcaccactgcttccagcctggctgggtgactggtttgctgcgggagaaggcagcaccccaccccacactaagagcaaccattgttgggtgataaattagaattatgggatatctaaatggatgtgaccccagaggtgtggaagtcaactgctccatttgcagatgggaaaactgaagcccagagtggggcagggatttgaccaaggtcacacagcaatctagcatcagcaaggagattataactccggcctccgactcttagctcagtattcttccctcttgtccccaggccacgggcgacccaccctcagacaggggcaccacgatgccaggccaggcactgggcaccagcacttagtgctacatggtcttgtgccaggtggggtgggtaaagccagactatggttctggagaagctcaggaagtcactccttgctgggcagagccccttccccgctcctctggaggaagaccttggccaacccagatctggcagggaccccaaccaggcagaagcagagaaggggtgggaagccccccagcaagggctggggacccaccaggctgcacgggtcccccctgcagggacaggaggatgagaggacaggctctagttccttgtcatcagagtgtgttccaaggaccagcaaaaatggtatcacctggaacttgtcaaaagcaaagtctcggacttcacctccatgacccgatcagagtctacacttaaacaaaatctccaggagatctgtgtgcacatcagagtttgagaaacattggtttagtccaccgttgcctttcacagataggaaacctgaggtctgagggcggggtgggatggggccaagaccacagggccatctgaggccacgcctctgcatacctcggtctcccacagcctggcctccagggccgcgcggggtccctgcgtgttgtcattgacctgcagctggtcctgcacagccttcatccatgcctgggcatcctccacgctcctgtcaaagtcgtcctggggctgctgagtcatggcacctgcaggggctgaagaaagggccacagataaggccaacaggcaggaatgtagggggctgcaaaaagacccccggcaggacacctgggacaggcccactcccaccaccaaccctcccctggtgctcccagttgggcaatatggccagaggtgagcacgtttgtcaggaatggaattaggcagggaatgaaaacaggtctggcctctgggaaaactggcctagggctctggcctggcaaaactgctttgtctttggcctctcaggttccctgcttcctcttctcgaagcttgaggcccggaggcaattctcgtctgtctattcagattgcacgctctccaaaagaggacgtcaaaacctgcagtccgaaacgtctggacccataatgatcttgatttgaatggatcaaagaggcctcaacctaaggaacactgttctgggcatgggccaagctgacaccagccctgagctctccctgagatgaacttctcaggctggggatggtcgtgttaggttcatgccatccccaccactccaccaacctgggtccatgggcaggtcctgctaaagttacccactgagccactcccctctgacctctgcgcagcactcctcgcaaccactgaaaacgaacataatgctcgagatgcaacccgcttgctatgccggccctaggtaacacctgcctgctggcataggtcacccaccagagaccccttttgctggactgtccatttgacttcccctgggctatggctgcaaagcctcagattttctcctgtgactttcttaaaatcccagttagtccaggcaaaactcttctgtattccagttctagttgtctgcatatagcaaccatgtgactgctttgaactaaagttatttgtatttgcattttattcaaagggattgtgtctggtttatcctccagtctcccacaataccttgtacagagtaaggccaatgttgttaaatgagcccagaatgggtataaagtttaacacatcaaaaaactcaacatggcattatttaaaatggcaaaacaaaaccagaaacaacccacatgcctaattataggggattgcttaagtaagttatggtacacttgcactttagaatattatgcagccagcaaaaaggaggcttaaaatgaatttgtgaatggtaatttttaggatataatggcaataccaaaaaagagacaaaattatatattaggtagtcacaactcaacaactagtaaaagcaaaacaaaacattaacaaaaactacactcatagaaaaaggctggggccgggcatggtggctcatgcctataattccagaactttgggaggcttaggcaggaggatcgcttgagcccaggagttcaagaaaaaggccaggatgtcttgccattaaagggtctatgtgatcaagtcagggctgtgtgcagtggccttagccccttccaggcctggcttttaagcacattccatgggaacctcaggcctctctctccctggcattgggggagaggcacagtaaccttgaaggccacttggttgagatgggtaggaccaccattggaagtttgtttttttttcccttatttttctctattaagcacttagaatttactttacaatttttattacattacagtaaaaatcatcactattaaaaataaaaattgtcttcactcatcagttagtaagtatctactgggaagctgggcaccatccccaggccctgcacggggccagaagaagcttcggggagaacccacaagagagaaggagaaaatggaagaggccatcagacgcgtgctgggccaaaggatgtgggctggccagggggaggtgggcgacgtagcgggctgtgctctggaaacccgtcctgtgattctcccagtgagttgctttcctttcagacctgttttgactttttttgtaacaacttaatatgttccctgtagccactccctgcctttgaatgctttacttgaaaagtgcattggatgtgcaagcattta

SEQ ID NO: 1241725 - DNA, 4001 bp, Homo sapiens
cactttggaaggccaaggcaggaggactgcctgagttcaggagttcaagaccagcctgggcaacaaagtgagacctcgtctctaaaaaaaaaaaaatattaataatggtattagtgatgagttatattccgataagtaaaaccaacttccaatttttaataatagaaaggaaggcagggcacagtggctcacacccgtaatcccagcactttgggaggcagaggtgggtggatcatttaaactcaggagtttaaatgagaccagcctgggcaacgtagtgaaacatcgtctctaccaaaaatacaaaaaaattagccgggcgtggcagtgcacacccatggtatcggttactcaggaggctgaggtgggaggattgcttgagcctaagagggagaggctgcagtgggctgagatcgtgccactgcactctagcctgggcaacagagtgagaccctgtctcaaaaaaaaaaaaaagaaaagaaaaagaaagaaagaaaagaaaagaagacacaaagtatggataattctgaaagttatattttataaagaataatctatccatgattaagctactgcagaactgcagatgagaaaaggtgatggactgtcctaggtagtggcaagggaaacaggagtgaaagaatttcaggaacatttcagagatggagctcagagtacttgatgatttattagagactcttggaatacagtattagtaggatttactgtgtcagtttagctatttatccattaacagtaacaatagtaggaaacacatactgtttaccataggtcaagcaatgttgtaaacattttacatggattaactcatttcattctcacaacactatgaagtatatttataaccatccccattttagagatgataaactaaggcttacatcagttaagttagccaataagtatcaagaatcagtaagaggttagatacaagatttagacccagatactgtaattccaaagctaaagagctcttaattgatcaactaaatagttgtaaaggaaagtaaacaaagtcgaaagcaggcagaatgtagtaatgtcaagagcccggtttaatgaagagccacagtgggggaagaggatagcagtttggctgctcaaaatcacatgaggtgttcataaaaaataaataaataaataaaataaatctgtattaaatccaaatccctgcagatgggagataagatttaactttttattttcttttttttttttttttttaaagccctgggtaattttgtggcggaaccaagtttgggaacctgtgtaataaaagatttctaagggctcttcctgctttaacattctagttgacattgtaaatgaagttcccagaaatcaaaggagcgagggagggatcctagctgcaggaaaacggctatgcattcagagtccacaccgtttatgctcccattttactaaacggtccctcatagggggagggatagaacaggcaacggaaagaaggatgtggtatccacgataagcaggctaaaaaagcaggcttttaaaaaggcttttctagcacgatttgcacaaagaaccccttcttgactatatatatttgtgttcatccaactggattttgaggtggattcctcagacccgtatctggctaatgatggatttcaatatattttctctaagcaccccgaagcgttgcacgaaacctctaggttgtggcctgcccgccccgaggccaggtgaatccggctcagcagcagaggtgtctgcaattacaccctctaatcccctactgtcagatatgaccctttccgcacatacctgagggccctctggtaagattgatctcttcctcagtgaccaaataatccactcttccgttcatgttttacagctcgtctggcttcctacttgggtcagctggagtgcagcacaggtgaaggtgaatcaatctcggcgctgcgcccacagcacagcggtttcggtttcagcagcctcgagacccggaaaaggaagcccgaaggactcggagcactgggaatgctgggaatcgtggttcctaccgccaatggattgcagtttctcaccggttcccaaagccaagcatgaggtgagcaaggggcaagttaccattctaatttgccattggaagcaagtgggaagggggtggctagtaaaagtaagggacctaaataaattgatattgtcgagaaaaaaaattttaaaaaaatctcctgccatcctagaaaatctccacaaatgtagaaaagaaaaaaaaggtgtattattctgtaagcatcgaaccagaccggaatgggtgttacaggcaatccactaatgagattgcaaagagagacaaaaatctcacattttatgtagccaaagcacacgcatcttctcatgtaagacgagttaacatggtttggtattcaatttttggtagttcaccgttggagtggccgcctgtgttggttaattgcctttatccaaaggaaaaataaaacgttatctctgtgacaaacaggtacttacggcttggagcaaggcgcttcgggtaactcccgcgagcctggaacataggggcactgtctaccttgatacttaaatttcaaggagttggctcccgggacctgacgaaaacaattcctgggttttatctgacaagaggcttatttagcttttaaaaagatacacacacacacacacactacacacggattataattacaatttgctcaagaaaatgttttaagaaaggggggtgggggaatgtctcattcttttggcaactgggaaaattcaatctttttaatgttttaactcttacaataaggttaacgcatggcttaggtataactttaggccagtcttcctgacttttggaatgagacattccaaactgaacttgaatgaaacttcaggggtcaaaaacacaaaagcctaaagagccaggaaggtgacaaccttgtgaagcaacctggagttagaccacagggattggtggggatcttagaggactagaaagtgcaaggccaatgtaaagacatttaaatttagagtaaaaaaccaaagcagcagctactatgtttaccaaacagaaggagataggggcagattcggcaggaagacctcttatttgctcactctgagagaagttaagatggaatagtggaggctgagcacagtggctcacgcctgtaatcccagcactttgggaggccgaggcgggtggatcacctgaggtcagaagttcaagaccagcctggtcaacatggtgaaaccctgtctccactaaatatacaaaaaattagctcggtgtggttgcaggtacctataatcccagctactcggggggctgaggcagaagaatcgcttgaacccgggaggcggaggttgcagtgagccgagattgcaccattgcactccagcctgggcaacaagagcgaaactttgtctcaaaaaaaaaagatgggatagtggaaataacacagattatgacttacaacttgggctcaagtttccattccattcccttaaacttgtctgtctttgagcaaggaatccaacatctctgaactctgtttccccatcttaaaatgggattgatagtagctcttcatatgttggttggatgagtgaataaaatgatcattataaaaggcagagaatgataaattaaaaaaatgtgtaatataaataaatgacattgggggctgggcggggtggctcacacctgtaatcccagcactttgggaggccaaggtgggcagatcacttgaggtcaggagttccagagcagcctggccaacatggtgaaaccccatctctactaaaaatacaaaaaaattagctgggcgtggtggcgcaggcctgtagtcccagctacatgggaggctgaggcaggagaatcacttgaacccaggaggcggaggttgcagtgagtggagatcgtgccactgcactctacgctgggtgacggagcaagactccatctcaaaaaataaatagataaa

SEQ ID NO: 1241726 - DNA, 4001 bp, Homo sapiens; identical to SEQ ID NO: 1241725

SEQ ID NO: 1241727 - DNA, 4001 bp, Homo sapiens
tggtatgccaaattcatatcaatttcaaatatagttcaaccttttcaagaatgttctaaaataggaatcgaaatttcaactcaaatctaagaaattctactgctggcccagatatttctagaatatttctatagccaatttaaaagactcaaaattgcaattagctacagcttatcaggttcagaaagaatatcagcctacctcattttcaccaatttattctagcatttcaatgttaccttaatttgaataaaagtatcaagagagcattatgagaagaatatgaaattgtgtttctttatatgccaagacttcatatatctggataaaacttttccctaaaaagacaaagctaataggaatcatggaaaatgaatgaagggactatgaggtattccagaaaagtctgctctctccagcaagagggacattgaataactttgtctttagatcacataaatgactcaccaatctgtgtgacttatatgtgcattacaactacacaccatgcacacatacccaaatcccttctgtgtatatcatttacctctgtcccttaaccaggtggaatgtccttacttcaaggttagagtattagaggcatgagaaattcatgctggaacacacctcagctacttttagagagttaattacatttttatcatattcaatatacatttattgaaggcccaatatgtgctcagttctcacagcataaatctttataggcagtttttattaaatgtgtccttaccattcagagctaaaagaaaatcaagctattcttatttcagagatttcctatccactgtcatctcacatcacgtctcagtgaaacactgtgagaagtgttcttggagtgttatcaactaaaaattctgcgataagtacggctttttgcacaggatttcacactgaataatatagtaacatctagaaattcctaacctagaagaaaaaaagaacattttgcaagatatttttaaaagcatgacatgtgcacaaggggcttctcaaacagaatccacagactcgtttttcaccatttcacttgctcagaactattgttttgaaatatggaactcccaaacgtggatcctccaaagctttatatattgaaaatattcctaaggattatatctctcaatcagaagccagtatgtgggaaggtataagagagagaaaaataaaatccacatgataactaaaaacaagtcaaaataaaataagtagaaatgctctttggaggaacgcagagaaaatgatgactggctagcttaccttgcttttttccattaacagtttctaaagtaccagggagctggctgtcaaagccatgttgaaggccacttctttgcttttcaaggtgatgctcttcctccgcaatagaagaaagcacatgtggtaacttgcggtcatcactggcccaattgggccactgggacattgtggaacatgagtcctttgcatgttggctaaggcttgggcttgaattttgggcagagtcctgcaaatcactattacaacatgagaaatgatccacttcaagaaacaaggaatttgcatcctcttgactccaatcattgtcttgttcttcatcttcaaagtacgtttcctgaatctgaatattatctaagtcctgatctagtttgtcactcaatttagagtcttgtttgcttatgttaaccagcgaagcagataacatatctcctgcttgctggagagcttcataaacccgagatatccaggaagagaaaggctggaagaagttctgaacatcctgagacgccatggccaacaccatggccagctatctgatgtctacagtgtccagttgttcagttccttcagtgctctggattgaatgtgaactatagaataagcatgttgagaaattaatttggaggtctcttaatggctgtgaatatttcactctcaaaacttccagctgaaacagaggaaagaaatacttacacctgttaaagttacaacctcagacccatcaccagatacctacagacgatgtcaaacagcatttgggcacaaaaagggatcatcaggaaaatcttaaaatagttacataaaaatgactgtgaaagtctagatgtagattatttcaatgcctattcacctccatagccatgtggaaaacttccattagcagtaatgggttctgttcacgtggactgagagaagtctatccccatagaccatccttaacagtgtgaaaaggataaatgaatcttcattaagatccaattgggcatgacatttcaaaacgcaaaaaaggtcagatgtttcatctacaaacctgcagatcccaaagagctgactaataagcatctctgctttatgacactaaagtttatacttgcaaaggaagtatgtgtctggaattaaaaagctttaaacaaatcttaaaataggattttatatttttatgcaatctctagaaatcatatctattcttggggagcaatcgctgaaaaactgagggtggcaaatggattatctagcttactgaagacatgtccctggaatctcattgcttttgtctatgttccaacctcccgaagatagatagctctccacaatctttcagactcctaaatcacacttcatcccacaagatttacagcctgaaggaagcagctccaggatatcaacagaaccacaggacactatgaagaccccagagctaaatatttatacttttacatgtatatgtgcatacaatgtatacatacacatatgtgtgtatattatgtgtgtatatatcttattgctattacagtgttcatcaacagctcaagatgaacgttacaaatgactagagggcctaacacactgcttaaacttaattacccaatatcttgtatagcaataacttccttttaactaaatctactagctatcccttagtctcttgacctcagccactgcatgtgatatgactacttacattctaaaaattttttattagccattcatggatgcattgacttattcaataaacaaatattgattatctattaaatgctggcacaatgccagggataaggtaatcctgagggctttgcctccatacagcccacatttcagttacaggggaactgagttctccacatttcccccctatgctgaataattcatgtgtcgctctttcaggctcctccttgtcttcccaccacctacatgtatacaaccaaaacttgtcctatggcttcccttccctgttatattcaccagctgcaagagtaggcccatccctacatttcaattaacacctttttgaaactccaaaatatacatctccagcctttgctcaatttttctttccaggcttgtatctgtggctgtcaaagccaatgattctcaaactctggtgtgtcagaaacacctagtgagctaataaagaacacaaaggcccaggctggttgaaggaaaagggcctagtctgaaccttgggatttttggcaagtactccaggtgagtctgacacccacggaagtttgagaaatactgatagacttggatgtctcactaaaatctcaaattcagctcatccaaacctagtgtatcactttgctacaagcgttcatcactctagactcacaacatgggggattgtgaatttctctcttcaacactaccttcttccattccaaactccgttagcttttggtctccaaagattctctttcatcatattttgtacagttatctcattccccacaccctagttccctcacatactacatacctagttcgcttcatatgctcttcttacccagactcaattcattctgtttgctcaccataacctgattttatatgaggtttacacctgtctcctgctctagaatggaggctccctggatggcagggattgtctgtttagttctctattttatccccattgcctagaagtgtgctgagcacatagtgaattctcaataacaaatcctattaaaaatcatgcaaaaaacaacacctagcat

SEQ ID NO: 1241728 - DNA, 4001 bp, Homo sapiens
agtcagtgtctcccttccccttccccttccccatcatggcattttatcagggaacaaagctacacgtacacaagaatgtaaggcaatggcgaggatttgaaggaggatgttttatggtaatggaaacttgaccggctccctgcagggtctgcctgtagtgactctcctcagaacatgtctgtgtagcacgttcactgcatccttggcttcagaatctttagtcatttttgttaaactgtatccacttacctttctcagaacctttcctgtctgggctcttctttgctgtgttaaatgctagggaaagtcaccatttctacctcagtgctgatcattgtctttataaaaaaattctcccaccaaaaaaaaaaaaaaaaaagtaagttgctctcttgcctttttttttttttgagacggagtctcactctgtcgcccaggctggagtgcagtggcaccatctcggctcactgcaacctcttcctcctggatgcaagcaattctcctgcctcagcctcccgagtagctgggactacaggctcctgccaccacgcccagctaatttttgtattttttagcagaggcgaagtttcgccatgttggccaggctggtcttgaactcctgacctcaaatgagccacgtgcctcggcctcccaaagtgctgggattacaggcgtgagccacctcaccctgcccaatgctaaggatttttaagtcttaagagtaattaactttaaaaaaaaaaaaaaaagccacaggtgtttctagttgacatttggcaaaccctgcaaccaccagctccaccagagacttgacttctagagggaggcctagtactggcatccatgctgcaggggacaggggctctctgtttcccctgtcaaagcagaaacccgtgggaacctgaagtcactacagctagcacaatgcactctctgtgcatgtcctttagaaccaggcggggggccaggagtggtggctcacgcctgaaatcccagcacttcgggaggccaaggtgggtgggatgacttgaggtcaagagttcaacaccagcctggggagaaaagcaaacccccccccgtctctactaaaaaatacaaaaattagccgggcatggtggctcacgcctgtaatcccagcactttgggaggccaaggcgggtggatcacgaggtcaggagatcgagaccatcctggctaacacggtgaaacactgtctctactaaaaatacaaaaaaattagccgggcgtagtggcgggctcctgtagtcccagctactcgggaggctgaggtaggagaatggcgtgaacctgggaggcagagcttgcagtgagccgagatcgcgccactgcactccagcctgggtgacagagcgagactctgtctcaaaaaaaaaaaaaaaaaaaaattagccaggtgtggtgcgtgtgcctgaaatcccagctacacgggaggctgaggcacgagaatcgcttgaacccaggaggcggaggttgcagtgagctgagatcgcgccactgcactccagcctgggcgagactccatctcagagaaaaatcaatcaatcaatcaatcaatcaatcaaaaaccagaacaacctgggaagggccatgtaatctggtaactgagtgaacggttctggattcgtgctagatgaagttcgagctctgtttggcaaccttggtcaaattatttcacttttcgaagcttctaaccttcaacttaatgacttgggaaaccaagcccgcctcttatggtcgctatgagttttaagaggaacgaaggcaaagcccttggcacaggaccgggcgggacttgggtcctgactctgggacagtggcggcagcctcacctgagcggcgcactggtccaggtagagctccaggtaggtctcctcctgctccatggaccgtaatcccactgttgggggtgggggcgggtaagagggtaagcgcggagcgagcagcctcggaacccgctccggccagggcgcagaggccatttatgagcctgggggcagcgaggcggggcggccctcggcccaggttcctgcagagggcgcgagagaagcgttgggcgatgggcttggagcgggatgcggaacccagctaccggcccatgggcgctgggaagcggagatgggctaggggtgggccggagaggggcgtctcgcctgggggcagtcaccccactctgcccgcagctgggaagggcctgggcctgcagatttgatttccttcgatactcgcaatgtggtctttgctcccaggagagaaattctcggtgcaagtgcatggaaagtgagaaaaaaaaagggattttttgttgttgttgttgagatggaatcccactctttcgcccagtgccatcttggctcactgcaacctccgcctcccgggttcaagctattctcctgcctcagcctcccaagtagctgtgattacaggtacgcaccaccatgacctgctaatttttgtatttttagtagagactggtttcaccttgttggtcaggctggtctgaaactcctgacctcaggtgatccacccgcctcggcctcccaaagtgctgggattacaggcgtgagccactgcacccagccgtttttctaagaaacttaaatactaggtttccaccctgtcgccaaggctggagtgcggtgacaggcgaccatagctcactgcagcctcgacctcctggactcaagctcctgcctcagcctccctagcagttggaattacaggcgggtgccaccacgcctggctaattttatttttataatttttatttttagtagtgacaaggtctcggtatgttacctaggctggtcctggactcttggtctcaagccatcctcctgcctcagactcccaaaatgctgggattacaggcatgagccactgcattccgccagggatgttttttttctcttgagcagagtgagtggaatgagtcaccttacctagtcaggtgtagtatttttacattatcattacttctcaccatcaaatcccacgtggtttttctccagtcactgagcgttccgtctaaagccacatacaaaacagtgtgttgctgcacagttagggttgaggaaatctcacgaaaataacgcaaaacattcagagagggtttctctttcctgaaatcattattttaattttcagtgcctgcataagagcttaactgtgtagaacaactttataaacataattgataccttttttcttttcttttctttttttgagacagagtctgctctgtcacccaggctggagtgcagatcttggctcactgcaacctccgcctcccaggttccagcaattcttgtgcctcagtctcccgagtagctgggattacaggtgcctgccaccatgcccagctaatttttgtatttttagtagagacgagttttcaccttgttggccaggctggtctcaatctcctggcctcaggtgatccacctgccttggcctcccaaagtgctggaatgacaggcacgagccaccgtgtctggcctataattgacactttttatgtaagatacgtaaaaatgtacagattcccgggtgtggtgggtcatgtctgtaatcccagaactttgggaggctgaggcaggtggatcacctgaggtcaggagttcaagaccagcctggccaacatggtgaaaccccatctatacctaaaatacaaaaattagctgggcatggtagtgtgcgcctgtaatcccagctactcaggaggccgaggcaggagaatttcttgaacctgggaggccgaggttgcaatgagcccagatcatgtcactgcactccaccctgggcaacagaatgagactctgtctcaaaaaaaaaaaaaaaatgtacagaggcagacataaaatacatcttttttactagattttgctctctgagagcaagaattttgataactaattttaatgtctctgtaccaagcttatctgctcagtaaaactggatggatgaaggaaactgaccttaga

SEQ ID NO: 1241729 - DNA, 4001 bp, Homo sapiens
ttctcaaaatacggattctaaactcacatttacttgtgagtgcagaatcactattctctcctcagattcattcaaacttggcttctacccttacactgtacttaaattatgtctgctgaggttaaagcccccatcctaacttccaaagacaataggcacgtaatcagttcttgactcccagatagacttctctccttgttaaaactctcctctcctggcttctatgagaccactgccccctagatttcctcctttcctgatgctcttcctcagactccttggctgtctctacccatcgcttaatgctggtgttccccatccttggtcttgccctcttcttacactatacttacttgaatgatttcttacacccttacaggattaaccaccacaaatccactgctgcttccaacatttgtaagtctgatcttgacttcagaaaacctgataccaatatatctattggtatatatccactagacagctatgccagatgtcccgccagaatctcaaactcattttctctccacctgaattaatctctcaatattagttttattcgtaaatgcacaattataattcatatgaagtcaataaaatacaagatatacttaaatttttcatgaagggttaaacaaagaataaatttgtattatggcctcttcctcagttatgaaggtaactcatattcattagcaaaaattacaaaatacaaaagagatgataaaaagcaaatatcccagctctcaaaggcaagcaacattactccctccttccagaaaaagcaatttttaaccatgctgaagttacacatcaaaatatgaaactggtaaatggattttgttgttgttgctaattctcaatattttccaggctatgttctacaatattaatcagggaaaacaaatttctattaactgcctacctaaagggagaactagaataatatttcaattacaaaagcaatccttttatatgctgtattttaaatgttctaaagaaatcaatggttttggcttggcatctatcttgtctatacccagatgtctatcggtgtgcactatagcccacagttcatccacagtatcttcctctaaagaaaaccatagcaaaggaaaacctggaagaaatagaagtcaaatctaaaacctagctgggtagattgtggtttgcaaacaccacagtaaagggacacttttaacaccctttcgccacttcacaaagtttcagaaacatcacaggtaaaaaccctctgcgaagctcttctcatcagaccccgccagggaaaggaaattcgcttctctttccccagagcccagaaaccacctggacgcgccgtcggaagcccgagcacggagcagggagccgggcgcccggcgcgcggccgtccccgcctgggctggggtctccaccgtccccggtcacgggtccccctaggcagagccgcccacctggccagcggggacctagcctcgccccgtcgcccacccctggtgccctccagaccaccgcgcttccagctgtcgcggggcctaaagctctctcaggcccccgcgacacaggcgtcgctgaggagacgtgggaacagcccctgggccccaccacggccccattttaaagaaagttaaagacaaaagagacagaactgacactcacctccagcccgcaaggcggggccgccctcacaggcaccccccacagccctgagcgagctgccaggtgggagaagcgcacctgagccaagccacgccgcgcctttccccgcccgggtcccgccgccctcctccgggtctccacgtcccacgcccgcgctgggccggcgccgcgcggccgcggccggttacctgctggaggcagtgggcgctctgctgtcgccgcctgcgggaactgtgactccggtcacctcgcgcggccgcgcctcgaggtcctgcctttcccagggcctcccctaccctatcacttaccccctcccctccacttccctccccgtacccactcccacaccacccaccagggccgccccgcccctcgggacgggcgctaaggggcgaggcgaggcaaggcggggaggggcgaggcaaggcggggaggggcgaggcagggcggggcagggcggggagtggagtggcgcagaagggctgggcgcggaggggcggggcctcccgcgtacctgagccgcgctgcgcctgcgtcctccgcgactccgcgcttggcagccccttcctgggaaggtgtaaaatgccgccaggtgtggggtgtgttttgggagaagaagggagacaagcggtaggagggggaagagaggggaagctattggcctgaggaaacttctctgacttggggaggcaggggcagtctttctggcgatgtttatgcacactttacttagaagcggagtagtcatgttgttacttgacttttagagtttttataaaaagtctataaagtctttgaggatcagccctgctctctgcttttgttgctatctgctactgccttgccatcaatgggtgtcttggaaagaatattaaatgtatccaccacagcacctcacacccccgattctatgagggatcccctctaaccctggtaaagcggggggcctggcccttttctctgggcttccttggtggaaatctcaacactgcttggaaatgagtttcctagactgtctgatgaagaatggcttagcattttttgtttgttttgttttgacagaggttctgtcgcccaggctggagtgtagcggtgcgcccgtggctcagtgcagcctcgaccttcggggctgaagtgatcctcccacctcagcccctccgccaagtagctgggaatacaggcgcgagccagcatgccaggctaattttttaattttttgtagagatgaagtcttattatatggcccaggctagtcttgaactcctggactcacgtgatcctcccacctctgcctcccaaagtgctccacctcccaaagtgctgggattacaagcattgagccacggtgccagcctgggtggtgggactgtaaaattgaaagaaaggttcatacttttccttctggagagcagtctttcccagagtgagttctgtccatctcaaggtcctagagatgctgcagtgggagtaggggtagatcaccagatcacattaatgtgggggagagagacacaaaatatttgttttccttgagattcacaatgcatactagcattttacaggcataagaaccatgttttactttctttgatcctgcatctcccaaatgtgtttgaccatagaactcttttcttgagaaaggcctgtttccaatcttgggcattagtgtttcaacaaacactttgaaaaccactgctttcaactcctagtacgttcacatttaataatgtatcacaaatgtttgcaaagttgtgcactgttcacacaaaactttcatgagtcatctcatttaatcctggaaattgcaatgtagctgttattatcttcattttgcagttgaaaatatttaaaggtcagacaaccagttagtggttgcccaaacatacagtcaagatttgaatctgaactttgaactccaaggcgttttagactaatattcattctgtctctctctcatttgttcctttttttttttttttttgggcaggctctcactgttgcccagactggattgcagtggcacaatcatagctcactgctgtctcaaactcctgggctccagccatcctcccacctcagcctcccaagtgtgctgggactacaggcacataccaccacgcctggctaaatttttaaatttttttatagagacagggtcatgctttgctgtccaggctggtctgaaactcctggcttcaagcaatcctcatgcctcagcctcccaaagtgctggaattacaggcatgagccacagtgcccagcttcccttgatacctaaggagagcacatccttggttagaaatcactagattcatgtgttagttgaatcttctcaagggcaagac

SEQ ID NO: 1241730 - DNA, 4001 bp, Homo sapiens
tccaaaataatgaagagatttgctaagtgctcacgttttttttcagataaaaaaatattgcatttaaagtaaacacaaattgtatcaaaaagaaaaagtttatctagcatttattagtgtttcctttcaaaatacttaataattctaagcagaggcaacttattctaaatttcaaacacatgtctataaattttcataagaatttttcttgtataaaacagatgtcttaataatttttaaaatctaactaaaataattttgtggaccctgctactgcacctaccacattatattccagttttgtcgtgtatgctgcataaacccctggctaaaggtgttattaaaaagttattaaagttttagattaactttttataaagttttaataacttttaaagttattaaaaagttattaaaggtgttattaaaaaggtgttattataaagttatcggtggactgtctatcctgttcatgtctctgaatccagcaaccggcttaaccaaagtggattcttaaccaaagtatgtgatcctctcaagacaaagaccttttacaaacaatatttcatctggcaagaggggagtagaggagagttcctttgtcaagtcttctctctgtgggtgaccccgttggctcagaatgaacaacttgggcacattacagtaaccacccaggccacaaaaatgcgttgaaaccactgaaaatgaaataatcagacctacttaaatgtttttaccatctgggcaaataacaccccaagggccaagacttacctaagaaagtgtctgaagtatgttacccaagcctgagaggcaacaggtaggtggattttgtgccaattagaaagtgttatgattggcaaaccactgcaaaactctgaaattgcagtgaaatggaaatgctggctgtcatccccaaagtacatttcaaggaatcacaaaacttcagaattagaagcaattatttaggatgaacgttttcacccacatgaaagttggaagatgaggtggtaacacgagagcttttgcaggcgtccctactcttaatcctgcgccccttccaccttggtacccttcattcttcaggacctgatggagtggtacaaagcagaggtcacttgacaagctcagcccagctcctggatggggcaaagctgacaaggaataggcacagggagcctggagatctcagggtccaggaaacagcctgccccattagaactgcacagcagagcacagcactgggatcagagagcaggctcatccccagtcttgtacaaaaaataacatttgatgattcccaaggggtaggtaaagcaagtagcatttggggttccagcagcctctagaactgtttcccaaatgtttggagcttgactttgcagtatacactttgccctggactgtttttctcttaatttttaggcccaagtgtattttaaggtaaatggatcccacatgcctctggtgcatttacactgaacccatcagaccacattttgaaagcgcaatttgaggtccaagaagcccttggaggctgcttttatgagcctgagtttcttttcttagaagcaggaagccacattttgacatgaacaaataaaacacaaaccttaaagactcggatctggttccaaatgtggcacctctgaaaccagtgggtcctcaaatcatcaagacagaaagcttcccagttttctttttgagaagttcatggagacttacccctgtgttctgttgagcccagaggcagtggttcggaggcgctcggtgcaaagctcacgtaaaccttcagcatttctgattccatccttcttcccagcccctgagtctccctacacagcagggacccaggctcactgctgccttctggcctttgcttttcggagccgagctgagtgagtcccaagggaatcaccctctgttttataagctttgaaaccagagcatcctgagccatttggtgctgatgtgattgctaacaccacttgaccctgactgaagaaccacaactaggcatggtttagatgtgcttagttagagaaaaaaataaccacagccaacagcaaagtgaggtgtgtggtgtgggtgtgagaaatgctcttggggtgaggagggaggacttgcagcttcttggatgctacagggcgtggaacatgctgtttccttccactgaaggcctaagatactactaagtggaacaggagaattccctggccccctcacaggatgtgcaacaggggtgtggctctctcttcagccaccccaagctaaaaccccttatgggaaggggagcacgcagacaggcaggtgcaggaaccagggtgagcacttttgggccccagccccatgacagcatcccggggtcggtgtctgtgacttccaaagcccgagtaggcactgaaacagtgcagtctttcagccttgccatccgtggacagcttaagcgttaaccagcttagtggaccctctccctttttgccagggcagagggccagtgtgacagtttcctgtatcccgagctcttgtccagcatcccggagggatcaggtcacacatggatttgcaggatgaatgcaggggttttattgagtggtggaggtggctctaagtaggatggatggggagctggacaggggatggagtgggaagatgatcttcccctggagtttggccatccagtggccagttttcagatcgtctccagtcgaattcctcccaatgttccttctcttctctccttctttgccgtgcttttctgccattcatgtctgctcatcttcttgtctccccgtctgcttctggagcctggagcctggggttcagggtttatatgggtacaggataggggacatggcaggccaaaaggcaactttttagggatgaaaacaggaatggctgtcctcatttagggccatgggtacccaggcttgagggtggggcctttgccagggaaccaccctcttctacccagtatttccctgtctcctgtccatatcacaaggatctgtggaatgcctactaagactaggggtccaggacacaactcctgataggcactgtgggggtccttaatgaatacctcaccaacaggtaggatgggagcaccctcagatggatctgtagactccacctcagctatcagggagtgcacttttttcctgaagccttgggttgattcctgggatggcacataaagacagccatcccaacctgttctcctgtgacttgcaatgttgactctcttggcccctgcacagggttctaagacttgaaggatgtccagaggccctgaccaggaaaagaataatgtatcctacaatgagcagaaaagacattgagggcaaggcagctagggctccagccccatctgtccacctctctttctagggtttataacaatacattctcaactctggctacatagtcaagttttcaaaaatcctgatggccgggccctacctaagcccaatgacatcagagtgtctgggggcatgtcccggggaatcaatctttcctccaaagttctactggttatccgtctatgcagccagggttgaaggccactggtttaaagtaacttgaatacattcctgttctgcaggagcaccggaaataatctacgtaagagaaggattgttggttgttttctaatcagatgaaacaggactcagggatgatgcctccccctaacttccccacgacccctatttctctgccccaccgcccccctcccatcaatttgccagagtcacagataatgccctagctctctggagagctttctaagccagcgcacaataaacaggtttaaacagaactagaaccccaaaggctgactcgtctatgatgtcaaaatgaaccaaacacaagctctcttcaaatatttaatcagtttggagacctctgcattccaatccaattgggtaaaaattctaaagaaagcaagattaaggggtcctcaaagaaaacactgggctaaaatggagaggagactgggt

SEQ ID NO: 1241731 - DNA, 4001 bp, Homo sapiens
acctctgggagaaagacactcaccttgatgtggtacactaagcgccagaaactggagtctgaggatcggtatcgtccatcagggtagagctgccacatgataggcagcaggcttgggcctatctgggtgggggtcataggcctccccaggacgacgtcttcccgacgcaagagcacccgtaactgtaacctatcctttatctgaggagaagaaaaggacagggcatactttcaggttccgcttgccagggcttctccaggcgcagaaaaccggaatccctcctgccagccatccacccatctgggcaggggtccgagtgtgaaatgatggtcatcactgttccctgaagctcacttccttaggccatgcatgctcctctcagggactctggctgggccaggaccaccagcacacacacgtgtctagccacccagacagggccatgaaaggcacacttttttctggcgggttgcagcggctcacacttgtaattccagtgctttggaaggcagaggcaggaggatcgcttgaggccaggagtttaagaccagcctgggtcacagagcgagaccctgtatctacaggaaaaaaaaaaaacaacaaagaaagaaagagagaaaaagaatactggccttttcaatgatgtgaggcaaaatctgtcccacagtttgctagtgggttattttttgtggagcatgtatcatgattttatgaaaaactgtctggttcgtggttttggtgtcacgttgaagaagagatttctcagagatttaaaaaaagaaatccactgaatcttcaaattatttcttcaaattttgattttaaaaaagtaagtatttaacttgatttttaaagtaaaaacatatttaaaaaattgaaatgccaataaaaatgcagattttgtggtggttaagagcctagaattccaaccccattacctactagcaatcttacctcggacaaatgtacatttttgtgcctcagtttcccatctgtagagacacagtcaacactcaataatttttgattgctactggacatacgtgttctaatatattttttaatttttatgctttcttcagtgtatgtttggagagagtttgaacattttttgactctttttcattgagtaaatccaaatacttgtaaaagacttatctatttctttaacaaaaacttaacatggattaaggacccatcttaaggcatcacacattaaaaaagtcaatattgattcaataccggcgcttatactacgacatcacttgttaaatttgttttctaaataaagcccagaggtagtggaaaatacttcacactctaggccagtgtttgctatgcctggttgaccctaaactgttgagggttctttttaaaaatacagatttctgggacccacctgagatgattccgataatcggccatatggatgagtcacttagagatacccatttttaaggattaggaccccgaagcccagaaaatgcctgctgtagtcaacattatagtcacactccacaggcactgggtccacccctttgaccgacattcctttgcggttttcccacccttcttccctgcctggagaactcctattcatcctccagagcccggctcaaagtggcttcatctgtggggatcctccctgccccatagtgagtgctccttgagtcctcgcccttcctagggcatcccaagctcccaggggctgcccctgctgcctcgccatccgctccaaagctggctgtacctcgatggttaagggcagccaggcgtgctgcttctcgtccaaatacacgaacttctcccaggcccacaggcggtccgggtggtcggtgactgcctccccgagtgtcgggcactcggccatggcgtcctcgggccgcctaagaagcaagagccagagcctctcaaggccgctcgctggtccctgggatgtggggccgaccctttatatccgggcagcatgcggccgccaccaagcggcggggcgggaggacggccttggggcgggaccccgggtcgggagaacgaccttggggcggggcgtaaggcaggatggggcggggtttgtgggggtcttggtggcaagtgagggtcccgcgcaggcgctacgtcccggcctgacttgctccctggaacggtggcagctcctgggaacgcagacccggccccagctggcccgcgccttcctcgaggccccggccagcagcgacaccgaccgccgccctctgctgctgctggagaggcaccggggtgaccttggccctttcttcttctggaagacccccccgcttccctcggctgccggaccgggactctgggcctctgctgggaactcacagtcgacaccaggatgcccagagccaggacccactcctcatcttatgggatcagaagagacccgcgcgggcctgagttaggcctgggctttcccgggttccctggatctccaccagcctgtgcctttgagtgtcagagtacgttttttggcaaaggacaactcctgacgctccctctccctcttccatacacaaagcatgcgttttccacaggtctgatgtgctgtggacatctaatagctattacaaaatggagaatcatgggtttttgcccttgggctttgagtttactagtgaaagcatagttcgaaatgaatacttaaaaagaaatccctccttccaccctaagatcaatggatttgaaaagtgcctggtttatatgatcaaaaccacccctctgtaaattacaagcaataaggaaaacaatttcactttattttgcagtaacgcattcccactaaggcaattaagaaagtcatgcacaatgaaaaacatgtgaaaccagctccagcctggttcaaacatcaccatgggatggagtttggtgtctcatcttccagctctttcccagttctctgaccaggcactaagaacataatttgtgatcctttgaaatatcaccaaagtggaaattaagagatctgatgaggacatctgattcacctggcagctgggtatctgcctctttgcctatccagagagcctaattcccaagaaggggctgagagggcctaaggtagtcgagacataatgggatttaccaggaacacaacatagaagagaaaagccaagggaagttgggggtggagtgagggcccttgagctcagcaaacctcttttccactgtagcccttagtggtgttaatatttaatatgcaaacttaaaggtttcatgctgattttcctgtgaatggctcttgactccagacctagatagccacagagcaagatgacaagctcgctaataagctctgttggggaggtctcagcccaggccagagctgtgaagtgagaaataagtccagtttaaatagtgctgctgggatggacttttgtggccagggaaggggtacccaggagccagtgtggccactgacccagcctcatcaatggccctaggatccagaatgccacaaacaatggagcaagaatcagatctgtgtgtctgggtaagcagaatgttctgagaatataattcctttttccttcttttgtaagaacaatttatttcttcagttttgcatgagggcttcttaatattgagcaagaatatacatcattattgcgtgagatttagaaaattatttgagagagggttccaataaatgaaaatgaattaaggatgtctgtggagttcattgggcaacttatagagcccttgagcttttttaagtgaacattccacaagaggggaaacagtagctattgcatagtctcagagctgtctctgagcctccgtggcatgttatctgccccatctaagggttataaaggccataagcctagctttagaattttatgttcctttccaagtctttgttagtctgatttccctgaggataagcaaatggatgtttcacacagaaagctacaggaagcaatcattttgacagaatccttaatggatgcgttcatgtcctgatttagatctagttttgc

SEQ ID NO: 1241732 - DNA, 4001 bp, Homo sapiens
tgcatgctttatttagtgtatgtacagaaaagcctttccatgttctctaccaacattttttgaaataacctatttgaactttttttaggaaatgtgttatattgtttaaagtgtcagtgaactggctgggcgaggtggctcacctgtaatcccagcactttgggaggccaaggtgggcagatcacttgaggtcaggagttcaaaaccagcctggcccacatgattaaactttgtctctcctgaaaataacaaaaaaaattaactgtaaaaaaaaatcgcctgtaatccaagctactcgggaggctgaggcatgagaatcacttgagcctgggaggtggaggttgcagtgagccaacatcacaccagtgcactccagccgcaacagagcaagactttctcaaaaaacaaacaaacaggcagtgaattgtttacgaagacctaaacggcattttttttttttttttttgggacggagtctcactctgtcacccaggctggagtgcagtggtgcgatctcggctcactacaagcttcgcctcccgggttcacgccattctcctgcctcagcctcccgagtagctgggactacaggcgtccaccaccacgcccggctaattttttgtatttttagtagagacggggtttccccatgttggctaggatggtctcgatctcctgatctcgtgataagcccatctcggcctcccaaagtgctgggattacaggcgtgagccaccgcgcccagccctaaatggcattttaaatatccggatatgcttttaccacattacactaaggtacagccagccccccatttccatggatactgcacccatgaattcgactaacctcagattaaaaatattttgggaaaaaaagaaattccacaaagttcccaaaagcagagcttgaagtgatgtgtaggtgtagcattaggtgttattagtaatctgatttcaaatatagtagaggatgcgctgaggttatatgtaattactacccaggtcattttctatcagggacttgagcatccacagtcggtcctggaatcaattccccaccgccacccacaccagaaacgctactgtatttacttcatccctcaaagactggctgtgatctaaagccctcatctacagccgtttcctgagtcattatcattatcacctggggagcttttgaaaagtaaagaatctaggactccacccaagcctcctgaattaatttccagaatctgttatcagtcaaatgcttccccaggccattcaggcggtgagccatgtatgtgagcatgtctgtgactagcttgccacagaggtatattattctcattttgcagatcagtaatctgacaccaatgtcatgttcatcctgttggcccacctggtgcctccaggctgcaatgcttttgcttatactactcctgcctcctttctagacctggagaactcctactcatcccacaaagcccagctcaatagctgccccatttgtgggccttcccagcaggcactgggaatggcactaagccctgagctaccttagcctcggcttcaccacgcaggaccacattatctcatgtggataagcttgtgcctgtggtccctttacggggggtgttcctggggccagggctgggcatggacattgctgcgctcctagacctgcacagaagtgagttttccagtgcgggtgagaacggccccctctgacccccaccgcggtcccacacgggcaggggtcagtgcgcagccctccccacagcctcccctcgtgcccaggactcactctgctgccctgggaggccctggcccattccctacgcgagggattgaaccgcacgaccacagtcacccaggttctcccctcctcatcttcgtagatgccaggcctctggatccacagacggccagggggcacccctagacgcacagaagcttcggaggccatggcaagtctgcaaccgggacccgcctctaggctcacacgtgtagctttccagctgcgcaatctccttaaatggagcagctccggcgtgggtggggcccgggccggcagtgggggcggggccggcagtgggggcggggccagtcgggggaggagggggaggaggaggaagggggaggagggaggagggaggagggaggaggaggaggggggaaaaaagcaacctgcagcaggggctaggcagggacgaggccaaagagcagcggagttaggaacccggcctgggtctcctggaggggctgtggctggaccggcagctgctggaggcaaaagggcggctcccggggatagagctgcccaggcttcaccccaggcctctgcaaggaatttggctcctaagacctattccacctcccttccactggtcccagtccctccgcagcctcctccctgagcacccctgcccaattttctgtcaggtgattcccctcctttgctccccacgaccccctgccaaccatcctgccccagatcctgagctggcatgcacgaccctggtctctcctatccctgtggccattcctttaacaggactctgtgtcagggacccttctctgagcttagagcttagaggcatggggggcggggggcgctgtaacctcagtggactcttgcccctggaggtatctggtgaaggcgcatcctgcacaaatcaagctccctctccttagaaaataagccagtgcactatcagcatctgagctcaggatcagataaagcccacagaaacaaggccaccggaggccacgtggccacctggccagcccatccttggccatggggcccagagtgcccacttggcctggtcgtcttacttgctcgactttgtcaagaggcctcagaagctcaagaacatagcaagaagcaggtccgttctataagcaccctgggctgcttctaaatgcaccatgaataggaaccttttccttttgaaaaccacaagcatgattcttctagttcaagtgaagattagtattgagatgatgccattctgctggggagatgtgaaaatgatttctggacagtcctgatccagtgtaaatggcaggtaggataaccacttttgaagaactccctgggcagcttctgtggaggactgagtcttgttttcacagcaattccacctccatccccagtgtttttccaaggaaccaacacttggggtgggaatggagtgggccaggaagacaagggacatcacagtctcatataatgtgatccatacatggaatcacgtacgtgtgtcacctttgccatattccattggtcaggggtaggtcctatccttactcaaggttatgaataccaggaggcagggatcatggggacccctggtctcctgggcccccctgaagcctgtttgctgtaggtacctaccctatgggactcctctgaggatcagatgaggctgtgtgtatagtgttaaagcctgacacatagtgaatacttgaaataccctggtcaatagttatgttctcagactagttccctctcccaggcagaatccatcattcctacccttgtaaccccaatgcaattgctatttatctctatcattttctgttgcaaatatatattttgatattctcaacctcactccctgatgggcaggtgtgtggctgtcagtggggttggaggtaaaggttgcctaatatgtggggagcccctatgccatgtcaggcatttttcatagggtatctcactaacacctcccaacaactccataaactagagaccgtcacccccatttcatagatgaagtatcagaggcttgagtggcttagcaacctgaatgaagtgggtagcagaggaaggatatggacccagctgttcctggctctaacatgcatgctgcttgttgactgccttggccaagtttggctcattacatggaagaggcagaacctggagtagggagatccacagtggctactgtagaaatggtggtggggtctgaagatggagactgagaacaccttgccatgagtgggtgg

SEQ ID NO: 1241733 - DNA, 4001 bp, Homo sapiens
cacctcctgcagccagcccagggctggaggtctccagctggcaaagcggccctgaaataaatcctgtgtcatgtgttaagagaataaagcaaactggggagaaggcaggtgagtgtgagtgaaatttggcaaacactgcactaacatgaaaaatctaagaaatcttcccaccaaatgctagctcaggacactgttagcacttttattaaggactttaaaacatgttgtggatataaaagggtactccatttagagctactagtgtttcctcactccccactatatgagacccagctggggcatttctctttcacctccagctgctccttctcattgagcttaaagaccatcagctgggcctggaggccatgctcctcaattgagttcctgtgtggccagtaataggcaaacatggtcccttgtctcaaacccggccatgactagggagtaaatgtgcacttgggcaggttagttaactgctgagcctcagttttttagtctgtgaaatggatatcatgcttaccccctggagttcattcattcaataacttactgggcagctattatgtaccaaaaactgggaatgaggcgttaacaatatagtttctaccctagcagagctaatttcagggcagaagagacagacccacacataaaaattttaatagccaagatgagttagacattcattacattttataagtatgagacagaaaaataggggtgacctttggaatatacttaaaaagtaacatataaatgagacccagagggccaaaaggaacctgctgtctaaatgatggggtgaagagcattcccaagtagagggaacccagccggcagaggtgggaaagaggtcataagaaaggacttaggcaaggcaggcagtggtccgaagcgggtgaggggagaagacttgttaaagaaattggattttatgcaatgatcaatgggaccccactgagggctttaagaaggggagtccgatttacatttatttttttgagacagagtctcgctctgccgctcaggctggagcgcaatggcgcaatctcggctcactccaacctctctgcctcccaggttcaagcaattctcctaccttagcctcccgaggagctaggattacaggcatccaccatcacgctcggctaatttttctatttttgtagagacggggtttcaccatgttgcccgggctgatctcaaactcctaacctcaagtgattcagccgcctcggcctcccaaagtgctaggatgacaggcgtgagtcaccgcgcccggccttcgatttgcctttttaatacagctgtgtgctccaactctgcggagaatgggttgaagacaaaggaagtgagagggctcttgctgaaggcgttggggacggagcagattcagaacgtgaggaagtgacggcagcagctgctaaccttactgcgtgctcatttggggccggccaggcacgattcgaagcgcctcaccaagtgtaaactcgcttcaccctcaggacaactctatactacgtaccgtgaccgtcctcctatactgggaaaccgagcacagaaagcttaagcgcctggcacgtggtgggcgctttcctactcactttctgggaccacgcacctgtaagcttaggtctgggaataaaaacccgagcaggggcccctagcgccgcgccccggcaggacacaggtctccgcagcgcccgtgcgcgccccctgaggcgctgtgatcggaggaaaccgaggccccggggccgaggcgaccctgccccatcttcccggccgcgccgcttcctcgcggtccgcctccagccctgccggaccccagcagcccgcgcaccgcgactcggccaggagcaggatcccgggcccgaccgcagcccgcgagagaccgcaccgagtccgcgcccactgccgcccaacacgtacctgaggcgcacagaaccaacgcttgcctcggatcccgccccttcggcggccgccgcgcatgcgcgcagttcaaaccctggcggcagcggcttgtgcctcgaggcccggccccttccccttccggagagcccaccgctgggtcctaaagcccgccgggtgtttacccaggacggggctggggaaacctggtctctcctagctcttggcttacttcctggagacttcttaaaacgagaggagaaccagaaaggcgtcccctaacttcgctctagttaactaatagcaagactcaccctctttacaggattctcatggctcaggctcccagggctccatgcagcggcgtttggtttaaagtggagagaggatacgcttaggttaaaggcagctgcaaggagacctgtgtcctgggaggggctgggtgcagactttgaaatctgctgcaaaataaaaagttaaatgagttcccattggactcagaacctcgaatgtctgttccttcttcgcaacagttgcgttctcgtaaaatcttctgagaaaaggaactcgccccacgttccttgcctttaataaggatgtttgctgtgggatttgggctcggtgctgtttatggtatttattcttggaatctctttcacactaggcatctcttccagaggactgagtgaaatacatctgtgtaaatataacggctcgtttcgttctttcattgaagatctactttgtgccaggcacagtgctaggtgctgggattatcttgaggacataacagatgtagtagctgccctaggagctcgatcccaatgacttgctgatctgaacgagaatcctggacttggctcttttcgtttggttcttcttgtttgttcacagtctttttgtctcctataacgtttagcatagtgtcatagatctaaatgattaaaagtaacctattgcaagatggagggagagaatgaaataaatcatgaaccaggcattgaaccagcacctagaagcgcttggatttccagccgcgctcaacgagttaagggacagtcagggggtggagccaagtgctgggggcaggcctgggcgcctcactgccagggcggctccaaggaaacgtaattaaacaaagactctggccaatagccctgcgggattaacgcgagtggctggcaggttgtccaatgggaggagacgtcggagttgcgcggtgaagttcggcttcctgagccgcggtgggcgtggccgcggtaggctgccagccaggctgggaaagcggtggtagctggttgggttgctggggctcggttgttgtagtcgcgatgttcttctccgaggccagagccaggtcgcggacgtgggaagccagtccctcggaacacaggaagtgggtggaagtaggtttccggagggcgactgagcctcggacttcagcttggcctgggcctctcgcttcctctcccgtgtctgggtctcactctgccgggtgtgcagataagacctgggctgcctgtccaaagggtcgtggttaatgactgatcctggagctgcagggctcctggctccccgtccaggactacggctacctccaagttccatctcctttctctctatatagtctattaatggtaaccttgagtctgcatctctcccgcctttcaaagccagcccctttgcctcaccttcctaactccaggactgaattttgggtagaatttatctcagtggcctaaatgaattaatttgcgtcacctagcggttaactcgtttgcactttgagggaaatttcagcccatgtttaagaaaatttcagtccatctttaagatttcttgagaattaatattgggataatgaaattctattttcatactctaccgctgggccaagttttagattttcgaggtccaaactgtataataaactagtaataaaaataaaccatttctgtctcattaactaaagctatttaatgttcttcaggtatttaaagcatgtgatgaagatcacaaaggatatctcagcagagaggactttaaaactgctgttgtaatgctgtttgggtacaagccctccaaggtag

SEQ ID NO: 1241734 - DNA, 4001 bp, Homo sapiens
aataaagccaggcacggtgactcacacctggaatcccagcactttgggaggccgacatgggtggaccacaaggtcagaccgacctggccaacaaggtgaaatgctgtctctactaaaaatacaaaataagctgggcgtggtggcacacgccagtaatcccagctactcgggaggccaaggcaggagaatcgcttgaacccaggaggcggaggtttgtggtgagccaacattgcgccactgcactccagcctgggcaacaagagcgaaactatgtctcaaaaaaaaaaaaccaagaaaaagaaaaacaaaaccaccttctcaactgtaaagcgtgctggacttggggactgagcaagagtgacggagatactccaagctggaagtacttctcccagggcctttttaaagagcgagaagagggagcaggtgtttctactcaccaaatctacgtctttcctctaaaaacagaggatatactcttgctttttatttccacccaaatcaagtgaacagagtaactgatggtagctacttaaagaatagtgagatgaggagggagtctgtgaaacttaacaaagattcagcatttgcactccttggtatttacccaatgagttgaaaacttatgtccacacaaaaaccttgccaaaacttggaagcaggccgggcgcagtggctcacgcctgtaatcccagcactttgggaggctgaggtgggcagatcacctgaggtcaggagttctagactagcctggccaacatggtgaaaccctgtctctattaaaaatacaaaaattagccaggcgtggtggcatatgcctgtagcctcagctactcgggaggctgaggcaggagaatcgcttgaacctaggagggggagattgcagtgaggcgagatggcgccactccactccagcctgggtaacaaagtgagactccatctcggggggtggggggagaacttggaagcaaccaagctctccttcagtaggtgaatggagataaactgtggtacatccagacagtggaatattaatcagtgctaaaaggaaagaagctatcaaaccatggaaaggcatggaggaacccccaaatgcatactaatactaagtgacagaaacccatcaaaaaggctacacatactgtgtgattccaactagatgacagtatggaaaagcaaaattatggagacagtaaaaaaatcagtggtttccacgtggtgtagggaaagggaggcaggaacagtggggccgagaagatctgtaggtcagtgaactctgtaatgcgtgacgttaggcgtttgtccaaacccacagaacgtccagtacgaggcgtgaaccctcctgtaacgatggcctccgggtgacgaagacgcagcgatgcaggttcgccgactgtcacaaatacccacaccttacgcagatgctcacaggggaaactctgggagggaaggggcctatgggacctctgccctccgctccgttatcctgaaaacctgagtgcctcaaaaactagtctgttaaacattaagaactgaaaaaaaaaaaaaaaaaaaaacctctagctcagcttccttacaggcaccgctctgggccgcgcgtcgggttgtgtagtgaccactcgccctggacggtcaggggtccctggagccccgcgagagggcacgggctcgcgagaaggatctggatggcccgtgccctcgtcgccaggcctcgcccggccgccctccagccgcctccgccccgcccgcgtcctacctttcgaacgcagcggccggccgggccggagcttgggccagagccggagcctgggccgcgggaccagcgccgggggccacgtcctggcgctgcacctcctccctggccgcccctgccgggaaggcgggcggcgcgcccagcagctccacattggtcaccgtcttgccgatggtgaaccagtcgttgatctgctcgatggtgagcttccgcagcatcctcaaggcccaggcgtcggcatcccccaactgccgggtctccgcggcgggaacaggcgacggcggaagcgcaccctggaagccccgcccccgctcgaggccttccaatcagaacgcgccgcgcgcccttgtgggcgggctccggcccgggcgcgtgctgcccgcgctgcctggtcctcgtgccgccggccccgccccgccgcgctaggcctgccgggagccgccgccccgagcgagcccagggtgagcctttctaggacctcaggggaagcttgagcgccgcggctggcccgggagtctgtttcacgggagttccgtggcaacccctgtgtgtacaagaaaatgccctccggtcactccctggcctctctatttagaggctgctgcctcggaggtttgtgcgctttgagcggaccgggaccctacatacgtttcttgagcacctcagggtgaggagatggaaggcaaaccagagaagggatttgcgttcgtgggtcagacgtaccaggacatccttgcacctaatatggggggagaggggcaagaagaaggtcaggaaggtctcggagaaagtaacgccaggcagacccctgcaggatacgggggaatgcgccagacggaggaccacccagggttataggggagggcaggcggccctgatggctgaggtgaggatctgggagaagttctttgcagccggatcataactgaattcatcttccttcctaaaccggtgtctcaggcggcggtgtcagactcacagctggacacaaacaggtgcggacaggaggtccaggcgatcacatggaccaaagatacaggctgaggtggtcccggccgagctctagaagagtgagggtggagaacagagccctagcaaactccccaaaagaaggagccgcgggaagaaatcaacaaaggatgcacgggaaggcagccacgtgtgcaagggaagggagggtcagaagagagacatggccacctgcctggggtgtgtccccctcactggccagggcaggatctatctggcccatgtgggctctcaggaaagagccatgtgaacaaatacagagacggtatcgagagcatggctctaatcagcagtgtaaagcccaagcagtggcaaataagagggcggtttgaaaacactgtagacagaaatcaggcaggtaggttgagctattggtgtctcaaaaattgaacccataatcatactaagccaggagttctggctccaaatcctggcataatgagctctagacctcatattaggactctgccaaatacgacaggttcccaaaagtgcctcaacacactttgccaggaagaaataacttgcttttcttttttcttttgaggcagggtctcactcctgtcgctgaggctggagtgccgtgctgcaatcagggctcactgcagcctcaacttcgggggctcaggtgatgctcccaccacaacctcctgcatagctggaactacaggctcacgccaccaccacaccggctaattttttatatttttagtacagacaggggtttcgctgtgttgcccaggccagtctcaagctcctgggctcaagcaatctgtttgggagcccttggcctcccaaagtgttgagactacaagcatgaaccaccatgcccagtcatgtttttcaaaaaataagaaaaaaggtaatcataaagtaattgagactcatggtatgtcattcagcattgattggaaaatattgtaacttcacactgtatgtggaggctaggacataattcaaaattttacaaaatatattgaaaccacttgaagcaactccagaactcacacttgttttgttttgttttttgttgttgttttgagacggagtcttgctctgtcaccaggctggagtgcagtggcgcgatagctcactgcaacctctgcctcccaggttcaagcaattctcctgcctcatcctccggagtagctgggactacaagcatgcaccaccatggctggctaattttttgtattttagtagagacggggtttcacca

SEQ ID NO: 1241735 - DNA, 4001 bp, Homo sapiens
tcaactactcccttctaattttactgatctctctgtgcattactgaatctagaaatctcttcgtgcttgacaccaaagcttttcattataaccctttcctgatctattcctcatcttcccaagttcaatcaactgcctctgcctgatgcctgtttccttccttttcttcccactaagttccagtagccatttttttcaactcctacagcggctaatatgaaatgaaattctccccaaacttaagtgtaacttctttaagaaaaaattggaaaaaaaaatccagtagatgccagtcttctattgaaaaagacacgtgggtataatatagctgatgcctaacaaaagctacttcctagtcactccttcagaagagggttatcctcattccatcttccccaccactggttttccaaggcagtcctgaaaattcaatttgtgtgtcccctacacctgcacttagttctcccttttaaagttcatgggccagaccatgatctttctgaggcagtgacctcaggaagggtctgtctggttcaccacagcatccctagagccagcctggcacagtgctggcacacgatggccaaataaccaccaatatgggacgtaagtcaggttaacaacaacaacaacaaaaataaggtcagaggtttatcaaggtacattatagctgggtgtgagaaaacacaaagtcctgcagcctaaaagaccaggaatcgctggtgatcacaaggagctacagtggcttcattcccagattctacctatgcctgggatttgcgttttgagatttcccagaactctgtctacaagaccttggctgcaaggaggcagtccacaagtgcaactggtcactccaatagatgagaaaaggatgcacccaggctggtatcccacattctgccaacacatggaacataagtcacagaacagaataaaattcctgaatcccaataagagaggaagaaaaaagtgcagggaagagaaatggaggtagagaaggagaaactaaagtcatgagaagtcagagacatatcagaagggactagagggcgagaacgcaggctagcacagatgacagcaggggctcccctttactgaaatgtacagcggcaggcaccgtgcttaactttacatgcactgacccatttaatcctcttaccaagccagaggtagaaactattctcatctccattccactggtgatgaaactggagcggagtgaggtagggcacttgccccagcacagagctaggaaggggccgctgggacctgcccggctctgactccaggacaccccatcctttaacacttactacctattctgcctcccatgccttcaaataggattgggaaaggagtcattcacttatccactcatcgaacactgaacaccaactggatgagtgtcaaggcctggggccaggcgccggtgggcggatgtaagggacgcgggctgcgagtgggggacagaacacgacgtcaatcttaaggcgaaggagcagagcccgcggccagaccggcagccgggatgcagggtggggccgggggccgagggcgcgggacgcgcagcggaggcctgaggaggggcgggcggcccctgttccccgctgcggaccgccggattctgcgggcggcgagccaggcgctccgtgtgttgtggcatttagtgtccgccactccgcgcgggcgagaccgcgggcgagggagacggggcggacgggcatggagaccctgcggggctgaggcaagggaagagtggcccgggggaggccgaggaggggctcggggccaggcgtcgggggcgtcgggggcgtcggggccgcttgcggcgtcgccggactcacctcccgcggcagcccctccggactcgtcggccccgccgggccggaggaggcgggatggactccgggccgcgggggctgccgggagcctgttccctgggcaacggggccggcaccggggccagcaccgaagagcagcagctggctccgccgggggctagagcggcagagccacaagtggcagcgggcggggcggacgtgacgcaaatgcgtttccggtggggtgggcggggcttcgcgtctccttctacggatatctgtggaccttatggaaggtgcgtgagatcggttcctttcccggggtggggtggctgtgaatgttactgcttaggccgcaggttggaccagaagctcaggagctccccggattacatgaggttaaatggaggtcctctgtcttaccccagcctagcccgcaggcccctcgcagcctctgcgagctgctcgggagacagttttgccgagcctccgttttttcacatgtgcagtgacagatgaacgggacgatatacgcaaatgagtgtcagcagatccgacatccaaattgtaattattgtcactataaattagtactaacagagttcactgggtaccaagccttgcatgctcatctcgtccagaaactcctctctgaactgccctcagtcagaacattctgcttgtaatgaaagctggctttcgcctagtgctcagtttgctgagtactgctccaagcactttaagtggatcatctcatttgaacctcacagtggtcccatgaagtaatgtcaaccccattttgcagatggggaatcgaggctcagaggggataagtaacttagccactgtgccctcaccctaccctgtcctgtgacgctgatgactggtctgtctttaccagcccttgagtttcttgaagtcagttatgtttttggttcctaaatatgtgccccgtatgagtcaggctgaccatgaatcagatgtgatcctgccctcagaatctcctgttggggggaaaacccttagacaattatagaacaggtggtaagagctattcctccatttacctcattttatgcaaagcctcctatgtgtggaaggtttgaaagagaacgagacatagttcctaccctagtcgaatttccagtttagcagggaatatagacattaaacaagcaaatacactccactggtgaatatcatgatagcagaattatagggtgtaccacatatctagtggtgagtcgtaacccaacctgggggatccaggaatacttctctgtggaaatgactttctaaaaacctaaatcagataatttcactgccctatccagagctcattgctcactccccattgtattaggttggtgcaaaagtaatggcaattttggctgttaaaagtaatggcaaaatctgttacttttgcaccaagctaatacttagaagtccaaacttcatttttttattttgttttgttttgttttgttttgttttgtttttgagacggagtctcgctctgtcacccaggctggagtgcagtggcgcgatctgggctcactgcaagttccgcctcccgggttcacgccattctcctgcctcagcctcctgagtagctgggactacaggcgcccgccaccacgcccggctgattttttgtatttttttagtagagatgaggtttcactgtgttagccaggatggtctcgatctcctgacctcgtgatccgcccgccttggcctcctgaagtgctgggattacaggcgtgagccactgccctcggtccaacttcttatcttggcctattaggttctagttgtctgatcacctactcacgcactagtccttttctgtctatttcattccagcacactggtttttttgtttgcttgtttgttttgttttgttttctgttttttgaactcaccaacctcattatcataattagggcacatactactgacctaccctatttctggcttttcatcattcaaatctcagcctaaacgacaccttctcaggggatcacactaacacaagaccctgttttattttccacacacacttaatcatgatctgaactgatcgtggtcatttgtttattatctgcctcccctttggaaagtaagttccatgaaaacggtcctggtccgtctcattcaatcacttcattcccccat

SEQ ID NO: 1241736 - DNA, 4001 bp, Homo sapiens
ctctacagacttcagtttcatcaactcctccaaaaagcctgtgctgacaccaagccccagtctgatttaggtggccttctccttgttttcacaacacccatatgtcccctatcatagagcacatcacctgtttgtctttcttcccaatagaccattaagttcctgaggagagagacccttttagccttgttcccacaattgctggtcagcgggattcagaggcttttgagaatctggtaaaagctatggagctttttcacagaaaaaaaaaaagtatatactgttttgtgctcaattttcagagtgtctatgaagcccatttatggacctcccaggatctccataaactgaaaattagaaacctctgcctaacagaatgcttgaattataccatcaggaacctattttctggctgggtgtggtggctcacacctgtaatcctagcattttgggaggctgaggtgggagaatcacttgaggtcaggagttcaagaccagcctgggcaacatagtgagacctctatttaaaaaaaaaaaggaatgtattttcttacttatttggacaaaggctaatctctcattcatatgtaaatattttgggaataatattgttaagtcaaccacctaaacttagtgtgaaaaagcttagggacaaaagtacagaacacttccaagaagacctgaatgactaacaatccagggccaaaaaggacaacaatatctcactggacgtcagtgtgacaaacacgtaaaaaatgatggcttctgtgcccaatacactttgctcatgtcgttgccctatataagcccccaaggaaaggagtggggaaactcagaattgactcagattttttttaaaagagatctcaagccaaaaataaacagaaaaataaggacagtttatttgagcaacatagtgagactgtcctatccttaaaaggacagtctcactattttgctcattttattgttttgcaccctggagtttttgaaaggagattcggctgaaccacaaatggaaagttaaagttccgtccccacttccatctctagttcccttctctggaagtaaacattgctcacagttttatactaacagtttcacagtttctatgcatatgcaaatacatgccttcaccatcaccactgcttttgcttttgctttacacaaacaggatcataagttagatgctattctgcacttagtatatctcagagaccttgccctgttaacacattaatacccacctcactctttccttttttttttttttttttttttgaggcggagtctggctctgttgttcagctcactgcaatctctgcctgccgagttcaagcgattctcctgccttagccttccgagtaactgggattacaggcgcccaccaccatgcccggctaatttttttgtattttcagtagagagggttttcaccatgttggtcaggctggtctcaaactcctgacctcaggtgatccccaacctccgcctcccaaagtgctgggattacaggcgtgaaccaccgcgcccggcctccacctcactcttcaagtggctgtatggtagtctagcacatttaagcacagtctgggtttctattatcacaaacggttctcatactaccatttgttggtgacagccactgtcccctttcgatgggcacacagggcaaggaagtaagaggggatgattcttacgtggtctctcttcctgtccctccctctccttcagccttctcctcctcctttctcacctcccctttcacgcagtatacactccctccccttcccggagccgccgggaggagcagggtggatgcacccctagctgagtctcgggtggttcctaaccggccccgccaggcacttcccacccagctctcagcctcagagcccagcgccctagacccagggccagggcaagttctgcctgcgctcggaccctaccttagactggggctggaaaccctgggtgcctgacctggggcgtccgattcccgcagcaggaagcagaaacttcgctctggattctgccggtgggaagggtggcagccgggggaggagccggatgcggatctgagaagagacggtgcgggcggagactctcgggcccgggcggggcgcagcagctgctggaagggcagcgagccgagggccgggcaagacgacatgccagggctgcgacgcgaatgcccaggacccctgccgccttttctggggcccgagtttagtttgttattgtttctattttttttccctttctggtcctattttctcctgtccctagggcttccccctctaccaaattcgtctcctctggctaattttcgtctttttttctcccattaactcttcaaacaccgtttcctggaaaagattttagcatgctcgctgcctagctgtacacctctccttcctaatatcaaagacggtcagactcaattcatcctaaagttcctttgaggaactccttaaaaggagacggaaagcggaaagcaaccgcctgtaaccaagtgtagacatcagtcaatcaaagttcgctgaactgagagcaagtgcctcccctcctgttgatcagaagagagatccgtggatcacacagaatctatctggagccatcctgaatgattaatgctgaaccctttccaggaagatggaaccaggcttaggaaagagacaagtgacccttaggttaataatcctagcttcataaagagaggaccaaacatagtagcaggagaaatatgctttctgcctttatataaagcagattagctgtcttctggaaaatatcattgctttccttagagaggtacccttgagtctcaggtaacagctgagcttccgctcagaattgagggcattctgtcctctattaactgagccagtacccctttccttccttagaaacctctattgccaccagtcccaacactccctgcaatggtctttatgtttgtgtctccccaaaatttatatattgaaaccctaatcccaatgcgatggtatttagggtgggatctctgggaggtcattaggtcatggagtttagaatactcataaatgggattggtggcctcataaggagagacggaagagctagctagctctttttccacgatatgaggatacaagaaaacagccatctgcaatcccaaggaagaccctcatcttcagaggcagaccatgctggcaatctgatcttggacttccattctctagaactgtgagaaataatatttgttgtttaagccacccggtctacggtaatttgttatagcaacctgaactaaaacatttcctttttataacaaatattttaaagctctttttatttttctgaaacataattcgtaaagaatgtaacttacccccacgcacaattttaaaccaaaatttaaagacaaaaagtagagacagggttttgctatgttgcccaggctctctacctccagggctcaaatagtcctcctaccttggcctcccaaagtgcttggattacaggcataagccaccatgcctggccaaaaaattagtaaaatctcttaaagagatataaaggagtctacggccataccaccccgaacgcgcccgatctcctctgatcttggaagctgagcagggttgggcttggttagtacttggatgggagataaaaggaatactagaaagaatatgacttataattaaatactatatgtttagatatgtaaatgtttgtgtataacattcaagaagacacaatgtggtactcagatatatgcatctgtatataaaatcacctggaatgtaacagctacaaatgcagaatgatacaggcattataatggcgattcaaataccatgaacagaattactgatgtggtatgattttccagaatactaaatagcttttggcagattttcaaacaaaacaaggtatgatcatcccatgattttcatggtagttgcatccctggaaagttcagtgtgtattaaaactacgcataaaatgcctt

SEQ ID NO: 1241737 - DNA, 4001 bp, Homo sapiens
tgggtccaatacacactcctcctgcatccacatccctaccccttcagacatagtgccctgtccccagccctgtgcaggacagaagcctcacaccccctggccctcctcctgagcggccctcactagacaggtgacctatgtgtatttatagtccggattgcctgtcatgagatgttcgcctcccaaaagccactgcatctgctggtttggtcaccccactccccagcacctgacaccatcataggggttttgaaagcatttgggcctgaaggacatgactgagagggtacaaaggggcctcagcgggcagccctgggaacacacgcagacacgcctgtgtgcatggctcaatgagctccccacactgaactggccgcatgaccagcgccagctgccaaagcattgccagtgcccaggagcccctgcacccatctcgccacagcctagagccatctctcagcctggctttgaaccttccaaaagtggaaccacacgagtggggttctggcttcctctgccctcagagaacgtcctaaggctgaacagctatatcccaccattctcactactgggcctgacacaagcctgtagctcactgtccagcagtagagagaccaggagatgcttccagtttggggaatcacagcagagcctctcccactattttgttttggtcaactttcagtgacaaatccttctcctgacagctgccccacctggttgggaggacaccaccccccctggggaccttgctttccctcccgcttcttgccaccttcagcctggggtgggaggcactggggagagctaagggaagtgtgttgccttgcctccttcctggccttggaagacctctctacagagcccagcggcccacggttctggaagcaagaagggtgcaggtccaccttggtgctcgtccagggccatggggaagagagcctcctgagtccagccatctgtttctcatcagtccccactcagccctcccctgaggctgctcatcacgaccagcctggagttttcagagacagcggcctcaggcgggctggggacaggagagtagcctcggccagggtttccttccgcttacccagtcctgagtctgcagtccctgctgaacgctgctctggatactgggctggccccaggctgctatcaggcccagtgggggccgcctgtgctcttgggagaggtgcgactccagcttcttcccccggggggacagtttcctgctgtccatctctagccctagtaggctgcttgtccacacctctgagatctgggggtaggagcagggggaggtggggcggggcccacaaggccacccacgtgcccaccaatacctgagtccctgggggcagatggtggcagtatcgcggtctgctagggtcaccttccagccaaaggtcaggcatcactgacccctctgggtggagtggatcccccagctcccgccgcagctcttctccacaccagcctcccgaactgtcctctctgcccctgccgaccccaccccgggagcctggaaagccttcggcagcctgctgcacggactccacgcctctgccagccttctcaaacgttccaggggcatcagccctcagccagcactgcgggcacgctctcagggcccggccttgctacgcccggggcgaaggaaaggcccagagctcttgccacagccccgcttccgaccctgagacctcccctccacgcggcccaggcctcgccccaggcccagcccggagcccttacgtgcccgccctctccggtggggaggcggggtctgcgcggccggggtccgcggagggacgggggaagaaggctcaggacacacgctggaggccgtgggcactctggggttcggcgggggggcggggtacacgggaacggcggtcggaggtggggggtacgtgggcacccggagacagaaggagggacagacccgccgcggatggagaggccacagggggccgctggagtacaccgcggcttgagggggcccaaggggccggcgcctcgctccagaacgtccgctacggcaagccccgcccccaccggttccgcttccggtctgcgccgcgcctgcgttctgggctccgttgcggcgggtgggggatgggcgcggtctgggggtccccggcgcatatccgggtctatggccgctaccgccccacgggcccttccgggcgtcggcctccggggtctcccgaagcacagacctgaacttggggtttgtcggccagagcccctttcggccctgcgcccttcaagcggcgcgatgccgctgagccccgggccacctccgcgcgcgcggggccgcagggctggggcggggcgacccaggacggggcgcgcgggcgggagggaggcgctgctccgccgcgtgctcccaaggggtggacggccgagagaatcacactgcaggcgggggccggcccctccaggtttattagtgttgcatcagcaccttgaaatagtccacacggtcacatacgtgacattagaatccgttccccaaaaagctatttacattaatccagggtttcattaaaaaaaactagcaacacatacatcctagaaaccaaacaatgcacaatgaaccgcatgggggtctgcagaaactacagtggtgcttctttggcccacagggtcagattccagaggtgcccagcaagcccagctctcagtcccctacaggccacacacccgcggacggcaggacaggtctcggggagggggcggcctggccctcggaagaagtggcctggtcattttcatgaggaattcattcccggaggaaggcgagaggcactcaggtctttccatctgggaatgaggacagtgtggcaaggctgccagtaccctgcagagacacccccagctctcacccagaggcccctctcctgccccagctctggccgaggcactgaaccaggacactggcttgcatgcccagagacagtggccaaggggaccaacatggaagaggaaggcagcagaccagattgcagggcgggactggcccacagctggcctgggtgagggtggggtctgtctacgtaatagtggacagtggccaccaggcctgaggggtgcctcggtggtgactggtggcttaacctttgagactgatggggctgagccctagctctacaaggggctgcctcctgtcctgtgaggccagtccagggccaggttctcggggggtgtgcacacctcacacacacatcccccgcccttaccgcactggctgtcagatggctttggtttctagttgtccttggtgggacagagtgctcctccatgcaccctcagaacagctctgtgaggtaggcagggaaaatgcgaccatcctgtgtaaccagtgggaaaaccgaggcacagagggctggcatggcccaggtcttgtctgcccaacctccctggtgctgggcatggtgtgggggatggaccgtggggctcctgggtgcagggcagacccacagcccagcagcagcaggggcacagggagtgccaccagaacccccagctgctggatggagactctgcccatgttctccccttgcgtggctaaggatggagctgtgcagccagatgggaggtacggggtaggcaggagggctccaggaaaggggctgcccacagccaggatgcactaggcagcctgtggccccttcctctaaaacctgctctgaggccagaaagccacagcaaggatgtttccaccttcatctccctactgagtgtgacccttgggaaagaaacaggaagagcaggcaggacgcggtgactcacgcctgtaatcccagcactttgggaggccgaggcgggtggatcacttgaggtcaggagttcaagaccagcctggccaacatggcaaaaccccatctctactaaaaatacaaaaaaaatagccaggtgtggtggcacacgcctgtaatcccagctactcgggaggctgaggcaggagaactgcttgaacctgggagacggag

SEQ ID NO: 1241738 - DNA, 4001 bp, Homo sapiens
agcttgacagacattaatttggggcaggtattcttcttcccaagaactggaaaaactgaaacggagacgtgtcacaatgagttgtgaaaagcagggagaagatgaggtctccacactgagaaccgtaagggctcctgacagagccggccttcccctttatggcacccagatgcttacagttactgatacgatcgcatgtgcaagaatacatatgtttccctggacagcacaatgtaattccaaattaaaatcagtcaaggatgtgatgtgaattcagcaagccactcagctccagggctcctggcctcccagaagcgccggctcttaacagaatggctctatctccttccccacccacctccccagccccaacggaggagcatcgcacatcctgagccttggtgctggtgaatcctggggcaccctgctgtgtggccagcactaggcccccctctgcagagctcccagctccagttcagaccctccagagcagacaccccagcgagaatttggacttactgtgctccgccagcccctggatcatgtcgaatttatggatttctttggcatagtattccgactcggtgttttcctgggtgcagccttcctccctctccccatgcatctcctccagcagctcccgggtgctgttgtaaagggccaggacctgataggggacgtgggtcatcaccgttggctcaggggggctggtgagcctgagcttgctcaagatctgtcccctaatggcttccaccctcttcttcttgatgtggccgaagtccaaggtggtgcaagtggacagagagaggctgaccgtggcaaagttcagcagggccaggaccaccagagccctttgcaagtgcatcttcatgtgtgagctgggaagagaggccagggggacggcaaggcctggagaggaagagaccccagcagacgtgcagaaggagggaggaaaaccaggcggcctccccagatcccaaagactgaggcttggcaagaaggtgcatgaactcactgcactgcgagagcttcaggacttccaggaagcgctggcaaccctgaggacgaagaagcggactgtgtgccttgtagcgctgggattcttgtccatgtgtctaaacaggttttgctgggctctgactcccagcaggccaggtggagggcaagcagagggctgggaggggtggcaaggcagctgggagtgggaagggagctggagtttttccttaggtaaaaataaatagagtggatatctgatattgccaaacgccgcttggcgatggggagaaagtgggtattttaaagaagaagcagaaggaccatggctgggtcccaaaatcaaaatccttgccttgccttgaaagaaaataagaaaagagaatggaaaagaaaagggaaaaaaaagtaaaaaaaaaaagatcaccagtgagtaggtggggagaagcagggccgggcagttgctggcccagctaaaggtgggggcagtacaggacacacttgtctctcaggcactccattcatgctttctcttttgtttacacttcctcgggggctttctaaatgactttgttcacgctgcctctcgtcttcattggctggggtgtggggttatatgcattggaaggcagggaggcaggcctctgagcgcagcagccccaatcatccactcagacgcccagggtcaccagcacctcggcttgtcttctgcctcggccattgcttctgtcccctgcttctctttaaaaaataaaaaggagaaaaaaataaaataaaatagaagccagttcacggcacgcctgctccggaaagctgttattccttctctcgcacgcctcttcccctgtctctgcctctctcgctcattcccttggacttgactctctgcttccctccctttctctctctccctctccctctccctctcgctcctctccctctctctctcacacacacacacatgcacacacactgctttctctatttctctctgctgaaattttatacctccctcccatgacgtctctggcctggggtgggggagggagggaccagcgcacgcagcctcttttgctgcacgatgttaatgttttaaacaggcacaggaaaagccgagcccttttgaaaaatactttgcgagtcctctcgttcgacgtggtagctgaactttttttcccctcttggaatcactcctgccacacgttggctgtttttctggaaagttactccgatgagccccctccctccctttcccccagccccggcgccctctcgccagctgtcagtccgcgccgtccgcggcccgcgtctactctccctcctggtcccccggtcccggggccgcccgcgggccaggcccaacccggggcagggtccgcagagggcgcgggacccggtaggggcggccatgccagcctcgcagaggggactcccagcctgcgagccgggtcggagggtcggcgtccgctccgcggcgatcctggcccgattcttcattgacaagatcggagtcgggaggcgggcagaagcctggagacgctccaggggcagtgaaaaatggtggcgttttccggaagatcgagggtgccctctggcgaggcgaggccgccagtgaaggagctcggctggtcgggagccggggaggctcgggggctgggggctgcggggtgggggctgaggggcgggagaaggggctgcggtagagagcgagaaaaacaagacccaggccccgaggaatcgcctccctcccggcccgacgtgcgcacgagcgcacctctccctccccgaccgccgctccggagccgctctcgcagaaatgtcatccagatgttcagcctccctccccgccgaggtctccgcagggagctgcgccagcgagcgcgaagtcagcagttggcccgagcccatttcccagatgggtgaggggaagtcggctctgtgctttcgctcctcttctcggcccgaacctctaggccttttcccacgagcagccaagggagggtagggcacgtggctccccgcaccccgcaacacagggcttgcctctgaactgaactttcctgagagtgagtgccgctcccaccccatctcactccagccttcctggaccctttctgagaggtctggcttccaggccactaactgaaggggctgttctctgtatcccagcacagcggtgggtcactttacggatgaggaaactgaggcatagagttttttgtttttttttttacagaccacactgcttgtgagtgatggaggcgatattttacacaggctatctagcttgggtaggcattactttcatttgcaaaaccaatgggaaacctaggggtagaaactttaaaagtaacttgcccaaggtcacatagttattaggtgtcagctgttgggatttggacccaggacgttgccagattctggacttaattactatgctatactgcctctgaaatttcagaaaaagtttaatgtttactatataccaggcactattctaggctctgtgaagaatatcagtgaacgaaacaaaactcctgccctcagggaaattttattttagaggcaggggtggggcagtggaggaggcgataaactaaataaatatgtaaatgatgtagtacggtaaaaagtgctgagccaggtgcagtggctcacgcctgtaatcccagcatttggggaggcccatgcaggaggattacttgagctcaggaattcgagaccagccccagcaacacggcgaaacccagtctctacaaaaaaatggaaaaattagcccggcatgttggcgcaggcatctacttgggaggctgaggcaggataatcacttgagccagggaggcagagtttacagggggccaagattgcaccactgcactccagcctggacgacagagcaagaccgtgtctcaaacagacaagcaaacaaacaaatgtggtgtggcagaaaatcaagcagggaaggaggatggggtgtgcctaggttgggggatgttgcagtttca

SEQ ID NO: 1241739 - DNA, 4001 bp, Homo sapiens
cataatcaccagcctgagaagtcaagctacaccaagcaacgcggtaagggaggcacctgccttgggtcatggggacagagggacagagacagagagagacagaattggcagagatgggggacatggaaggcaagagggagagagagagatagaagagagaaccagccacatcctggggaatgagaacagatgcacaaaggacagagcagcaatgccgaaggaggcaccgaggcaggccctgaagaggagtactctgagaccgatgccccaggaggcttgaggaggatgggcttgggaaaaactgcaacaccaagaccctctctgagacacaaccccaggggcacacccacacacttgcacctgccttatctggcagaggtgaggagtggggcagggaggagcctaaagacctctctgaccctaatgccagcctctccccaccaaacatagggccttcacccgtcccaatccaagccccactgaccgatgagtaactcaagggtgatgcgatcagaggattcataggtccgggacaggaggaggagcatatggaaaggctgcccgcggcgcactatcagctcgtcgtactcatactcgtctgtgtggtgctctcggcggttctggtccgagcgcgagctcagcaagtccacaccgttcactactagcatgccctctgcaaggacacagctccgtgtcagtgaagccccatgaggagcccaggcccttatcattagcttcctatcccccccagaaatgccaggctgagtctctggtcccattaaagccttttagctctcagctgaggaggacagaccggcctcacctcggatggtgccatctccagctgcattgacaccgctgccccgggatacaggccggcgggagtctgagccccgggagccaggtcttcgagtgccagagctggaccctcgacccctggagtcagagggttcaggtccccagtcgtcatctgccgcatttcggcatgaacagcagccacagcagcgagcccagaaggaacggcctcctcctctgcgagagcgtccgtctggctctggctctggctctggagatggcgtggtagggggctgcaaggggttgccaccccaacggcccacatcggaacgtggcccatccatcatgcctgttaggaagaggcagggtggctccttaacccaggtagtcccagccagttgacccagaaaccctccatccagacagctgattcagtcccacccgatgaccgaaacaatcccaccttggcccagagattctccagacacatccagagaccttccgcgaagaccattcagactcacccagagaagcttctcatgctgcagagaaaagccttcccctcacccccaccaaacaacatccgaaaaactgcccaatgaagaaacccactcaacgatccatcccaggaaatccacatagttccctgcatggacacttgtcccagcctcaagacccagctgcacacacatcagagtgctccagcatccctgggcctggtccgtccacctgctagctctgcagtctagaggtgcacaacactgacagcttctagaactcatttcttagcagaaatcccccaactcaaggttcctcacaagacagacaagtgaccccggggcctgtggtccttggcattcccaagtcagggaagaccccacttggggctgccaggaggggtagggcatggcaggtgcccggagcctgtgcacagggaaagcagagtcttggtgttgggaacagcctagctggggctgacaggtacacagctggcccacaccccaccttgctggatccaggcacggcctctgatagtgtgggccgcctggactcggcaccacagtacccgtgggagcccctcacctggcagcagtgttggcaaccgcagtactgagtcctggggctgagatggaacaggtcaggatggatgggacaggacccacagactggatgccgcagggacagacctggtaagtgacttatgtgggagggaggggccaaactgctgtagggggcggagagaagaggccaggcctctgggcgggaaatggggagaagatgctagggagggagcaggggtgaggtctgggggcttaggctgggctttggtgggagccaccgctgtgatggcccctggcaccaggctgattcctaccagactgggcatgtgaggagccccttctcccggatgaagaagctgcaagggcagtggggcaggcaggcccttccacccacagccctgtctggccgaccttctggtcccaagcttaggctgcctacctctgctctcacaggctcctgctgccgagttctgtgcagcccaagccaggctcagccctatgaaattggcccaggggcctggtcctggaactcatcctgcccagggaggtcctgggatcccaggttgcagactggtgacatcagcagccaggccctcagactggctccaccagctaacccctgacctgctggctctaccagatattctgactccctccacccccaagtctgtcccttctttctcagctgctctacagccccaggcatgagtgagctgccctcaagtttgggattagggagatcagagtaggagcaatctcatttcacgtcccccacccccgctgtagcctcgggggttaggggatgtttaggcctttccactcaggcttgggtgggaactgagtcccccttccaggggtacagagtacctttctctcactgagaggagtctctgctcagttggactagaggattcccttttctccaacctggaattcttcctgggaatccagaccaaccggctcaggcacctgtgctgtgtgcatccttactccaccccgtcactggggaaacactgaggatggcaccaaggcgatcccaaggtagagaggaggaggctaggcatcttcagggaggctctccttgggtcttgtcctcaggcccgtcagccagggccttcttccttctttccttccttcccactagtgtcccagctctgcccatgggccgcctagcagaagacagtaaaaacaggccgacaagaagacacaaggaaacagaatccaggaggggctgtttggtgatgcatcaggcagggaggtgccgtggggagtggggacagagaggccccaggaactggcagggagccctccacacccacactgccttttcttgtccagctccaagcaccagaacctgcccgggggtgggggcaggtgccccacctccaacaccctcagtagacacaccagtggatataaacttccaggcaggtcagccagagggctttgtgcaggggctgcggatttgtgcatcactgcagatacgggaaggggcagggccctggctgtccggacgtgtgtgagcacatgtgggcccaggcagatcccagagaaccagtaggatgcctttgtcacactctctccctagctttaatcaatctttctctccccacccagccaggtttgagtcagtgccctaacccctgagccagtcccctccccccaccaccactcaggactctctaggtcaggacaaggtgtgtacatggtatgtgtggggggacaccatgggagcagacactcagctcaggacctcaaggagctgaggccaggccgctgcccaaccattccttagcaatacagaagcaagaacatgagtctagaatcctagaccaagggtagagacaactttggtttcagtgctgaagcgctccggccaagaaccttgggcaagtctcaacagcagtttcctcatcagtacactgggcctaaaaatctcatccctgagactctgtgaggatcaaatggtatcaagtattctcaaaggtacttcaaccgtagaatgctactcatggggaccgatagtgttgttcaggcaggacggagcaaggacaccctggcccattcctgggaacgtggagcccttgagcctccccagctatggtgaatgggggccagggcagggggaacatgtggaaggtgcag

SEQ ID NO: 1241740 - DNA, 4001 bp, Homo sapiens
aactataatgttattgtcctttacaaaaagccaaaaggacaaattaaaaggatctaggtaattgtaaaacaaaaggacaagactggttggactctcagtgtagtgggcagtgcatcagtctcatgatctgaagatcctgggtctgagcctcccagagggcagcttttgtaaaaaggcttactttttactccttgtggaggagtggtgactgaagaagaagaaaaaaaagagattgggggaaggaagagtcaaagcagggaactgagaaatgaaactgaaggagatctggctataggtatgagaactaaatgaggcaggttggctggaattagacacgtggaaggactagatccaaattagctactgttaaagagaaaacgagatttcacagaactgtaagcaaacttagaaaattgctaaaacaattcccattacaaaaataatccaggccaggcacagaggctcacacctgtaatcccagcactttggaaggccgaggcaggcaaattgcttgagtccaggagttccagaccagcctgggcaacacggcaaaaccttgtctctattaaaaaaaaaatttttaatccggaggccctcccccactgcatggtccagcaggtgcctccaaaagagaaaagtggggagcaggaaaagcacaaaagggcctgtctccctcaccaagcatgctgctgagcctgtggatcttctctagggcagttggtacttcagcctcctcatgcaccagggcctctacctcacccacagcgtagccaaagtcggctgtatccaagtccaccctgagctgtggctcctcttcatcagctcccaagagcaccagcttccaggcactccgcttagtcacaaaactagctacttcctgcagccccagtgggcccagcacagcagccacatctccagcccccaggccgtcagcccgcagcaccttacagagttgggccacaattgtaggttccgctgtgagttccttatactccgtgtggggtcctaagacacctgctgctccaggacatttgagctcccatccactatcctctcgtcgtcgcagccagtggtcagcctgcatgaggctcagctcaggggtgtcatagtaggtgtctcggaaggtgacccggtactccagggtgccccccaactcctgcagccgctcctctgtgccaggccctggaaggaactttcgctccacctcaatcaagccctgggccatgctacctgcaattggctgaacaaacgtttgctgagttcccaaggatgcaaagcctggtgctcagctcctggggcgtcaactcagtacagaacccctccctggaaaaacttatgaggggcacactgtgtcgcaatagtctctagggctactgcccttttctctctacctcggtgacattaaggccccgtcggtgatattttaaggctctgacagtgacaggtctccagtaaaatcccttccactgctgctgatgtcctcaatccaaagagacccctagaaagcaggccgggtagcgggtgtcctttcaacgcccccctctctacaccttgccaccccaggaggctactggctcacgacccgggaggacctgccctttcctgctacactaccggccagcggaacttcaggtctcacctcaaagcccgagagtctcctcgcgggacccacagagggggaagggagcccacgccatacactcgcgaggaatgccgggagcagttccggatcccggacctcggcccgaccctccgcgcgcccggcaggtcccggcaccagcggccatattacgcccgttgtggcggtgccgagagcaggccagggctcgagacacgcgctatgtaatgggaggccgcgacccccgcggtggccaggggagcgaggccgccccttgcattctgctcctcattgttggccccgcacggctcccgggggctggtacaggtctcatgcctgaggctgagccaggcaccccgaggcgcggatgcatgatgggagatgtagttccaaagggagactttgccatctcgccccgcccgtcgctatggcgacaggaaagctgcacttggtgcctgcggtactctacctaaagctgaactggggctacaaggcggcggggagagtcgggtgcaaggagctcaagccccagtcccgtctccaacaccccccgccgcacccccaacgcaggcagatgggcctggaatacaagccattcacaccgtccaacagatatctgctatagcagccagctaagcgcaggccagtggcaatggtggcgaggggggttggggtggggggagggaagggggcgggggcagcgcgtaataaagtccagtttagctactctggagttttagaggggatctaatacctcctggcatgaacgttgagggtaagagtgggtgagaaactttctgtcagagaataaagtggtattttggccaggaactaaagatatgatggtatttcaacagttggagacctagatggagacaggaatagcctaagcaaaggcccagaaactggagagcacctgggtggtacgtaaggagaagacgaggctagaaatgcagttgagggaaaagccttgagtgctagactgaggagtttgtcagagtttccagcggtccctaagcagtttttgtcaggtgtagaactacttatgttcatttagaatacagaaaggccggtgcggttgctcacacctgcaatcccagcactttgggaagccgaggcaggtgaatcacctgaggtcaggagttcgagaccagcctggccaacatggagaaacccccccggcccgccgtctctactaaaaatgcaaaaatgagccgggcatggtggcgcgtgcttgtgttcccagctactccagaggctgaggcatgagaattgcttgaacctgggaggcagaggttgcagtgagctgagatggcgccactgcactccagcctgggcgacagaacgagactccatctgtccccaaaaaaataaaattcaggaaaacatgggggttggccctttgaatgctttgggagacaaaatattaatagagatgattccttcttactccctctgaggactatggttatctggagactctaactatatgtctgaccttccatgtgaggaagctccctgaggaaccgtggctcttaactcctggactccttcctatgatgggtgagaagtgccatgttctcaacacctgccctctcaccagtatgtttctggaaatacatgaccagtgagaggtattatagggagaaggacactggtttaaagacatggcattttggccaggtgtgttgactcacacttgtaatcctagcactttgggaggtcgaggcaggaggatcatttgaggccaggagtttgagaccagcctgggcaacataggaagaccctgtttctacaaaaaaaaaaaaaaaaaaattttaattagccgggtgtggtagtgcatgcctgtggtcccagctgctcaggaggttgaggcagcgggatagcttgagcccaggaggtcaagggcagtgagctacgatcctgctactgcctgcactccagcctcggcaacagagcaagaccctgtgcataaataaataaacaaatggcatcttgaacttggagtagcttgggtcaacctctgtccccactccatgttaagcactgttggttagggagagaagaaaccccagctcctaaagcctgcttttcatccatcttttgctttccggttttgttaacctgggatgaagacctaatttttccttatgttataagatccaatccagtggggcaaaagcagcagcttatttgaacagaaagaccagtttccggagccagacctgaggtcgactcccagcttcactttctagatgtttggccttccgcaagctactccactttcctaagcatctgctttttttttttttttttttttttttttgagacagagtctcactctggcgtctcagctcactgcaacctctgcctcctgggttca

SEQ ID NO: 1241741 - DNA, 4001 bp, Homo sapiens
gatcatgacagagcaaggccctgtctctggaaaaaaaaaaaaaaagagggaaaggaactaaagagtaatgacaaagagctgtaagatccaaattaagttgtcattttaataattcagagtgcctacactcagatcttaggtcactgtttctttcacataagtttcacctagaaggtaagagttaaactatctccaaggtctctggcgactctgacattgtagttctttcagtacactcataatatacaataaattgtgaacaaacaagtaccacctatgagcccaattacgaagagaaaatgtaactaaaataaaaaataatggccacgtgcggtggctcacgcttgtaatactagcactttggtaggccgaggcgggtgaatcaagtcaggagttcgagaccaacctggccaacatggtgaaaccccgtctctaataaaaatacaaaaaaaattagctgggcgtggtggcgggcgcctgtaatccagctactcaggaggcctgaggcagaagaatcgcttgaacctgggaggcggaggttgcagtgagccaagatcgcgccactgcactccagcctgtgccacagagtgagactttgtctcaaaaaacaacacaaaactcattagagaaactcagcaagttacaaaaaaataataattaaaagggtctttaacgctgagcccttaaagtctttttttttcttttttttttaagacagtcttgatctgtcactcaggctggagcacaatggcgcgatctcagctcactgcaacctccacctgccgggttcaagcaattctcttgcctcagcctcctgagtagctgggactacaggcgcgcgccaccatgcccagttaattttttgtattttcagtagaggcggggtttcaccttgctggccaggctggtctcgaactcctgatctcgtgatccgcccgccttggcctcccaaagtgctgggattacaggcgtgagccaccgcgctcagactttaaagtccattttaagtctagacttctatgaaggtagactgccgagatgtaaaagaaataaaattagttatttagcttttagatcggattacattttctgctttgattattctaaagcctccagtaaggcgtaaagggaaagctctaagtagcgcatcctgggaaatgagcagatcagggaaggggtgttagacctggtattatgtctaaagacgattttcatttaaaggaggatcttcccccgggcagctcaaggtcacatcgtaaataccttatagtctaattcagtgtcccaaaacaggaccccgactccccagatccgggttgggggtggctcagggcctaaagttcctaccctcgcccaggtgacaccatctccaggaaggtctgcacccgacccggcgaagcgctgtcccgcttcgcaccccccactgctccaggtacgtgcggcggcctcctcgggagaccccgccactttcctggagcgtagcctgccaccccccgtccgggaaccccggattctcacggcagagaacagacaccatacttaagcacaggctctcgcatccgacatcagtacaaggctgggggttgttgggggacggttgagccttgggagggagggtcagggtctggacaggagccgcggccgccagatgggaaagaacacgtgggagcagtaatgtcaagtgacacttaaacccttagacgccgattcgttataacgcgaggaaatctagaagaaaaagcaggtaccatcagcgaattctaaaatctcctaaggattaacttcggttattttctgcttagacaacgctttctattcccgacttcctctccaataatgacccgaatctgtcgaaacttcttggaagcctaatttacctaatcccacgtccctaacggtcttcggaagcgaagcagtgtcaacagtccctggtaaacacaagtagtattacaagtcgggagctcttcaagtcttggatgagactgtagagcggtcttgtgcggcaatgtgctaccttaaaataaataaataaataaacccctgttatgtccggagtttgtttccacccggagaggaatggaagagcaccagagagcgcttagctttctggttggatgttttgggtgagtttcttggcgcgcatgcgtgttgtgtctcaagggcgggtttgaagggaagtgggtgttgacctgcgggcaactgacgctgttgtcagattacacccacgacggtgcgggtctcgggcgttctggagatacgtaggggtgaatttatgtttccgacgattgcatctggaggggtgtgtaagactctgtggctgaagaaagctattacgcttcttatgtgggtcattattttaaaaatagcatttcgcttttatttgcttgactgcctcttctcaacaaattttaagcccgccactacatgtgtttggttttgccctaccagctctggggttggggagtgcactgttatggttattgttgctcctgtggccattctcttgtcatccccactttcacattttggcgtggtgtattaatagactgagtgggattaatgggtaaatatgactttatagtcagctctaatcctggattcaatatcagaatttagattttcagctttgtggatgttcgacattttaaaaacagttattgcaaagaggtgaaaattttgttctgaagtcttaaggaaacagagaaagtttttccgtccttaagtgtgggacttgttttgtgaccaacaatatgaaaggctctgaggtcagcttggagaagaaaaaaaagattaagatgccagtgaagagacttcgtgaggtagtttctcaaaatcatggagatcatttggttttgctgaaagatgagttgccctgtgttcctccggcattgtctgcaaataaacgtcttcctgttggaacggggactagtttgaatggaacatcacgtggtatgtgattccatgtagtttttcaaccagttttagtttagtaaatctttagtccttatttgtttaaattcccaaacgtaagatataagtctagtttgtacagatgtttgaaaactgaccctgtttcccgggaaaatggccaggaagcctataaaatgtttgaatagatggaatgaatgaaactttaacgtcccctgttgtgctttttttttttttttttgcattgacttttgcatatttttttttttatatttatggtggatacacttaacttgtataatgtgctttattttcccccacgtagtgttttttatagttttcccccaaagtagtgctttttacctaattcactactttcttttcatagtgggaaaagcaggacttctgccaattgatggcttctatattccaattcacttaatctgtctagagctcagtgaaaataaggataacatatgctttacccacttcgctgctaattgtgaggattaaattaatgaatatgtgagcaaaaacagcaaaacgcttttgtaatgctgttctttgggggatacagcggtgacactcaaatagtactgctgttaaattagacctttacatcgtatacatatttctacccatagtttgtccacatccaatagtgtatggttatattttaaaatgtttcgtgcttaatctcactttattgtcagtaccgaaccttattttcccaaatatcaactgtaaaaactttcattcagatatgtttaaatacattttcttaactttttttgcatgcaaattgtctttccaacttctgcgttatatggagtttatagatcttgaatcatgcatatacagtttctaaagctaaggatctgattttaaaatcactaaaatctattcctttgttttgttaggttcatcagacttaacttctgctagaaattgttaccagcctctattagaaaatcccatggtgtcagaaagtgtaagcaaaaggattcttaattatgctcacgttaaaattttcagtattgtcaaataatgcattcttaaattatgtttgatta

SEQ ID NO: 1241742 - DNA, 4001 bp, Homo sapiens
gaactcttcgtcggcctagaggggccagattgaagtgtcggccagctagaggttctgggtgcgtccttgaagatggtccctgaggaagatgtgtgccaggcttggcttttggcaggggattgtggagtgctagtctttgttgctgaggaggattctgttccatgggctcagccaggttcactgagtcagtaacagagcactctgaaaaagaaaatgaggccccttataaagagaacagatagtaacagaataactggtttcttatgcccggagcccatggaactattccagtggactgcctcaaaaggtctcaggctaaacactacacctccaaattcctagtacctggaagcagccaccccatgtccacaccatattgtctccaggcaagagaagaggtgatagagactccaggctgcatccaactcagcacatcctgaagctgtgggcagggacagaggtatgaagaccacaatccttgaaacagccaccccacactctgcccttacatgttttgccccagcgaaacctgctgtgcctgcggtgtaggcagtgctttctccagctgacacaagtactcaaaaagcagcttttccatggcagccagaaagggttccccatactcttgttcaagttcctacagcaggggagattaggtcaaaagtgggttagtggccaggcacggtggctcacgcctgtaatcctggccatttgggaggccgaggtgggcggatcacttgaggtcaggagttcgagaccagcctggccaacatggtgaaaccccatctctactaaaatacaaaaattagctgggcatttgtaatcccagctactcgggaggctgaggcaggagaatcgcttgaacccgggaggcagaggttgcagtgagccgagattgtgccactgcactccagcctgggcgacagagcaagattcctcaaaaaaaaaaaaaaatgggttagagaaaatagccacataatagccttcaaaccagtctcacctgcagcttcgaggccaaatccacaggagcctctgacagctgcttcacctgctggtaaaaagtttcctgtgcctccaaaatcttcctcagatcctgctttgtctgttgaggatacagaagacagagaagttagcaccaacatccagtagacaggaggagcaactttgctgcaccaagtgtaactggggtcagggcttgttccggggattactcacagccttgggatcccgcactataggtccagattctggaaagtggtgattcagggctttcaggacttgggcccaaggccggccctgcaggatcagctccaccaccacctgtacggtactgaattcagaatccccacttcggggcaagctgaccttttccaactagtctcatccccaagctgtgggcccttgtcaggtgctcgcatcccgcccctttctttctttccccttccaggtcctacttgctccaataccttggcctttaggcccatacaaaggcgttcgtggtgccggtagcgaaccaagccaggggcaacagcgcgcagagatcgcagaaactccagtactcgcggaaaatgttccacgcagcgtccgcgcacaacctgccagctagccgcggcggcgaagcgtagagctgcgggacccgccaccaggggcgtagccatggtcggcgggctccgcccggaggcggtccctccgggttcctcacccggatgggtgaggctttccgatcactcctaggggcggggcttctggcaactccctgtcgctccggtctgtcggctctgggtacctcgcgatctgactcggctcccttccatcggcccccagaattctgggggagggggtcttctggctcgggctggaggagcctgagtggagaagctgaccgtctccagtggcactgggtcgctcagctttaaacgtcgccgctgtctcgagcccgagggtgcctcacttccggctccgctactagcttcccttgccccggaaaagggcggtaagagggagccaatgggcggccacagagggaaccgtgacggtgcgtcagaaggccacgccccagcggagctgtagctgcccgcttcctgcactctctgccggctgacatgagttggcggctgaggctgtcgtggccgctgaggctgttgtggccgttcgtctgggtcctcccagccttgctttcttcgcggagcctgcggagaagccccgtcactcccgtgaggctcgacttcctagtctgtaaaacgaggatcatgccaccgccctttcccactgtcttcacccatcgaaatttagttctttaaattccagacccgagccggcgtctacaaagccttcccctctgcgcgcgtcgcttccagtaggaattcgactgttccttttataaaacagaagagggcgcccgcccttaaaaaataaaatacaggctgggcgtggtggcttgtgtctaatcccagcgctttgagaggccgaggcaggagggtcacttgagcccaggagctccagacaagcctgggcgacatggtgaaaccccttctctgctaaaagtacaaaaattagctgggcgtggtggcaggcgcctgtaatcccagctactcgggaggccgaggcaggagaatcgcttgaacccagtagacgggaggtggcagtgagccgcgatcttgcctctgcattccagcctgggcgacagagggagaatctctctcaaagaaaaaaaaaaaaaaaaaaagaggaagaagaagaaatagaatacaggctgggggcacggtgactcacacctgtaatcccagcactctgagaggccgagaggggaggatcgatccgcttgagcccaggagttccagaccagactggatcacatggcgataacctgtctctactgaaaatcaaaaaaactagccgggcgtagtggcacgcctgtagtcccagctactcaggaggctgagttgggaggattgtttgagccagggaggttgaggcttcagtgactgcactccagcctgagtgatagagtgagacggggtctcacacacacacacaaattagtttcttgttttaggattctgttgtgcactgaacttgtcagccccctaatgtaattgactgctctccttgactgtctcttccacaggcttcctggtgcctctcatttccatcagcaagcacagaacctaacacacagcttacactccttaattgttggctggattagttgcctgccttgaccaccttacaaggatttagtgaaactgctccgtctttagcccatgtcttccattcccagagataatggttcacacatccttgtctccgccccggatcagtctcagctgatccgcacattcgactgcccaagaaacacccagtcccaaagtaccccaaattggatatgtgtgaaattctagttatcttcctttttccctttatttattccttctctaatgttctttctttcttatgtagatatgaacttctgttgttttacttttttttttttttgagacggagtctcgctctgtcgcccaggctgaagtgcagtggcgcgatctcagctcactgcaagctccgcctcctgggttcacgccattctcctgcctcagcctcccgagtagctgggactacaggcgcccaccaccgcgcccggcttttttgtatttttagtagagacggggtttcaccgtggtctggatctcctgacctcgtgatccgctcgcctcggcctcccaaagtgctgggattacaaggcgtgagccaccgcgctcggctctttttttttttttgaggtggggagacagtctcgctctgttgctcagggtggagtgcagtgatcttggctcactgcaacctctgcctcctgggcttaagtgatcctcctgcctcagcctccaaagtaactggggctacaggcatgcaccaccatgcctggctcatttttttctattttttgtagagacaagtctttgttgcccaggctggtctcgaattcctggactcaagcgatcttc

SEQ ID NO: 1241743 - DNA, 4001 bp, Homo sapiens
ggtgaaaccccgtctctactaaaaatacaaaaaattagctgggcgtggtggcgggcgcctgtagtcccagctactcgggaggctgaggcaggagaatggcgtgaacccgggaggtggagcttgcagtgagccgagattgcgccacggcactccagcctgggcgacagagcaagactctgtctcaaaaaaaaaaaaaaagtgctgggattacaggagtgagccaccacacccagcctgggttggataattctttgtcatagtggggttatcccgtgcactgtaggatgtagctttcctggcctcttcccattctatgctggtagtacccccccagctgtaacaacaaaaaatgtctccagacattgctaaatgtcccttgggggacaaaactgttccctgttgacaatcactgggttagactctagtatgttgagattctccaaaaaagagcaagtatggcttgacagggttaaggcctagaaaaaggagagcggtgaggtataaggaggtctggagtggactaaggagaagtaccaggattcactaaagaaaaagcatgacagggaagtttaggtagagactacaggaaacagctaagaaacagccaagaggtaggcatggaaggaaacagaactatgtgggactgatagttgggacctcatgaccaacagagaagcttgcagtaagaaaccctgggctctgatatcagttctgcaaatcactgtccatgtaatcttgaaaaaagtaacttctgagcaagtatgtatcttagtcaactgaattagaatagcatcacctaacctgcctgccacactgggttgtattgtagttagaatcaaatcagacaatttccataaaggtaccctgaaccataaatgtaaggcactgttagtctctgggaaggagggctacgtgatagccaatgtggagaggctgacctgtgcagaactgagctgcatgtggcacagaattctcttctccacgttttcccgaaagcggatctcatacaaagactcagccattcggtccccatccagcacttcacccaggctaaggcttttgtgacgtatcttctcagggcagcagactggaagctgatagtagtggtaagtttcctgagggttatggtagggtcccactttgttgacatacagaataacagggtcgccggccttgtagtgtgtcacgccttccacccctggcccatggcctgtgcccagcaacagtatcaggattggcaaccactggcagctccaacttcgagggttccctacgactgtcatccttaaggcagtggaacctgtttgggggaatcctgaggttatagaaaccagggaggttacagaaaccccaggtcaggtgcctcgaactgaggtcccctggctccacttgctcccattggccccctccccgcctcaccctaccccacgtctctctatcccaaagaccccgctccacctctgctctctcatcctcccaacctggggttcaccccacccgcagcccgtctggcccggggcctctactacgcgccctggcccgtttccatggcaacgccgctcggtctcgcacctcgggtcccttcccgccacagccccggggtcctcaccgcgcgggaagggctggccgaggcggcgccagcggccttcgcgcccccgtagctgcctttgggctcctgctggggtctctcccacagcggcgcggtagcggcgggttggagaggacctgccgaccgacttctacggggttgcccgttgctgcgcctgacagcggcggctgcggctacaccgcgctggacaccgctctggcttactcaagaactccccgttgcgccttctccatctggaggcccggcccagctccggggaccccgtgaggctcggcttgccccgcccgtcttcggcgaggcgggggtcctcccggcgatcggcagcgcggcccaggacacgtcagtcttaccacttccgccctcaccggcggcgacctcagcctggcggaaagctccttgcctggaacgcagagggccttcgctgctgcggcccctggggactccttcgcgacggcttcccggggagggggctgaggcctggcagcgaggaccctgacaccccttcgggagaggagtggctgctaggccgctcgcttgctcctggaaagatttggggtttgagagctcttggccaggaggctcgcgctggccgaggcccgagagctgtccccgcgggacgggactagcgagggccggggagatggagcgcaggcggcgtctgggttcgaagcactttccggctgaaccacctgctgctgaggctgagccctgagaggcggttcgtggcccccaaaccggggaaggggcgaagctttgggcatctgtcccatgcaagggtcccaacatctgaatctcacctcactcgtctcccacctgtcacgaatggccagcgccaaagtgataaatatgtaataggaatgtcttcccgaggctgtgctggagacttccctggccgcacagtgaccgttcagagcccacgataagcaagccgaaacccggtttggcgcagaggcgcgcaaggagagaggtctgtcctttgactctgtgagttgggcagcctaacatggttattgttaattgacggtaaagtatctcgaggtccgttagtctatgtttttgttcttatttatcactgtgtatgtctttgggcttctcttcactttgtatggcagattattttgaaaaagtttacccttgtgtttgtctcagctgttttaaaggggatctgccgtctagggagttccccttgaaaatcggacctttgagcagtgacttctgttttgccacctgggagcaacgtgtaaggaagtggacttaagcttctctctccccaggggaagaagcacagtggaaaaatcacaagtgacttctggcctgaaaagcccttaatttacctgcttctacaattactgccctttctgacccagttctttccctgcagatataggtgaggttcaaagaagcagatggtggagttttgttagacaatcagtgaattttctaattagaaaaagaactgaggtcgggcgcggtgggctcacgcctgtaataccagcactttgggaggccaaggcgggcagatcacccgaggtcgggagttcgagaccagcctaacatggcgaaaccctgtctctactaaaaatacaaaaaaattagctgggcctggtggcgggcgcctgtaaccccagccacttgtgaggctgaggcaggagaatagcttgaacctgggaagcggaggttgcagtgaaccgagatcaggccattgcactccagcctgggcaacagagcgggactccatctcaaaaaaaaaaaaaaaaagaaaaagaaaaagaaaaaagaacaagaactgagagtggcttagaaataatctctaactgacaaccacctggtctctaaagccagaaacttgggcctctttctctctatcttcccgctcagatatcagtgtcaccaagccctctccacttatttcctgaatatcttccagatgcttgcctccacctctttggttcaggctccatcttctctcacctaaactaccatgagagccaccttgctagtctcctagtcaccttccccctgggtcatttttcacactgctactggaaagtttcttttttaaaatcaggattctcaggggagggggtgcctggtcatcagcatttttttttttttaaaaaaagcaagcactgaggccgggcgtagtggctcactcctgtaatcccagcactttgggaggccgaggtggattacctgaggtcgggagttcaagaccagcctgtccaacatggtgaaaccccgtctctactaaaaatacaaaaaaaattagccgggcatggtggctcatggctataaccccagccacttgggaggctgaggcagggtaatcgcttgaacccaggaggcggaggttgcagtgagctgagactgcaccattgcactccagcctggg

SEQ ID NO: 1241744 - DNA, 4001 bp, Homo sapiens
tctcccaaataaagtagaaataaattacatgtattaccacactactgggttccactactttaacataagttatggtcttattatatctgaaacccttttaaaaagtaaaaacgaggccaggcgcggtggcttacggctgtaatcccagcactttgggaggccgaggcgggcagatcacgaggtcaagagatcaagaccatcctggccaacatggtgaaccgtcatctctactaaaatacaaaaattagctgggtgtggtggctggcgcctgtagtcctagctactcggaaggctgaggcaggagaattgcttgaaaccgggaggcagaggctgcagtgagccgagatcgcgccacagcactccagcctggacgacagagcaagactccgtctcaaaaaaaaaaaaaaaaaaaaaaaaagtaaaaatgtttctatttagtataacaaaagccccattgtgttacaaagaaaaaaaaagacactttgcttattgtgaatgaataaaattacctaaaatgcaaccaaatactgacagatatcaaattatattaatgtctcaaagaccaggccaggctactcttagctacaaaacagaatcaaactggtattatggcagtagttgtcaccatccaagagcatagttggtatttacataaaagagccaagtccagattctggcataccaaagaaaaaggactagagactgagaccattttgtaaccaataatcgactttaatcaactacagaaattacaaatttaaaacaaggaaggaataaggttgcagcgcttttccctcaacatacttaactaccaaactaagtaagaatctattccatcgcaaggacagaaaaccaaacaccgcatgttctcactcataggtgggaattgaacaatgagaacacttggacacagggtggggaacatcacacaccggggcctgtcgtggggtggggggaggtgggagggatagcattaggagacatacctaatgtaaatgacgagttaatgggtgcagcacaccaacacggcacatgtatacatatgtaacaaacctgaaagttgtgcgcatgtaccctagaacttaaagtataataataattttgaaaaaaaaaaaagaatctattccatctgtgacacttactagtttatcctacctctgagtctcagtttcctcatttgtaaaatggggctaacagtacctacctacttcatagggtagtgcatgaaccaaatggtaatatatgcaaagtagcacagtaactgacacagcagatgctcaataaataacattttattaatcacggttagctctgtctcctttactttcctgcaggtatcgcggtatcttatgatgccaatccgtataaatattcaacaccccaacatttatttggagaaccaaattacggttcaatgtatctgagaccaaaactggtataggacgttgacaaccgccccagctcaggtgtcaccacatccgccaaagcctcgcagcccttcttggggttcccaggcgttggtgacccgccccgccccgcgacaggcaaccagcggggtgagggggcgggctccaccgcacgtcctttgcgctcccgggaggccagaacaactcccaggcctccgccggcccgactcccccgaacccgagcctcccctcgcctaagcctgccgtcttccctcccggccccacgtcgcccaatgccgcaccttgaggtggctgcgcaggccgccagcgcccccagactggtcggagatctcgtacgcgccagtcactagcaggtccttgtgaatctcctcacggaggcacttgcgagagttaatgggcagatggaaggagatggcaaggaccaatctggggccgagcaggaacaaaagcagcaacgctaacggaaaagggccgcgccgggctggtgggccagacaaaccagacatggtgctggagactcgttcaccaccgaaggcctcaaccgcgccggaaccggggggacccacgtgactcacctctgaccttctgatgccgtccgcgccattttggagactggcatgtagagaaagactctatagcgaatcttttgaaaagggaagaaaggataggtaccatgtcaaaaccgcaagtttaagcagttaaagaagctttaatagaatactattgcaacagttttatttttgttgaagttagtgactactgagtcggccatggcaagtatgggcagccctggaagtaattctcctttaatttccgaaagatgtacccacgagtttaaaggcgagtgacaccatagcaaccaagccccaataggaaacagccacaaggcccttcgctgggcccgcccaccggccgcctaggcgcgagggcggggaatgaggctgtgtctccggggatggggcggtttgcaggcactcccaagcgcctttgacaccttgatgacacctggggcactgagacactagagaggaaaatttcgaggaaagatttcaacttggctattagacagtgtggaccttagagaagaagttttaggggtcacctgatgaatgtgtgccgggcagacatccggttcatgtcccatagcagggtatttgggctggagtaattgtctggctaactgaatgtacatggtattattattattattattattattattattattattattttagcaaacattgaatgtgttctaagctatattcaaaataaatttgaatttggtatttaaattgaataaaacaacatgttttggtccagtctcagatgaacataattaaggggttagcagataagcgttgtcagggaaagtgcgtatgtgtgtgttttaagttcacaaacactttagggatcaaattaactattaacatttgcaaatagacaagcaaattgacacggtaataattcatgcattcattcaatggagtacctactgtgtgccagacattatgctatgcatgtatgtcaacacgtttattgatttaacaaactattactgggatactagcaaatattcagagctgaagaatatattaaaataaacggccaggcgcggtggctcacacctgtaatcccagcactttgggaggctgaggcgggtggatcacgaggtcaggagttcaagaccagcctggccaagatggtgaaaccccgtctctactaaaaatacaaaaaaattagctgggcttggtggcgggcgcctgtaatcccagccactcaggaggctgaggcagagaattgcttgaacccgggagatggaggttgcagtgagctgagatggcgccactgcactccagcctgggcgacggagtgagacttgtctcagaaaagaaagaaggaaagaaagaaaatggaattgctccttggccttttggctaacatcaagtgtagaaaataaacgtggaagacacaatagcccatgttgggaatcattacctactttgattaacgtttattgagcatcttcagaaatatccagaagatggactgtctgcccttagtaatgtacatgattggtgttttttttttttaaacttagtccatttagttattttcctagaaatgaaatcccacagacaaaacaagaacaaacaaaggagctgtaaagcatttaaaattttgacaaatgccatacaataattattttatgaggtgtccacttaggagcatttagttggattgttgtatcactgatctaagataagattggtagtccacacagtacatcctgataatttgcattggccttttccctgccaatgcagggaatcagtataagcagttatctaattcattgtctacttgcattcctgaggctctgctgaccaatagcaagagatctcaacccatgaaaaaactgtgtatgtgtttcctttaaatttccatcttacatttacataatagataatgcaatttaaaatattttcacatatcataatgatctcctctgacattttcaaaaaccctgtgaaatagtctggacaatctgttcattttacagatgaggaaacc

SEQ ID NO: 1241745 - DNA, 4001 bp, Homo sapiens
gaaaatgattgttgacatgactaaatcagaaaatataaatttttttccacctctggcacagaataagcattcaatatctgtaggttatcattactattattttattagcaacaaatcctacctcaagaggaagagcttgctctgggctactataataaacccctacatgacattaaaaaaaaaaattatcaccctgcattctgagggtaagaggaaggaaagtaagcatctctaccaatgtcctgggaggaagtgaatgcaggaatgaattagatgtcagggggaaaaaaaaacacactcatctatctaaaacgcgtgggtacgtttgccataaacacatgagaacctaaaggggaagtaaaaacatgcttaatttgtaaatactggcgcatgcaagggacaagtgttataagacttacctttctgtgtttacttgcttagtcttttagacattatgcttagaatttctactgctatgttaaatatatgccaacgatttttaatttaatacaaagcagagttcgtaagaaaaaaaggcaaaatttgtcaggtgttttaaagtaaaagaatataaaatcatgggaaagagctgggtgagttgtgtgtgtgtttgaataaggcagcattatgagagggaagatacttgggatcagagtagaagacagaaaaaggcaccatgttggaagccatacatccaagaacacctctggcggcacaggaagttcaactgaacaaaaagagaccttactgtcacaatggttgagacgagtatagtgtgtaccatggactataccccaaatgccttagacaaagcagctcaagtaatcctcacaataatcctatgaggcagatatttttagtaatcacattttacagatgaggaaactgacgtttcagactccaatccaggcaccctggctccacagtagtgcctcaaccattatactttatggtgtctattttaatttcagacctagaaaattaatttatatttgctacttaaataagacaagttctctcccctctaccctttcgtatttcaaaagagcatcctttcagttgcatcgtgtgtggtgttcaggaggctgaaagaagaaagtgtgatggatggactcttttgtctttggacactgaaataatacacacggaggaactcgcgttagtagaaatggagacgtcgtcctggacaagaagaggatgagggtcttgagaatgagggaggtaggccaaatttttaattcctgctcttgctttggctactgtgttcaagcaaaagaccccagacactacctatttcaactctgcttttcatttttcccactctaagcgatggagaggatggcagcaaggccagggggcctatgtgcaggaaggctagggcgcagtgggcttctggcagaggaaggcaaggctgccaacccgggtgggggccgagaggcgcgtggtaaggctggggcaggggactgagatggggatagggtggggagccagaagcagggggcggcgaggccagtagggttcgggtcggcagtctagatgtgattagcagacggaggtgggacccgaaccccggctgaagctgaaactgaagctgaagaggcgccaggggcagagccaccctgtcactaccatttgggcagatctcagaaaggaagcggggcaggaatcaaggcatttcgaaacaggagtgagtagaaaataacctcgagcccagggcccgggtggtggcagcggcggggaaggggccccgcgcgcgaaggggctgccgaggtgggtccgctccgcggggaagcccaggacagagcgcggcggaggctcgcgccgtggtgcggggccctgaggccgggcggcacccacccgccagcgccccggccttgcgtacctgaggcggccgcctggctcccctccactccctggcagtccccgacgccgccagccgaccctgggcgggctgtggggctccaggagcccggcccctcagccgcctgcaggtcagacatctgcagcccgcgcacggagctctccgctgccagccgcgagtggctccggaaacagccgaaggccgagcgagcgccgagcacagccgagcgcagcctgcaggccggaagaagcggcgcggcggccgcttgaaaagctagctgacccaggggcggccacaggagctctggcccgctgaggctggcgatgaggccgcagggagggttactgcgtgcttgtgacagacgatttttaaagtcagggcttgaaagaacaaacaaaacctggggaagagtcaggaagacactgccggaaatcgtggtatccatagagacgctatcggaagttggggttgctaggaagccgcggcgcgtctgctaagctgcaaatggctgaagtcccggaggattatgattccggcccagatgaagatggagagctggagcctgagaggcctgaactgcctggacttcataaattgtatgaaaatgccgaaccagacaccatggcaaaggcagactcgaagctaccagcagagatttaccaagagccacagccagagaccgaggaagaggacttcaaagagggggagccagacagtgctaagaacgtgcagctgaaacctggcgggacgtcccaggaaggaattgccaaggagtccaagagagacgtaccaagcgaaactgaaccagggatacaccaagaggtaaagtcggaaacatccagagagatgggagagtttttcaaagatttggaggcccctatggatgaaacgcataaagagtcagacctagagccaccagaggaggctaaaccaaatgttacagaggatgtgttcctagagtcagctatggaaacagatccagatccagtgccaccaacggaaaccatgtctgaggtttcgggggccacagtcagagagagaaatttagaattactagaggaggagactgaaccgggggttccagaggaatcacttagagtgcaacatgaagagacaggtctagagcctccagagcagaccaaacaagattttccaagtgagaaactaggagaatcacttgaagagacagatcttcagccaccaaagatgaccaaaccagagactccagaggagacacaaagagagtcaactgagaagaaaaggacagagccacccgagcaggctagactggaatttctggagaaggaaccaagaaagtctagtgaggaggcaggtctagagcctccagaagagactcaaccagaggttccagaggagatgcaaagaaaggcaactgaggagaaagggacagaactacctgagcggactaaaccagactttccagaccacaagccaagaaagtctactgatgagaacgttcctgagccactagaagagatcaaattagagtttcctgaggaagaatcaagaaaaacaaatgaggaaacaattctagaacaatcagaaatgatgaaaccagaaagtccagaagagataagaaagtcaaatgagaaaaaaaatccacagccaccagaggagactggtccagtgctaccacaggagatcaacccacaagttgaagagaaaacacaaacaaagccaactgagaaaattctagagttaccagatgaaaccaaaccaagggagacacatgtagaattttccaaggaagacaggccagaaccaataaagtctaagtattctgtaggaaacgatgagctagagcaccgtgagcctaaaagaggaaagttgtcactaagtgacaaatttagaaaagaatattacgcattaggatctctcagagaaagtgaagaatcaattggtacacattatgagtttttgcaaccactccaaaaattgcttaatgtcagtgaagaatgctcatactcagatccctcagagtctcagacagaattaagtgagttcgttcatgaaaaggaagttgtagatttgtcccaagagttgaaggaacgggtctctgaagatgacgaaacccagccagaaaaagggactgagttacaatttgagcatcttaattggg

SEQ ID NO: 1241746 - DNA, 4001 bp, Homo sapiens
cgccggggccccgaggcatcgcgcacgcctgcgcccatgcgcgaaccggcggccgcgaaccacagcgaggcctccagagggcgctgctgcctcgccagagcacccgggcctcgttcccgccgccaggaaggaaacggaacggacgcgttttctgcccgccgagctcgttcccggagcccgggggggtttgtcactgctgggcccgcgccgccctccctcctggctccggcggcccggaccccacgcccgcgctgctggcctcaggccgtttccgcggagttccgggaataccctctccccgccgccgcactgggcagggaggcgggcctgcccctccgctcttggagtacccaaggaggcctcggccctcccaggctttctgatcccggaccgagagccacccaggtcccgatgcatccgtcccacaagcctctccgagcctccccgcccctgcccggcagcccccacgcccctcctccctgcacgggcaggctcggtctcccctcctgtccaccatcctgggcgcgtggccactgcctgccctgctccccatggctccgcattgccttggcgaggtgttgtcccccaccctctgccccggcagagccaccctgctttgctcctctgcgccagggcgatgcctgtggctgccctcgaatctcgggaagcccgtccaccaaggcccgtcgggcttccacaggcccctgcacctctgtcacacacctggcactggtcctcatggccgtgctgtcggagtccccgcacctgggcctgtgcacacctgggtgacaatggaggcccgcacacccgcacccaccccaaagtcactgacaggcttactcccagccagcccctcaccccctccacagccccaggcctggggctccgtttactgccgtgtctagacaaaggcataaaatttaatgtccccgtgacagtcgggcgctcggactgccctggtgacaccgcaggccccaccgatccgggaaagcgttgaactctgcactcccacccctgcccccacccagcacccgccgcccaggatccccacagccacacacaggacacccccacccctcggagctctgacaggtcgcgaggagggtgccttgagggtcctcagcccatgcccctgcctccaagcctccccgcgctctgggtcccaccgggacactcacccggttttcacgtccactggatctacacgtctgacccaggaagccctctctgggcccattccaggcccacctgggcctcccctagctgcagccgcagcctgagaatttcctccctctccgcgcgtggcggggccaaataaatagcgggggagccacggcgccgctcaccctttccggccgtgcctccagcccctccgccccactacgctgtcgctcgatcctcagtcacttggcagatgcgggccgaggggctctgcgctggcgaagggacggactccagcccctagcggagcccctaccccggcaagccagagcccggcccggccacctctccgtagggacctggccccaggcccacctgtcctgggtctcctgggccccggccgaggcccctcctccccccacgccccgcggctcagacctggcacagactctggggcctccaggcccttcactgcccgggccccgcaaggaccctcgccccataaccacccctcggagcccccgggaggaggggcgggagggggctgctgtgctcccgccgcgggccggtgcagagcttgggccgctcccagcaggctgcgtctctgcttgtccccccgaggcttccccacgcagggccgggtccccgtcaccccgccggccccaggcctcacccctgccgcatcggcccccgccccaccccacagtccccacggcccagaggtgcagggtcgcccaggcccgccgccccctccgcggacgcagccgcgcacccagccagtcccgcccgcgcccgcgcctaccccgccgcccgcagatgctgcgccgctcccgggcccgcccgcccagcctctgccgccactgccggggccgcgccggctcctcccgccgcgcccctcccccgcccgcgcggcaccgcccccgacccagaggccccgccccgcgcccctcggcccgcgagccccgccggacctggggacctgggagcgcgggggtgccggtgccccgccccctccgcagcgccggttgccacggcgacagcaccgcgcggcggcgcgcaggactggtggctctggggagcggggcgccctcgcgcacccccaggcgcggagtcccgtctccaccctcctcacccaccgcccagaatcccagggtcccgcccagtgccccccgcgccctgaaactccgctgccgccccctagagcgaccccactcagccggacaggcgcccaccggcccaggagctgacagggatgtaggcgcggggctggcctggccgccggggccctccgcgccaccctctgtcctctttggggagaaacccagccttcccaggtttcttctcagggcagaggaaaggaatgatgagcggcccccaccttcttctccagcccgtccaggaggcaagctagggtttggggacttgggcttcattttgtcactgaggtggcactaagcccctccccccacatcctgtccatcccgtgtgagccagagaagaacccgagggcaccttctgcctgcctgccctccttcccagaactgctgtgacttccctctgacataggaggagactgagggtcagagaggtaaagggacaccagatttggtggaaagaccagaatttgaggcaccacccaactggtagtgaacttccagattctcttcccgtatccccgggcctggactcaacacggcctgaaagccagaagaggacagagagctccagaagttctctagtcctggcacaaggggaggaaagaaaaaggtcgcctaatgctcccagggtgcaggagaatgcccggggggatgttagggtttgggaggatggggttttttggtagtggttgtttttttactcttctccattctctgatgccccagcccctaggtatcccaccaaagccatgaccaaggcatagggtttacaagcacctaaaacgctgaggcagaagagccttcctttccagccccaggagatgtggtcccctgtcgctggagagatggtgggcagggagaagcagtagaaagcaatccatgggctgggcgtggtggctcacacctgtaattccagcactttgggaggccgatgtgggcggattacctgaggtcgggagttcgagaccagcctggccaacatggtgaaacccccatctctactaaaaatataaaaattagccgggcgtggtggcacacacctgtaatcccagctactcgggaggctgaagcaggagaattgcttgagtccgggagatggaggttgcagtgagccgagatcttgccactgcactccagcctgggcaacagagtgagactctgtctcaaaaaaaaaaaaaaaaaaaaagcaaccccaggaagttgtgcaagccatacatgatgtacaagtctaaaccctcattcacatcccaaaggctgagaactgaacaaaaggacagcccactgcccacgtcccacactggccactgggcagtgcatacgaaggacagatctgagtcccactgcaaaggctttgaaaacaaaaccgacatggaaggcaggacccacaggagcctatttgaacttgtggcctgaaaccaactaggttgattgcatgataaaacaaaatgccaacattctcaatgggatttaaataagaccagtctcataacataatgtctaaatgtgcaggagacaatctaaaattactctgcatgtgaagaatcaggaaatccaacctgcaagagaaaagacaatcaacagccgccaatgccaacatgacacaaaaaccctcaactaattatcagcaaatagaatcaagcagcattaaaaacacacacacacaaataccccaaccaaatggag

SEQ ID NO: 1241747 - DNA, 4001 bp, Homo sapiens
atggccccacagtacctgggtcctcccaggctgacagccagctttctactgacccccatccagaaccttagtgtcgtgggttgaatggtgtcccccgaaagatatgcccaagtcccacccctggtacccgtgactgtgactttgtttggaaatagcatctttgcaggtgtaattaagctctggatctcaggatatctccctgagtttagagtgggccctgaatccagtgactggtgtccctgtaaaaagagggaggacagagcagagcaaaggcgccctgtgaggacagcggcagagggtggtgggacaagtgggtttcagtccagttggtgcaactgtgctgcagcagccccagggcgctcctacccacaggcgctgggattctcattcctcctccagagtttgcagccccactcagcatagccctggctccctcccttctccctgaagcccctcttcttcccctctctggcccctctctcagccaaaaccaagcggtgggctcacagcgggggcaacaggagggcttccccactcctgccgcccacacccctctgagcccttctcatctcccacctgcgtgcaggaagtgaaaacctacaacaaaggatgggggtgagggcagagtttgggaggagcctgggtttcatgagtgctctcccggaacctctacaggatctcgggctgctcctgggcacagcaggcctcagccaggggagtgggagggcccacagagggcacccacagagggagtgggtgggttcacagagggagtgggtgggctcacagagggggtgggtgggctcacagagggggtgggtgggttcacagagggggtgggtggattcacagaggtggtagatgggctcacagagggcacccacagagggagagggtgggttcacagagggagtgggtgggctcacagagggagtgggagggttcacagagagcacctgcagagggagtgggtgggcccccagagggcccccagggtgccactggctaagggtgtcaccgcaccccaggtgaaccaggttgtatgggctccagtatctagccggagcaggaaagagaaagaggaaaatgcaggccaggaggaggaaggcgctgagcccacaaggcacagccctcgccctgcagtctctctccagctccccatccaaggcctgagctcgaggtgggcctgggtggctcccctccagacagccatctgccgtccctttcccggggcgatggtgccgggtggggctccccagttcgccttgtcactgggacctggagagctcagtgcaagccctagaccgggctgggagttgtcgccggtcctggcgagtgtggcccggctgagcccgcccaggaaggtccaggcctgctgggtgatgacagtgcaacatctgcaacccaagggagcagatgcccggaagcgggaggtgatgcgcagctggggaggggaggcactggccttgtacgcaggaccggtggtcgtcatggtccctggatgtgtgtgtagacaaagggcggtctgagtggagggggtgagggcggattgttgacatttgcgggcctcggagctgcctgagagacggagggactcgcgcgcctccccggggaggtgggtctgggggcgctgggggcatggaaggggcgccgcgccgggagcggcccccacttacccctcgtgtcccttgcagaggaagaagagcgtgcgccaggcgtgcgcggcggccagcagcagagacaggaggctggcgagcaggctgaagcggcaggcggccggcgggccccactcctgcaccgtgaagcgctcgcgctcctgcaccgtgaggttggcgctcagccacatgccctcggtgaagagcaggcagcggccgcggaagtcgtggccgttctcggacagcgggaccaccaccacgaagctgaacaggaaggccaagaagtagcaggcgcactgagcgaaaaggaaattgttgagcgccatggccggcccgggcgagagcggcggcgggaaggccgcgggaggctgcgccgggcggggaggccgcgggaggctgcgcagtggcggcgccggcaggtcccgcgcgcccctcccgggacgcgtgcgcatcggccgagcgcgggaagcgcctgcggtcagcaccgcggacagctcctggtgcgcgcgggccaggagcccggggtccaggggccagagaagggcggcctgcgggagatgcgggaattttaccaggtcggcctggagggaccgaccctgtgccgctaaagacttcgggagccacctgtacgggcctcacacaggccgactctgggtcgtcagttcctcatcagctcgaacgaaaggagaccaggagagagagggcggggcggggggtgttggaggacacccccaaggtgctcatagtgaggtgtaggagtgcggtttgcagtccaggctgaagtgattcctttgcgggggtcccgaaatgcaatgtatgaggggaggggccagatcgtggaggagtcggggtccaagggactgggacagaggtcatcctcgaagagatggggagggtgaggccaggtgtgggcaggagggggtggaccgggagcttctgcagcgccagccctccgcggggacgtgtgttacactgcctgacatgggcaggaccctggagctgcatttgtaagataaataatgggtgtcccgagcgcctcattaagacatctttgctgagatggaaatcgctgaggcattaattaatagaattaatgccttttctagttgcctttaagactaagtcacctttagtccaattcccagagtgaggaagccttaacattgctcctcctggtttaaaattccatcagcatttttgttgcaagcattaaaaaatatttttgttttattgactaagtaatatatgctcatttcttaagtcaagtaatagagatatgtatacaataaaatagaaagccttctcctcatccccctcccctaccccatcacactaccaggggtgaccacttcaatagcctggcatctatttttctagacattttgctaagcacataagcacacacacagaattaacaaaaatgcttcataccatacatagttttctgaaggctgattcttttattcaacaaaatgtcaaggagattattccctgcctacacatacacctattttgttctttttaataactgcataagactccattataatgatgattccacaatctgcataactattcctcttaaggtggatgttttgtgtctccagtttttgctgtctcaaatgctgtcatgtgaacattcttgtacacatatgtttgcgttcttgcacaggcatttttataagagaaattcttagaagaggaattgctgggtcatggggtatgcacatttaaaatgttgacagaaattgccaaaccggctttaaaaatgttgttcagccgggcgcggtggctcacgcctgtaatctcagcactttgggagggcgaggcgggtggatcacgaggtcaggagatcgagaccatcctggctaacatggtgaaaccccgtctctactaaaaatacaaaaaaatcagccgggtgtggtggcgggtgcctgtagtcccagctactcgggagggcgagacatgagaatcgcttgaacctgggaggcagaggttgcagtgagccgagatcacgccactacactccagcttgggcgacagagcgagacttggtctcaaaaaaaataaaaataaaaataaaaaaattaaaatgttgttcaaatttaccctcacatctgggttgtagacccctcccctcgctggctgagaaacagcagttgtaggcaaatcctgccagtttccacagaatgcgctcattgctgtgtgaacttggacttgctttggcatcatgaggctgagcatatcttcttacgcttgccaccatttgcaacttcttctcttctgtggattgcatttcattttgcagtcactttaaagtcgggccttgaaggccagccacgaggt

SEQ ID NO: 1241748 - DNA, 4001 bp, Homo sapiens
cctgttagaatgggaaggtccatagaagtgggcctagctgtgcttctctggtgcagtacctgcatctgactttagccacaaattgcagggccacaaatctatagctcaggggactcagttttctcctgctactccttattggtcctggaacctccgttgctcctgtacctataagtggccaaaatcaacactaaaaaagcctgttgtccccacccaacgcctgccatgctgtgtccccagttgcctgtatctgtctccaaacacaaagcccctgatgggggctaagtgtcatctcagcacacccctgagcaaagtgtctctagagcaaagtgtcctgacaggcccaccctggcccaacctacttgtatccttgtatcattaggtcattcacacaggcaggcgggagagtcctccaccagtctagggccctccagtgccttctgtctcacagggaagcagatgtatctgtcttccaaacagggaaaaaaatctgagctcccaaagggctatcctgccacaggataggagctggtggtcacatgtaagccagctcagaactgaaggcaccttgttcctggagacataaggccaagcactggggacctggaacctggcccatttgttttctagagagaaagacactgtaccacccccaaggcaggttgcttggccctcccttgatccctcttcctggtacagcagagagaaacccaggcctctcaattacccaaggctgatagccacagcaatagctcacttattactagggtgctgagaacacatgagaattggtgagcagagcccccaaggttacaccagcagaaagctgcctggggtcctgctctttccctccagggagagccttgagcagtgcccgaacactctgccctcctatctccaagctctgtacctaaggcagccaaacacccccagggaaaccctggggaaagaaaagagacagtccccgggaaggaagggaaaggggtccgtttctgactgagcatagaaagagggaaaggaagatacctgggaaagaggccaatgtctccctgcccttgccaggaaccgggctgtaacactccccatcccagccaggcatctctcacggaggaccagagatcagggagggcaggtgaagagctggcagccagggggctgggctgggccccaggacacggacctggggagtggagggcgcctaggtgtggggtccatcacccagtttttccatgcaccctggggagaaggcggcggggtcattttggcagcgttcccttcccttctggaaagtcctcagcctctaattcaggagggtccttggtttccactcccaagccctggctccccagcttccacccagactgtcacccccctccaccctgctgaggtggcctcctgggtgctctccgcccggaagaagaggaggtgtcaacctaccgctgcccctcgcttccccctgacacccctttgtttcaggcagggaaagttgccaacgcgcacccccttccccaacacgcccccctgtgcgcccatcccccgcagggaatccaagccccgggcgcaccacctatctaatctgcggctggatctcgaaccggggcagcagcctcgaaaccgaaagcaaagaggaagcgggatctgctacagccccaagtccggtcgcccagtcttcccctcaccgtccccatcgcccgcgccctccgcggtcggagctgccggcccctcgcggccacctctctgggcggcggaaaggcctctctgcgggcatagggggcacctaccggtgcggggccggggccgtgggtaggggctgggcagagccggccgcctgccaggcgcaggtgcggctaggagcgccgtctccagggctggctcccgctcctcctcccgcgccgggactcggggcgctctcctgcaccgcctgctccccgcccccaagcccggcgctctggctccccccgcgccgagttgcgggccgtgcctcccccacgccgcctggcactcccgcgccgcgcctagtcccgcattgtgtgtcggcgtccgccgcggcggcgcggggtccggggggctgcagccgccgctgcccgggaggaaaggagcccccggcggcggcggcggcggcggcggcggcggcactcacccatagtacggatgcgctgcaaactgcacatgctcgcgtctgacaggcgctcgccctgccgcccggcttaactccttgctcgcccgctcgccggcccggcccgctgtcccctccgacccctctgcctcccgcagcccggggtcggccccgccacgggcgcctaggagcacgccccctgccagggccgcggcgcaggtggctgcggtgcagggctcttcggccctccctgtcctagccaacccgcctgcatttgagtgtctgtcaggcccggagcttgtagttgtggggaccaggcgtgcaacatccactgtgggtaccattgcaggcccgggctacctgagggccacagaccacgtggtgtggcagacccactatgtgccagcactgtggacctgcggtcagttcatggaaacagccatgtaaggtcatttgtttatccccatttccaagatggagaaactgaggcctatggaagttaaggaatttgcctaaggcaaggcttgaacttctaaggctcacgatttgctttataccataaaggttacagagaatatgttatttcagaagtcaatctagattcttttattgggaggtggaaaataatgaatatcatctggaaactctggaaattccacaataccgaacgtaggaaatcggcagctgagggccctgacttgagacaggccccttggactggtcctgggtcctgcagaaaggctgagcagggagtgggaatgacagccagcccccattcgcacgccaagcctaggtcctggcactgggtgcctcagccaagaggaaagggcattttgaaaatttataacaccctctgggggtgtccttttgtcactaacccatccggagagggtaccctttctaattctctcgcaaaccctatgcatgccgaggcctgatctgaggggtctaatggccgcttttcaacctagctggagagggggggaaatgaggagagggacaacaagagaggctgaagcccttacccctttttgtaacataccccagtgacaaacagctctcagaagtccaaggcagcacagaatcttctaagaaaaggaacctatggttcatccagctgctcttgccccattctgggcaagaagctgagctgctttcctcctgtctgaacctaatacctaaccctaatctgatcctgtgtcttcccctaattgtctgatggggccgtaggtcttccatcaacctcctgtccctggccagaatattcaaagatcaacaaaggtgcctctcaaagctgggagtaggaaatatggacaaggaatttctaagcccatccccatgtatatcgtgttcctgggctggtcaagccatttttctcagaaggaaagcagtgggttctgattggggcagagggagtcatgttgggttcctcaaactagtacaggaggtagacagccacgtgctaccagtggcaggaactctagacttccccctgagtttgtttccttttctgtaatttggagatttgcctcatcataaatatagtataatgacccaaggacatcatgcatataatattctcagcacacagtaggctttggataacaggaaaacttgtttttttgctggagataggtcagggaaaagggagagagtcagggctacaggcaggcatgtgggctgtcctagtacactgtcagagacgcaggagacagtgtctcagggacacgctggcaagaagcagctagtctagcagcaaggcctacctgatgaaaagggccatcccctgtgcccccttgccacgaaggcatagtacgcctaatctccttctctagctgtggccggcggctggcagctggctctcccccaggctctgggaggcagc

SEQ ID NO: 1241749 - DNA, 4001 bp, Homo sapiens
ggaaatgttcatattcatttttttccccaaaggaaaaatttctgaatcatcactatgttgcacagtagaatagaaatatgaattcaggtacttagtcaagtttctaaagaatgcaaataacagacatgatttaacttccaaaatctgaagtcatcaacatgattttgtagtactctatctcaggttttacctaaaaattcgttattattcagataaagatagctccctaatcacatgtttttaaaaagcctctgccccacgacaacttcctgagatctgtgaagaaactgcagtcttgtgatcagactccatataggactggcagttttgtaatcgtagggaaaaaacggtgactgattttacgtgtcaatcagttgtagtctgctgatctgattagaagccttgacaaatgcctggtggcgattgcaaataactgccaagcatatagggatgatacagtagcccactgttttgggatcagctcttgtacaagagtataggaacaaaaacatctgtaagtaaggtaccagaaaaataactgtccacacccaaaaaggcaaggagagtaattgagctttcaaggagtgtgtccatgtggttccttcaaggggctcctcagggtgctgttgaatgtgttccaaggccagcctgttgtaagtctcactgatttcaaaaacatagtaaaatgctgctgcactggctaacagatacaatcccactccaatccatcccatccgctgacggaagttcatcattctccatgctctgtgccttcaaattaaaaaagaaaatacaattagggtctagtaatgctgtcacggcaactactccaaatgtacttgctttatctccaagaattctaggccgggcgcggtggctcgcgcctgtaatcccagcactttgggaggctgaggcgggtggatcacgaggtcaggtgatagagaccatcctggctaacatggtgaaatcccgtctctactaaaaatacaaaaaaaatagccgggcgtggtggcgggcacctgtagtcccagctactcgggaggctgaggcaggagaatggcgtgaacccaggaggcagagcttgcagagagccgagatcacgccactgcactccagcctgggcgacagagcgagactctgtctaattaaaaaaaaaaaaaaagaattctaaaatatcccactaacacacttaagatttaaaataattaaattaaacacctattaagaaatgtaaaacttacaggttgttttgtgtaatacttacaatcaagtaaaacaacacacacaaaaaaacaaaaaaccattgatttcagtatatactgagttctgctttttaacgggaatccctcagaataaatcactgcatcctacttaaacaggtccataatacccgccctccagaaactggaattaaactagtttctcacagcacatttcactttgacaggtgaaacactttctggcataacagtactgcttcagacgtgaacgcggggtgctacaagtcaagcccccaagttaagacagtaactcctaagcacttacaatggtcccgaaaatcttcctgttcccacggcaagcgttaaagagtcactcagctctgaataatcgggtggctttggcatttcagagaaagccaacataaaataaatcccctgggtcacccggctaggagaaaggtgagcgccgccagcctggagcaccagctactagtgattaagaacggcgtgactgcggcgggtcacgcgcggcccggcccccgtcgccgccgccggagacccgctctgagaacctgacccggcagggaggcgtccccgccacttgggcctccgggcggccggccccgccccctgccgcgctgcagcgccggcacgccgcgaccaaggctgcgcaggcggcgccaggcccgggcctcgccgccttgcagcgccgcgagcccagcgcccgtcagcggtcgccggcggagcctgcttgcaaagctgaggtcccggatctcaccttcctgtcccgtggtggccagcccgcccgccgtcccggatgccgccgcagtcggagcttccggctcgggccggaagcgcgcgcgccccgcccccgaggcccgcccctcatgacgtcagatcgcccccgcccgccgcgcagcttccccgagcgagaccaaaacaggtggaatccgggctggagccggagctccggcggcgcgggtggcggcacgtccctccaggtgggtggctctctgggtctggcgactcagcgctcctcagccttgccccctggtgcccgctcgcgactgtcatcgccccatcacttctcgttgcagacagtaccacaggcacctggagtaccggcatcggtcgctgtggcccccgagtgtccgtcagagcctaggggagcctgccctcccgcgcctcgtcggggcccggccaggcaccttggccgccggcgcacggacgcgggcacgagcactagatcacggtgagtggaagcgggcccgacgcggccctgcaggcccgacatccgccaggcaccagggctgggaggggtgaggggcgcgcgccgcagtgcggctgccctggcgtcgccgctgggggcagggcgcgcggggcttggggcctgcacgcttgccctggacgttggcacctttagctaacctgtctgctctgtcttgcaggctgctggacctcggcacgttgacaagatttctctggggtaccgcggaggattactttgaatttcggtggtcgcctgtggtctggcatatttagaacttaagtctattatttcgggcaccatgactttgaggcttttagaagactggtgcagggggatggacatgaaccctcggaaagcgctattgattgccggcatctcccagagctgcagtgtggcagaaatcgaggaggctctgcaggctggtttagctcccttgggggagtacagactgcttggaaggatgttcaggagggatgagaacaggaaagtagccttagtagggcttactgcggagactagtcacgccctggtccctaaggagataccgggaaaagggggtatctggagagtgatctttaagccccctgacccagataatacatttttaagcagattaaatgaatttttagcgggagagggcatgacagtgggtgagttgagcagagctcttggacatgaaaatggctccttagacccagagcagggcatgatcccggaaatgtgggcccctatgttggcacaggcattagaggctcttcagcctgccctgcaatgcttgaagtataaaaagctgagagtgttctcgggcagggagtctccagaaccaggagaagaagaatttggacgctggatgtttcatactactcagatgataaaggcgtggcaggtgccagatgtagagaagagaaggcgattgctagagagccttcgaggcccagcacttgatgttattcgtgtcctcaagataaacaatcctttaattactgtcgatgaatgtctgcaggctcttgaggaggtatttggggttacagataatcctagggagttgcaggtcaaatatctaaccacttaccagaaggatgaggaaaagttgtcggcttatgtactaaggctggagcctttgttacagaagctggtacagagaggagcaattgagagagatgctgtgaatcaggcccgcctagaccaagtcattgctggggcagtccacaaaacaattcgcagagagcttaatctgccagaggatggcccagcccctggtttcttgcagttattggtactaataaaggattatgaggcagctgaggaggaggaggcccttctccaggcaatattggaaggtaatttcacctgagtctcagggaaccacgaagggatatggcaatgagtagagcatgaaggtagaacagtctatatactcttgtgacacatacaatccctaccttgtgctgccaagtaactcatttttgtgcaattctcagtataagccctttgtcgtttctgtgcctatt

SEQ ID NO: 1241750 - DNA, 4001 bp, Homo sapiens
gaattcaggtacttagtcaagtttctaaagaatgcaaataacagacatgatttaacttccaaaatctgaagtcatcaacatgattttgtagtactctatctcaggttttacctaaaaattcgttattattcagataaagatagctccctaatcacatgtttttaaaaagcctctgccccacgacaacttcctgagatctgtgaagaaactgcagtcttgtgatcagactccatataggactggcagttttgtaatcgtagggaaaaaacggtgactgattttacgtgtcaatcagttgtagtctgctgatctgattagaagccttgacaaatgcctggtggcgattgcaaataactgccaagcatatagggatgatacagtagcccactgttttgggatcagctcttgtacaagagtataggaacaaaaacatctgtaagtaaggtaccagaaaaataactgtccacacccaaaaaggcaaggagagtaattgagctttcaaggagtgtgtccatgtggttccttcaaggggctcctcagggtgctgttgaatgtgttccaaggccagcctgttgtaagtctcactgatttcaaaaacatagtaaaatgctgctgcactggctaacagatacaatcccactccaatccatcccatccgctgacggaagttcatcattctccatgctctgtgccttcaaattaaaaaagaaaatacaattagggtctagtaatgctgtcacggcaactactccaaatgtacttgctttatctccaagaattctaggccgggcgcggtggctcgcgcctgtaatcccagcactttgggaggctgaggcgggtggatcacgaggtcaggtgatagagaccatcctggctaacatggtgaaatcccgtctctactaaaaatacaaaaaaaatagccgggcgtggtggcgggcacctgtagtcccagctactcgggaggctgaggcaggagaatggcgtgaacccaggaggcagagcttgcagagagccgagatcacgccactgcactccagcctgggcgacagagcgagactctgtctaattaaaaaaaaaaaaaaagaattctaaaatatcccactaacacacttaagatttaaaataattaaattaaacacctattaagaaatgtaaaacttacaggttgttttgtgtaatacttacaatcaagtaaaacaacacacacaaaaaaacaaaaaaccattgatttcagtatatactgagttctgctttttaacgggaatccctcagaataaatcactgcatcctacttaaacaggtccataatacccgccctccagaaactggaattaaactagtttctcacagcacatttcactttgacaggtgaaacactttctggcataacagtactgcttcagacgtgaacgcggggtgctacaagtcaagcccccaagttaagacagtaactcctaagcacttacaatggtcccgaaaatcttcctgttcccacggcaagcgttaaagagtcactcagctctgaataatcgggtggctttggcatttcagagaaagccaacataaaataaatcccctgggtcacccggctaggagaaaggtgagcgccgccagcctggagcaccagctactagtgattaagaacggcgtgactgcggcgggtcacgcgcggcccggcccccgtcgccgccgccggagacccgctctgagaacctgacccggcagggaggcgtccccgccacttgggcctccgggcggccggccccgccccctgccgcgctgcagcgccggcacgccgcgaccaaggctgcgcaggcggcgccaggcccgggcctcgccgccttgcagcgccgcgagcccagcgcccgtcagcggtcgccggcggagcctgcttgcaaagctgaggtcccggatctcaccttcctgtcccgtggtggccagcccgcccgccgtcccggatgccgccgcagtcggagcttccggctcgggccggaagcgcgcgcgccccgcccccgaggcccgcccctcatgacgtcagatcgcccccgcccgccgcgcagcttccccgagcgagaccaaaacaggtggaatccgggctggagccggagctccggcggcgcgggtggcggcacgtccctccaggtgggtggctctctgggtctggcgactcagcgctcctcagccttgccccctggtgcccgctcgcgactgtcatcgccccatcacttctcgttgcagacagtaccacaggcacctggagtaccggcatcggtcgctgtggcccccgagtgtccgtcagagcctaggggagcctgccctcccgcgcctcgtcggggcccggccaggcaccttggccgccggcgcacggacgcgggcacgagcactagatcacggtgagtggaagcgggcccgacgcggccctgcaggcccgacatccgccaggcaccagggctgggaggggtgaggggcgcgcgccgcagtgcggctgccctggcgtcgccgctgggggcagggcgcgcggggcttggggcctgcacgcttgccctggacgttggcacctttagctaacctgtctgctctgtcttgcaggctgctggacctcggcacgttgacaagatttctctggggtaccgcggaggattactttgaatttcggtggtcgcctgtggtctggcatatttagaacttaagtctattatttcgggcaccatgactttgaggcttttagaagactggtgcagggggatggacatgaaccctcggaaagcgctattgattgccggcatctcccagagctgcagtgtggcagaaatcgaggaggctctgcaggctggtttagctcccttgggggagtacagactgcttggaaggatgttcaggagggatgagaacaggaaagtagccttagtagggcttactgcggagactagtcacgccctggtccctaaggagataccgggaaaagggggtatctggagagtgatctttaagccccctgacccagataatacatttttaagcagattaaatgaatttttagcgggagagggcatgacagtgggtgagttgagcagagctcttggacatgaaaatggctccttagacccagagcagggcatgatcccggaaatgtgggcccctatgttggcacaggcattagaggctcttcagcctgccctgcaatgcttgaagtataaaaagctgagagtgttctcgggcagggagtctccagaaccaggagaagaagaatttggacgctggatgtttcatactactcagatgataaaggcgtggcaggtgccagatgtagagaagagaaggcgattgctagagagccttcgaggcccagcacttgatgttattcgtgtcctcaagataaacaatcctttaattactgtcgatgaatgtctgcaggctcttgaggaggtatttggggttacagataatcctagggagttgcaggtcaaatatctaaccacttaccagaaggatgaggaaaagttgtcggcttatgtactaaggctggagcctttgttacagaagctggtacagagaggagcaattgagagagatgctgtgaatcaggcccgcctagaccaagtcattgctggggcagtccacaaaacaattcgcagagagcttaatctgccagaggatggcccagcccctggtttcttgcagttattggtactaataaaggattatgaggcagctgaggaggaggaggcccttctccaggcaatattggaaggtaatttcacctgagtctcagggaaccacgaagggatatggcaatgagtagagcatgaaggtagaacagtctatatactcttgtgacacatacaatccctaccttgtgctgccaagtaactcatttttgtgcaattctcagtataagccctttgtcgtttctgtgcctatttaaagtctcctaaaggtgtaattgactaggaaggatgtagttctacactgccatttacctatttaaattcatccttgtg

SEQ ID NO: 1241751 - DNA, 4001 bp, Homo sapiens
cctcatttctgcccatcctgggttccttttctggtttcacttacctcatccccatggacactatcactctggacctcaattccccctcatttccatatgatcttactcctttctttggcttcctcctcaaattatgtgcccttccctagagatcctactttctgtctggattggtcccctgtcattactacttgcagctttgcccccagaccaggtaaggttgaattccaggggctttcttgcctctcactttctggacagtctcccttccttctttcttgaaggttttactctgaactgaacactgactcaatggatgggggggaccctgtttatggtggggattgtttttgattcaatgataacctgcaactggacattatctatctatctatctatctatctcatggtcctcaaatagtgagtcttgggaaggatgctattgcaacaattaatatttttgagagagaaggtgcctcatagccagacagacctgagctggaatcttagctctgctgcttctccatctgtgtgatcttggatacattattattattattattattatattattgagacaggggctcactgtcacccaggctggagtgcagtggcatgatcatggctcactgtagccaacaccttctgggcacaaataatcatcctgcctcagtctcccaagtagctgggatcacaggcacatgccaccatgcctggctaatttttaaattttttgtagagacagggtcgtctcacaatgttgcctaagctggtctcaaactcctgggctcaagccatcctccctgcttggcctcccaaactgctgggattacaggtgtgggccactgtgtctgtcctgatagatatgtttttctacctattcgcacctcagtttattcactgataaaagggggctaacaatatgactgtgaagagttgttgattcagggtgggtgtttaataactattagtggtgctgatgaggtcacaccgataagtctgatgcccatacactaaaagtgttattcagaaggaagctggggacacatttctacagtcggaagcagaaccagctgggcccaaatatactctatagatcaaaacaaatcccagatctacctaggtgcccttggcaagttgcttaatctctctgttcccttatctataaaaggaagttaataataccagtctcaaggggttgctttcagcatggaagagagcttagcccagtacctggtacacaagtgctcaatgttagtggctatgatcatcatcactattattatttcttgttgttgacgataagaggagactgcgccagaagactctagaagttagtacgaggagggaggcagggtcctgggaggcaagtgatcttttgtaagccactcctgccccatcagtgctgtgccaacatcggcgggtcattgtatctactcttttctttcccggggagtgggagtcacgttttaaagagatccagaaaactgctgtgtgtctactcctcctcaattcccacgtgcattgattttatttggtggcgatgtgagatgttgggcttgcactgaggatccccgagcctgcaggccactggggaaacagacttcctgaagcctcatttttcttacttgtaaatgggggctaatttaattatagagggttattggaaagattatatactattagataggtgaacaggcattcagtaaatattgactaaatctgagtatactacttaccagtttgtagtctagactacaatcgcctggaaggaaggtaccacttctttctcatccctcacagcgctgagcccagtgcctggcacttagtaagcactcagtaaatatttgttgtattgaagagccattaaagtgacttgaggaatggaaaatagaattcgagaggaaggcgcaggaattgtttatcaagaacggaaaggaccgaagagtaactttaataatgtttcttatacggccgacattaactatctctataatcgcccctcctcctcccccaaaagagagacagaaattgtaagggagaggctttgagataaaaccccaggaagaacttcccgagtctgtgcatgttggggcagaaagagcggcagagccaactccttccctggtatgtccgggtttagggagggaggggcagtgctgcttggaggctgggggaaggacgagatgacctttcaaaatctcttccagtctcctgttggaatcctctgtgcgccccacccccgctccctcccttcctccctccctccgacagcgccccccgtctccaaaccgcccgcaccccgcccctggcggccgcctctcgcggctcccggggtccccagctccctgtccccggagccagagcccggctcccgcgcggctcccagccccgccgcgccgccccccgcatgctaatggccgggccgcctcccgccgcacacaatgcgggccagggccgggggcgggggaccggggagggggcgggggccgggccgggggcgggggggccggggcccggcgcatctcccccggccccacgtaacgctgacgcccgcgccgccggcccgccgcccgccgccgccgccgccgccgccgcccgctccgccgccgcccgcccggggctcgtgagtagccgctcccccgactcccgggcccccccgtccgccacccggcccccgcccccggccccctcccccctcccggagggggggcccgctcagcgcgcccggctcggagcaggtgcagggggcgggggcgggggaggggcgccggctcggccccaagcaaacttcgcccagagctcctgggggggcggggtgggggtggcggcctcggaagcctggagagctggggggccccaagggagggggggccaggtggaagagctgggggagcagacaccaaagggaagggccaacgggggggatgtggcgggggaggtggcgggtgtctttgtaggggcccgaaggcagggcgcgagggacctgggggtgaggggcggcagagccgcgagcctgagtggatgtgcaccccccaacccccggcccaggtagggctggtgggggagggggaaggagcccaaactctctggaagcacggggtggcgggggaggggaaaggatggggggtgcttccctctttgcgtcccaaacaaagtgtcacaaagagctcggcccgcggcagcagcggaggcggctgtaactcagcttttgttctcctggccgggggtagctgagccttggcctccctatctcccaaccctgccccccatcatccttctggcttatcttcctggggaggggtctggggtgctgctggaaaaacctctccggcaggatagcaggtcctaccctacttagcaatctatttctgggagggggattttcccagaggctcccttgatcgcccctacctcccagtctgaggaccgaggctcacgtgggtgctaagactgacttttctagggtcagctccacttaaagggacttagggctggctacatgcccctctttcccaaacccaggtcttccagaactttcaaaatcaaaatcggggttgcgttaggacatgcctctgggataagattccccatggtgggatggcagcaggtgagcaggtgtgccttcctctcgcctcctgctgtacctttgaagtccatggctgaggttccatgtccctaactcaggagagtgaggacagagggaaggaggctttaccaagatctcagtctaaaaaggctggtgagctgcagagtggagcgggttaggaggagctatctgagcagtgaggttcagagggccatggagaggagaccataaaagtgaactactggtgtgtctgtgtgatcaaggtagtcttttgaacgtagaccgccctagaagctccctttccttttaaccccatctagtgcagtggtaatcataattgttagcagatttgggaggtctaggattctcaagagggaaaaccatcgtgttagaggtgaccagaggcagttac

SEQ ID NO: 1241752 - DNA, 4001 bp, Homo sapiens
atacttttcttttcctgatttctctactttgtgtgactttgggcatagcttagccttagttttcccatttataaaaggaaaataataattgcacctacttttaagggtagctgggagggttaaaacaacaacccatataaagcacttggaacagtgcctggcacatagtaagtgcccaacaaacgtcagttattataaatctcactcccatccttcacactcaaccaaccataagtagctgtcaatctttttatttttttacaagtaacagaactacctaacctctgaataatgctctccagcaccaaaactcacaactataaagttacttccattatgaaataccaatcttggtaacactgtacagaaactccctactacacgaatgaaacactatccctacttgtgcaacaggacctgaaagaagaaaggtaacaatttgaagatgtaacatcaaagatcttcaacgtggtaggcagccctaaatatgatccccactaatccccaagtcctgatattctcacctgtgtaatccttcccccttgaatatgggttgggtttactgacgaagttccaggaataaaatgcagaagtggtatatcacttacagtattaggttacaaaatgacagagctgtcagacagagaggtgtccttcatctttttcttgacagaagtcagttaacttatggagacccacatagcaaagaactagattgcgtttctccccaaattgagccttgagaagaccgcagccccatcgcacaccatgacagcaacctttttctgagtacgagcatctagcttaaacggcacccagactcctgatttacaaaaacgggagacgataaacgtttgctgtttaagctgctcaatttggggatcactagtcatgcagcaaaaactgcttcttcagtccataggttcaccacctgaaattacagcactattctgacaaaattactggccatgatatggcattattgaatccaaaaacaaaacatggatcttgtttcttgcatcaaatacaaaacaattagtgtgatttaagggccaatgagtcatgcttttctttttcatagaaacagccgcacctggcttccacctttttaagagttctcctgcaaatattctgcatggctagttccttctcaatattcaggtttcaactaaaacaccacctcttcagaggtctttcctgaatagtcattcggaaggacccactacttacccccactctcaatcatatttccctcctactgtctccataacttatcaccagtgaatatgctgtttattcattaacttgtgtattgtctaaccgcactggaacactagcaattatctgttcgccactactgttcttttgtttgaaacataataaggacaccgtgaataatatctgtggactaaaaaagactgaaagtaaatactcaggaccaggataaaagatctggggaagtggagaggtcgataagccccaccaggcgaaaccaacaatacgccccatctcgaaaacctgagaactaaagaaaccacaacgacaggaatggaaacagaagtgggctctggaacacacaatagtgcgctgtgcacaggggggtggatggaggcccagagctgaccagaccgaatgccaagagcaggggccagacgcagaccctgcccgttctgggaccaggggagagggacagaaggggcaaccctgcgagtactttaccggagtctccccccggtaccgaagggggcagggtgaaggtgaacactgcggccacggcggcgaacaccgccacgccgccgcggatgcccccggagcgccgcagccccactcggactgcccgcccctgggcctggcccctgccgtcgccatggggactcatgggccagtggcgaccgagggagaaggacacggccagcccaagaacccggtgcgacacggagctccccagccgagagacgagcgcagcttgtgcggcggccacggcggcttccgggtcgagcctccgcgggttggaccgcacctttctccgcctgagcgcggggaggagaaaatgccaggcctcccttgagccaggccctgcgagttttcccgcagtgcaccacgcattggcgttcacctacttataatgtgatttaaggttcctaatcaccaggagagcattccctttaaaaagcaagcccggccacaggcctaccttctccatggctattccccccttttatactgacttggttgggtctgacagagaccaaagcagcgtcgaaaaccgcgagcgaggaagggctgctcctgccccctacggtgcggggtggaactgcacaaaagggccacgatcagccaggagcccctacctgtgctaaaaaaaaaaaaagggtggtgtatttaccgtatgtgcaaagtaagccaataaatacattaatcacaattatgtatttattacgatttactacgttactatgactaattacaataagtctgtgtgctacttattaaatcactgagtaatttttagagagattagaatatgctagtgcgtctttttttttttttttcattccatagcataatgaaaactctgtagatgagtcgggaaatttgagttcctgtattcatgcagataactcaaaccatgataaaggtgtctcctagtttaatgaagaggagtgttttgctggagctttcaacacagcaaagtggaaaatgaaattgaatcaccatattttacaatgagctgtaacgcaaaaaaaaagaatcggagccgttaataaggacaactacataacagcgcagttaagctttttaagcttatgttttattattaaagcaattatcctggagtgggcggggaggagagcaacccgcataaaatgtatctcaaagacacactgaaaaccagtgacaatctcaaacgtgttacgcgcaatttgatagagacacagtgactaaactatagagtaacatatacctaccttgacggtcatggggccagcacaccttagtcttttccaggtacttatacaatttccagccttttccaggtaatttctcagctgtactgtgagttcctggaggagaggggctgtgtggtagagtgcttctaaaatggattcccagataaccctgcctcctcactcacttcctgtataagctgctcgccttatgtgtgagcttaacctaaggattggcttctatcaatacaataaggcaaaagtgatggatgtcactttcaagattaggttatgaaagactaactttcatcttgctggcactccctcttgtcctctcacttgttctctctgatgaagccacctaccatggtgtaggctgccctgtggaaaggtccacatgggaagaaactgagagccgcctctagccaacagctggcaagaaactgagaccttcagtccaacaaccttagaggaactgaatctaggcaacaccatgtgagggagctaggaagtggatccttcccccacataagccttgagataactataactcctgtcaagacttggattgcagcctgtggatgaccctgaagcagaggacctaactaagcctcatccagactgctgtcctatagaaaccgcgagataataaatgttgttttaagttgataaatgcaggctaatttgttagttatcagcaatagatagttaagataggctgtcttctatttctttgctgaaagaacatgccaatgagtaaccttgactgggtcaagcatatacttctttccctttttatgcatttcacttttgctcatgagttttatttaaaatttttttattttggaggggaataattctttgtccatgtttgggaggtagagatcagtgctggaagtacaaatttaggagttgctcgtgtaaggatgatataaatgactaacttgataaggggatagtgtagagagaacaaggttgaggtctaatgtcagcccatattctcatttagggaatggctggagaaggggagagaacagtgtaagagaatgaggc

SEQ ID NO: 1241753 - DNA, 4001 bp, Homo sapiens
ctcagacttgaagaacctcacatggcaactcagtgtcgtgaaggaggtgggaagagtttgcaaggatgtttcactctgcagtcaacatccctccccgcggcaagacagtctagcagccccccaagagcaaggggggtaattcccttatctggtcccctcattcacaaagggaggaaaagctaggcgaggttggaattgggtgacgggcgaggaggagatgccaaaagcaccttgcaagagttttggcaagaagcaggagggatccctggaaagccggaatcactcctcgtcgtcgtcgtcctggtcctggtagcgaatgtagacgaccagcatgacaaagccggtgaggatgcagagggagccgacgaccaggtaggcgatgcccaggaaggggttcttgccacccatccacgagatgctgctgaagatgaggagcttgtggccgccgaacgcgcgcaccgggtagttgtaggtgatgttgacgcggtaggcgccccgcggcagcccggccgagtagttgccctggcggatgcgcgcgtacagtttgcggaacgtgggcagcgccgccgtgcgcatccacaccacgaagtcctgattgatgaagccggtgttgttggggtcggggctgagctcgtagactggccggcgccagttgggcgggggcgccgtgccctggaaggccaacgccaggctgccgttgaccagcggcgggttgcggaacttgacgtggtagtcggtccaccaggcgatgccggagcggtcgagcggcacctcgacgtagggcccgccgggctggcgctggtgccaaagcgagaaggagtcgttgaagaggctgttggcgatggcgccgcagggcgcgatgggcaggccggccgcgctgcgctggtagggggcgcactcgttgacagggtggcgcagcgcgctggggagtccgctcagctgcgcgtcgtcgcgggacacgccgtagcgccggttgttctggtagaagttggtcagctcgtagtagaggtacactgggccctggaagagctcgggcagcgagaagtaccaggcgcacgagcaggggggcggcagcgcccggccctggccagccgcggcgcacaccgagcagttaccggtgcccgggtcgcctgtatagtcgtactccagctccttgatgccgttggaggagtagtagaggcccaggcccaggccgatgaaggccaggcccgcgcagaagaagagcggcagcgcgatgctggccgacagcagcggctgccaggcggggaggcgctgctgagtgaaggcggtgttgtcgggctggtgggcgccccgggccgtggcgctccaggtcatggcggccgcgcggggaccgacgcgcgggctgaccgagtgggggccccgccgcggggcgcctccctctccgcgccgcgcaagcccggggactgctcgcgggtcgggtttcccgccagctcaggtgggtttttgcccgggcccctcctctgcctccgtcacaggtgagtttagttccaggccctacgagcagtgcccacaccctcccagttccgcctccgcccaggtgcgctgcacccccgcgggtcaccgggagccgcacctcgcccgccccttccgaggtgagcaggtgggtgttttttacctcacctggtagactcagtctcgcgtttcctctcagtccaggtcatcggactccacctcctctcctaggtgagtggcggccccgggctgcctctgagtggctcctacctggctcaggtaccaccttctcttccgccttccaagtgactagagttcctgggccagtctcccgaaatcaaaaggcgctccggcctccagcagaaatttttgctgagggcttgcaccgtggtcctggaggcttgaagatttcagatccttaatcctctgttatttgcggggaaaaggtggctctagaccattttgtcttttaggttagcttcacaaaccgctttcgcccagctttcagtctcaagttgggagtgtccagggaattacgttatgataaatctgtttcgaattcaacgcctgcgttcaaattttagctttttttttttttttttttttttttttttttaagggaaaatgattttctggccagatcacccagtctggctgtataactaggaaatgtggaaagttctctaaaaataaaatcatccttaaaaagaatcaaaggctggagaggttcagagcctttaaataactcttagctggtgtggagaaaccaagaaaggaaaaaatgtgctggactacatgtgatttcgttttcttttcagattatttgcctgactagagaaaggcccaatccaaggtcccaggagacctagctgctatccacaaaaacatctggagtgtctggcctaaggaagtaaactacaaggatttataggatttattataaaaagaactcaaattagctccctatgttgcctgggattctggcttttttttttttttttttaaatctaggttggtaaaacatatacaagggggtattgggacgttctgatttcttactaaatctaaatcttccctaggtattgtgttcttgcttctcctccagcttgtaaaatgcaagtaatacaaatgttttctctattacactacacctagcataatatattatattcaggagtcattcaaaacccattgaacttggaaagttaaaatccttattaaatttaacagaggaatgttgttagcatcttccaagtgttcagtcctatgctaattagacaaaaaaggacctttgacctcaaggcatttgcagtttgataggggacatattaggagtaagaaacaatcaaaatagccaataatagctatgaatcatagggtgtaatcaagtatcaaattgcattctacaagtcacattaaaattaaaaagtaatattgatttaataatggaacattgattccagtttgttaaatgaatgcaagttggaaaccaggtattatagaagactgagggaaattcaagtgacttgaatttcaattccctcacttcttatcatacccaaagagaggaagttccaaaattctcagcaagttcccacagtgtgatccagtctccagtcaccctttttttcaataaaagaataaatagttctttgtatcattatggttgagttccacccacccgtttcattgaatcactagtccacaaaactcgtctctaggaaggaattcagttttcacaacttttgtagatttttttttttttgagagagaggtgtctccctcagttgtccaggcttgtctcaaactcttgagcccaagagatccttctgcctcagcctcccaaattgttgggattataggtgtgagccatcacaccaagcctatctggtaaatcttaagtcttttttctagtagatcaccaccacacccctaaaagggcaagccccattcttgagctcagagcctttcctccttttctcctattcctggatggcctaaaggtactagtttattcattccactaattaaggtgacagattttcaaagtcaaaagagaatatttcaagacaaggaatggtcagcagagttaaacacagctgagggttcaagtgagataaatgaaaaggaattatggggtttgacttttgtgggaacactttgggtggtttgtgtggcaggaatgaggttaccatcaggtgcagggaaagggaagcagatagcaagataggaagacactctttttttatttttatttttattttttggagatgaggtcttgctgggcatggtggctcatgcctataattcaagcacttcgggaggccaaggcaggaggatcacttgagcccagcagtttgagactagcctgggcaatataacgagatcttgtttctacaaaaaataaaaacaaattatctgggtgtggtggcatgtgcctgaggtcccagctactcaagaggctgaggtgggaggatagctttaaccagggagttatgattgcgccactgtactccagcctggacaac

SEQ ID NO: 1241754 - DNA, 4001 bp, Homo sapiens
ataccccttcctcaccagaaaagtattcttgcaatgtccacagataaccctgacacccatgggttggggttctggactcagaggtccgggatgcacaggccccaggttgatgattcttttgctatacaaaagaaaaagacttgtattttcaaacttgtgtttgaaaaatttttaatcctaaaaatcttcacagtccctgttccacatcccccactccctgtctattaagtcactcgacttctctgtacttaagatactctgtcccccaactgtataccctcaagaatccttgagaaagaaagagcactgtttaaacttcaggtccccaattcccctccgacctcaggataacacacccagtccccaaggctctctattctccgaaacgacatcatttcatctcaatatttttattgagaaacgagaaagacagctataacattcctgaggcacatgcttcaaagccttttctcctaaataaacactaggctctctcacctttacattctctgtatacgctcatccttttttgactttccagttccccacttaggcccttccccaccttatgcctcttaccagtagggccgagggcatgcaatccgttgggatgtcactttgcagataaggagacagttacaggggcatcgaacatattttttccctgggggtgcattcttgattggctagagaataatagggtcatcagcaagcaaacctctaatcccaatcccctccacttccctccaaaaacactttatgagatcagaaaaataaggtgctaaccaggaaggagaaataaaagaaagactatatcatgagatttgcaaataggaactaggctaggtgtaaaagtgagagaaagtgaacattagctttggtgagtggcttctggggaaatggctgtgtgagacacctggaactgaaacctgggtatcatcaaaagcacttggctaatagccggaaggtcagggtctagaaccaagacatcagaaagaggatccaggaaacagggcccatttcatagatatgtgtaactcacggtggcttcattgcagacaccacatttgactacatgctgatgcatcttgccttccacgttgatgagagattggcagactcggcaggtgatcataggggcactcccactgtccgggctagttaagggtgaataggggggtgggtcctccccaggcaacacggctggatgcccctcgggaaacgggggaaatgctggagaggaagcaaatagaagggctgggatcacttacacccccactgatgctccacggtggtagggaagtccttctgatcttcaaccctctgaccaagctcggagggcttctcataattggcacttctatcaggttgctcagaacccccttccgtccctaggctgtggtcgcgattacggagggaaggaagcctcgcccagtcacaggtgcagcagtcccgcacctggcgactgggacccgcctccgccctcggtcccgccccctccccggctttcagagtaccccggggagcacctcggacccgccccggcttaccctggggcggggcatgtttaccggctccgtacggtggtgcggagggggtcaggcctcccccgggcccagccccactcccgccgggccccactaaaccgttgccgcccgcgccaccgtcgatgggctcagacagcagcggggaacgctctccatctgccgccatggccgccaccgccgcctcccgctcaggtcggcgatccggctcccttcgcctctgccgtcgccgcagccaccgccaccgccgccaccgccaccgccgctaccgggtccccagggcgcctgcgcgccgcgcgcccagctcactccgcaaccagtggcctgccccgccccgttccgtctagcagcacgtgataggctatccccgcccgggtcatgctattattcgcgtagataaaccaattcctggtcctgtgaaggcagctctccttttccattggggagcgacgcacaaacgtcaactgtcacatgacctgccagatgctgctgggcttgcaaaacctgcacgtgactagaggttctgcaagctattgggagcgacgcccatcgcgctacctccagaccaggaggtagggctaggctgcgtctgctcaactggtcacgtgtttctggaagctgcacggtccctgttgctctgctcctcattggttcaaagacaccactaaaacacttttctccggctttgcgttgtagctggtttcctattggctggtgactttacttctttcgtcctgtgatcctagcggcgcaactgcattggcccgaacttagcgccagaacatggggggcgtggcttatgcattttaaaggaggctgggcgggtgcaataaaggagtgcggaagcttgggatcttctgagcggggagaaaatggacggtggggaacagtagacaaagttagctgttctactcaaagaagtacctttaaaaagtcagagtaatgaggtaccagaaggaaatggattaaaaagttaagattatcactccagcctttgtcgctagagtcactttcaggacaggacacaagactgggttttcctggaagctgtccttacagagccccgtctttccccattgctgatcaaattgttaaattatcttttcattagtgtctccactactagaagatttcatcgttttactaaaaaaaaaaaaaaaaaaattcaatagagatggggtcttgcctatgctggactcaaactcctgagtttgatctcctgcctaagccttcccagtagctgggactacagggacaagccaccgtgcctttactcagttttatgaccaccaacctttaacatacgcacaagtttgtagattggattaatcaaatacaaggttattttcgtcaccttatttgacagatgggacagtctttaggcctgtctcaactttgcttccagcaaaggggcagtgcctcctcccctacctgaagtctcgtgtggtctttatgggcgcctgaaccacacctggattttttcccaagtcatagcccaaactgggactgctttaaatatgggaagcaacaaggaattgataaaaacaataaaccccgaggaggtccattatcagtttggctagcagactctccactaagaaaggaagtgcatcaaagaaagtacagccagccccaaatatgtaataacaaaggaactgcagatgtcccagcacttggctgctacaggggctggagacttcacctaggtcctgatttttttagacagggttttctcaggccaacttctacttggaagctagtaaccttcgaccagttagataagagcccctaacagacacttaaagaactaaggaagctccagatacaaaatagggaagaggttgtagctccatagagggaggccagtctgctgctttttctgctgtttgtggcacacagatgctcaagcattgtctggggttggagtaggatccattatttgcgccctagttacacatatattccaaaaactgtcctaaaaatattttttaaatatctacactttgtgaaagacactccttaaaaaagcttacactctgggtagggagacagaatagtgtaaacattgacagtataacatatcaggtcaggagtggtggctcatgcctgtaatcccggtgttttgggaggctgaggtggaggattgcttgagcccaggagttcaaggttacaatgagccatgatctaaacctgggcaacagagcaagatcgtgtctcaaaaaaaaaaaaaaaaaaaagaaaatcagcactagtattttattacatggaaaaatatcaatactagaaattcatgatacagcacatgcttcataataaaagaattaaacaatgtaattcaagttcaagaaaagaagagatcacttctagctagagcagccagagaaaacttctaaaacataaagaaaaatgagtattgtgcatggataactaggatctgagctctgtgttgttgagtag

SEQ ID NO: 1241755 - DNA, 4001 bp, Homo sapiens
atgcaacccaaggctcctgtgaagccagcaggggccagcgtcaggggttctgtgctcagagggtgtctgaaaaggagcaattcatgagccaggcacatggcaactcctttcacttggagtaaaccggtgctggcccaaacccccgatccggagatgctgtcagggagataaatgaagtccctctacctgtggatccccactccctggctatgctcacagctgctggcactcgggcaggagggatgcctgtttttggctccgataggcccacagaaattgtgtatccctgtgggggcatgatgggaaggtaaccaagagacttcacttcccgtcttcaagctgcttccttcccaagaaactagaaaacatatcttaaaggaggagaaaatgctggtgctgttccctgtcaccgacctcctccacacccatcaggaggcccttgcagcctcagcttctcagcgctgggactgtggggtgcgaagagaagacaggaagaggcccctccagtctgccctttggtggctggggagtcagaagacctgcatgtaggtaagatacctggagaactcactccaccctctgtgcctcagtttcctcatctggctctggctctaaaatgtcgctctctccttgcctcagtttccctccagggaaggtcatctgtcccagggagaagaacaaggtgaattcacttctaaggggaaagttcacttctaagggcaatagacggaatgtagcccatttctcccagggacaggggccggagagagaacaaggataaggtgataacagagggtggtgctaagagatggaccctttcttgagggaaaacacatcttcctggagcgctgcaggctgttgaaggagaaagttcatctcctcattcccatcagcacgggccttcctctcctcaaagccaactctcattctttccttgaacccacaagaacagcacacgctcacaccccctctgctcacttaggtgtttttcatgagcaattttctcctgtccccagacaatctaattgctgcttacacccatgataccctggagccccatgcggaagttgcaactccctgcattctcagggatgaggaaatggggtgctggggtggggggaggtcctggggtctagagaggaagaagggcccctgcccctccagagggcattcggtgaaggcagtgcctgggaggccagctctgtagggcctgctcagtgaccttggtcaagccacagcacccctgggcctcagtttccccagggccttcatccaaacacaacgttcctctctcaaggccagggcgagtagggaggcaagagcctttctttggaagcacatggggaaagggtggcattgttcccctgggggcccaggagcccagcccgccaggcagcagcgcagcagtgacgttgtcataacccataacggcggagcagactgccccctcccgtcccagcccagagagtgggcggcagagccccggggaatccctgggtgggggagagggtagccccgagcggtaactcccacctggctgtcaggcaggaggccggggaccccccaagcaaacctcctacccacctccgttcccccaacccagtgaagaccggtctactaaagccacgccctcccgggtgggcggctcaggccaccctttcctgggtacaagctagagacagccagcgtggcaagggactgtggcgcagtctcccctacccccatccctcccaatgcaaggtctcagaaagcacagaaacaagcaatccttccccgccccctccccgtgcgggacctggatccggcgccccttcttcccggcccgaccagccccggtcaccgcacccgcatcgcgtgctcaccacatttgcgtcctcagcaccgcggccccagccccaggctcggcgctcaggccgccaggctgcagtgacaggctccacgctccccacctgggaggagactgccagcgggtcctcctcctcgccggctgggcgaagccagccccacctggcaagggactgtcagcaaattcctctctgcatcactgtgagagaggcatcccggctcctcccaagcaggggccaaccttggccccgccccaaagcttctctgacctgccggggaacccaggctggcagatcctacgcgaagacccaggctccgcctcagagaccctgtcgctaccaggaaccatctgcaaattactatctcaaacacacaaggctgccggtccctggttccagcttgctccagctgccctgatgcattgggccttggcagctcctttgccacctcccctcgccctccctgaggcatgtcgcctttcccagtctccttagtcccatcagccagaagcaagaaaagccactccactcccacaaagatagccctctgccccgcccaaggaccaggtcctggcaccagcctagtggctggtacccagctgctacccagactccttctacagcaaaggagtgatctacaattggccacagccccaccagggagggccaagggagtgagctgggtcatttccggtttgcggtgggccacaatcctgcaggtatcagagtttcatcaaagtcctgcccactctgctatagacactggttttgaccccgaggacaggtgccagtgtttgcaacccccaaagaccagtgtgcaaaacaaggggcagtagtaaacagcctctccctcccaggcaggggcctaggcacatttatgtcatcgacattatctggcacttgcagtacaatagctgatgggaaagaagccactgcccaatgctctctgaaagtgactccctttcaccagttagggctgttaacaatatgataagaatgccatagaggaagccctgtgaacacaaggtcatgaggtgccagaggagggggtcaaaggctggttatgctttcatgggttgatttccccataaccagcagcacagcacccccttccacacaaccgtatcaggctggcgcactctagtcatctccctcttcccctgaccccctggttctcatgacccaaccaccccacgaagacccaagggtgagccacatagacagactctgtcgaagtctatccattatccactcactcgcccaggctggagtgcagtggtgtgatctcggctcactgcaagctccgcctcccaggttcacgccattctcctgcctcagcctcccgagtagctgggactacaagctcccgccaccacgcccggataattttttttttttgtattttttagtagagacggggtttcaccgcgttagccagaattgtctcgatctcctgacctcgtgattcgcccgcctcagcctcccaaagtgctgggattacaggcgtgagccaccgcgccggcccactcattatctttttcattcacgggacgggaagacttttgaacacgtattctgcagtggcaacagggcatcagggtctaggttccagcccttgcttagcggctatcatgctgtgcaaccttgggtagctcacttgatctctctttgtttttccctctcatctgtaattctgagagggctgggctagttgaggtctcacacccctctgctctgacacctttattctcttctaggataaaggctggcgggtacaaagacaaatcagatcaatacaagaatagtgctgggaacgctagctgcctgcatttcagtcccagctgggccacctaaatgtgggacttaacctctctgtgcttttttttttttttggcatatggaaaatgggggaaaacaataatcataagcttaaagggtgattgtgaggattaaatgaaataccatgtacaaaataaatgctctgcaaatattcattgttgttgctgtagttatgctattcacagtctggtgggacagcataaattctcaacaaaagcagttcgtcttttccttctctgcttcatcatcacagaagctgttgtaagcccatatccaacccactccacctcctagaggagaaacctgataagcatcaag

SEQ ID NO: 1241756 - DNA, 4001 bp, Homo sapiens
ctttatcttaccctccatataaatgttctactttttttttgagattgagtctcactctgtcgcccaggctggagtgcagtggtgcgacctcggctcactgcaacctctgactcccagattcaagcgattcttctgcctcagcctcccgagtagctgggactacaggcgcgtgccaccacgcccaggtaattttttgtatttttagtacaaacggcgtttcaccgtgttagccaggatggtctcgatctcctcacctcgtgatccaccggcctcggcctcccaaagtgctgggattacaggcgtgagccaccgcgccggccagttttgtttttttaaaaaataacacaggacttactgatttagccttctgggttctcccttggggatgtcactttcactggcctccttaacttgacaacccttgctgtattcgtgacacaagaaaacactcacctgaaccctgttgtcttttcatttttatttatttacttatttattttgctagttgcccaggatctcttgaacccctgggctcaagtcatcctcatacctcaatctcctgggtagcgtacgccacttccagctgaacctttttaaagaagaaggtgttctaacaacaattattgtatgcctactctgaagacccaaagaaagccagcacagcaatatctgcataggttaactaaagtatttaggtatcttgttactcatttgtaaaacgtgaaaaacacctgtcatagagaatttgtagggaattaaatatggtattcgtgtaaaggtgcttagtggtgtccagtacactgttaataattatgcttttactattatcagtaaatactgctaatatgtataataccaccatcaacaacgacttagcatctaaagcaaagacagatactttatttcccaccgcggcagaacagatattattaaattgaaatcaccacacaaaatacatgatttcgttcgagcaataaatgatgacctggcgctcttgagagtgtatacattaatacattatcttttaatgtaataccatttacaaagacctaggagtcacaacccaaggtattctctacactacaaagacacccaaaggaaaaatgagatgaggagtgaaaaaaagagaaagcaaaagaggaggcaaaaagagaaaacgaaaacttaaaaataacccaacttgaattgactcagtatttacaataaaaaagaaacgtacccaatccattaaaaaaagcttaaaagcgccaaattccaacaccataaagagactatcttttaaggacagacaaaacgagaggagaaattttgctcaatattctcttatgtaaaatgtggtgaaaataagtgtagaagtctgtgaagaatcactttaactacttagacacgagtcggacacctccctccccgcgccccagtcgcatcctcaaagtcatgaaaaatgtcagaattcgcattggcactaaccctttgggcgcaccacaacccaagaaacgaaacgagggtgcaccccagaagaaacttaacattcacgggtaagagacgagggggtgggaccaagctggcggcagatcccaagagtttggggagctgcagaagtcggggacgctcgctccgcaactcggaggcgcagtcctggggagcctgcgacccgcacgaggaacgtgcggggtgaagtcgtgtgtccaggcacggacgtaggaccctggccgccccgcactcacaattctatcatccagtctccttccagcagttctctccagttctcgtccgtgatgacgcgaacgttgctccgccgcccgtgcgtccagggagcaccccaaagcaacagcaccaggactgccaggggaactgcaagactcccggagggcgccatttcgccgcttgcccacctcacagggagcgcggtcgcagctcccacttccgccctcgcgggctgctcagcgcaagcgcactacggtgctgcgaggagcgcctgtctagaggactctcaatgcgcatgacaggggtctgatcccagtgagtggtgaagtcgggaaagagggaagaacgactctccgcaatgcgcatgacagaaaagcggctgcttctaccgcctagggtgtcccaatattgtgggggaaggaacagagcaaaaggaggcgtggtgtaaaaagtggggcggtgctttgaggaagaacggtttaaaagaccctcccaggattttggcgccaaatggttagcgtttacaagcaaattggtaagtttataatgtgctaaagcagttttccaattaaatgtccttcagagttctcatttgttttctttgaaacatgtagtaaagctaatggattttataggagtcggaatattggtttacttctgagagattatagacagggaaggtgcagaggaacattatggttatgttggatgtgttggaggtgttcaacatctagatatgaacagtagttacatgggcgtacgtatatgattttttttaaagaaggatcaagctgtacattttaagacagtgcactttatgcactttcaggtgtatgttatctctcaaaaaaaattcagtaggtacagagatcctaggtcagtacttcaaaatggaaccagacacataggcttgtaagatatttgagttttttctctcaaacattcgtaaatacaaatgcaaaccaaaatgtgcactgccccatcagtcaaatgaaaatagttgcaggtgcggtggctcacgcctgtaatcctagcaaaacagggaggccaaggcaggcggatcacttgaggtcaggagtttgtgaccagcctgaccaacatagtgaaaccccgtctctactaaaaatacaaaaattagccaggcgtggtggcaggcgcctgtagtcccagctactcaggaggctgaggcaggagaatcgcttgaacccgggaggcggaggttgcagtgaaccgagatcattccactgcactccaatctgggctatagagagagactaagtctcaaggaaatagttgccactatcttacctcaccttttcaacttaattaaccccaattagtccccttccccacccctccactgaatagccctctcaaggacaccagcgaccagcaagataaatcccaattgtttcttctcaatgcatctagcatgactcctagccccattctaccacacccttgaaacactttactatcttgctgtctgggcagctcgcttttttttctgtcctacagtagctgattcttctcaaacttcttggctggtcctcctttacttccggacatcggcatctccaggatgctttactgccccccgccccccatctcccgccacctttctcttcatatcatcaggctctcatctttctgggaactacaggcatatgtattcaactgtatatcattcagactctgatctttctgggaactacaggcatatgtattcaactgtatatcattcagactctgatccttctgggaactacaggcatatgtattcaactccttgctaaacatctcttgggtatgtaatagctggtgaaaggaaaagaaatcttggggccccaaaatcattaagctaaagggaaaagtcaagctgggaactgcttagggcaaacctgcctctcatccttcttctcactgagataaatgcatatctgattgcctcctttggaaggctaatcagaaacttagaagaatgccaccatttgtctcttacccacctatgacctggaagccccttcctggcttcgagtttgtcccgcctttgctttgagttgtcccacctttccaggccaatacaatgttcatcttacatatgttgattgatgtctcatgtctccctaaaatatataatataaaatcaagctgtgctccacccaccttaggcacatgtcctcagcacctcctcaggctatgtcatgggcgcgcattcttaattttggcaaaataaacttcctaaattgactgagacctgtctcagattttgggggttcagaagctcaaacatcaaa

SEQ ID NO: 1241757 - DNA, 4001 bp, Homo sapiens
tgcggcgggctcacagggtaaccctacacaatgggggtctaacaagacacgtggccctagcccatcacttggaactctcctgcctgggggtgcccgcatagctctgctcagctccagagtgccctggaagaggacatgctcaggagcaccgaccttcctctcaccttctcccctacctgccctatcacccctcctcctgcctcctggcctgattccctggctcagagaaggaccgctggctttcacctcctccaggctggcttccctgacttctccaggcctgctttgggcccatgctctgcacggggcctggcctctgctgccacagcccttccagctctggatggttattgattgctttgccccctcctcagactgggcgctcgtgaatgaaatccctaccattttctgtgcctcagtttccccaacagcagaatgtgactgaggcccaggaaattaaggattccaagagcaacgcagacccagccccagccttatccctgtgtccaggcccagtctctgcctgtccaggctctgccccagggagtccaagtcccacccctgcattctcggacccaaaactctgcaaacaccgacctcactaaaagctgccggcggcacacctcgacacccctcgacacccctcctacagaggacaccctccctgccggcccgggcccagcccctggtctgctcacttggggtagaggttctgcacccagagcagcagcatgtaggtgtcgcgctcgcacagctcgaactgcgccacggcggccaggtgggccgcgaagtgctggtggtagctctcggcgtaggccgccacgacgccgaactcggcggggaacagcggcttcagccgctccaccacggcctccaggtcctccttcatggtgcggcccaagtgcagaaagacgctctcggggacctcggcgcccgcggccggccgctggcccatgcgctcctcggccgcctccgccacgccgcgccgccacagctgcagccagcgccgcgggcgcgtggccgccagccccgaggtccccggccccgccgccgccgcctggcggtcctcgcgctcctgctccgccaccacggccagcgcctggcgcagccgctcgggcggcgcctccagcggccgccgcagcacgcccagcacctggtcgcgcagcagctcgtacagcgcctccaccttgctctggcgccgcaccagctcctcctcgctcacaccgcccgccgccgccgccgccgccagctcccgctccagcgccagcagcggccgcgccgcctccagctgcccgcgctccagcgccgccttcagctcctccactgcgccgggaaagccgcgtcagccccggccccagcccaccgcccaccgggcggggcggccagcgccaagcgggaccgtcctcccctagacgcgcacagggccggcggccaacaccctaaagggtgatgtcggtgtccctgactaggctgaaggcctcccagccccccagattgcggcacaggtgaaagcagggagacagacgcgccttccagccccacttgccggcccactgtgcaagtggctcactcacgcggatgagcgccaaccccgtccaggccccagactagctctaacccagggtcctagagcacctgtggggggcgggccatccagcccctgcctggacccggctgcgtcctcgggctccgctgagctgggctgacccttcttcttcttccctttggtgaagacgcagaacacattggccaggcctttggacttcttcttcttctccttcttcttcttcgccgcctcttcctcctccctatatggggctgccccagcctccaggggtggcaccaggtcctcagaggaggcctccgacatggaggcctctgactctgcctctgatgtggactgcaacttttgggggcctctaggcaagtcgagggtgcctggcacaggctgatggctctagaggccttggaagaaggtcatcatcttcagcatcaccctggttcaggcctgcaggctcctgcggggtgggggtgaaggcatcagtggtcaccatggaccggccctggctcccaggctggacacacagctatgctggctgcattgagtacactcagtctgtttcacccattcagccaccggggctctgctcatctcctggcccagatgagcaccaacaactgtgcttcctccctggccacgagcatctcaccatctacagctccccttccaatacttcacagccccagaagcaaggaagaggctggggacgccaagcccgccacacagagggggactttcactttacttgggcaaatccttccctgccagcccaccctctgggcaggaagcaggcaatggacacctccctggatcccacgggaccctagggaagaggcggggcatgggctctgtccctttggacagagcaggaacagaggtccagaaaggtctgggacatgccggggtctagaacaccagaaccggcctgagactggaacccagcctcctcctgcccagacccagcccctctgccatcttgtccagttctgatccagcggtggggtcacagaaacacagctgctccagctgggccatgaaaggggcagagcctgaccaggatctacagaagccacagtgggtgggacctcagacagcctttcacacatcactggggcaaggggctcagcaagtcacagggcggcctgaagtcacacagcaactcgggtccagaacccaggcttcctggctcccaccccctcccaaatgggatcgtagcatcatcacaaaggcttccagtttctgcagccttcctgggtgcccatcccatctcttcctttctctcatctggaagggtgttatttcggcttaaactgtccctatagtcaatagcttgggcttggaactcaggccacccggtcccagagcccagctttcccctgcctccacatccccagctatcctgcaagctacatccagagaggcaagacccgagcttccccagagtccctgcccagcacctgaccattgtcagagcaaggccaggtccactggagaagagcatggctgatctgaaagggggaagcaggcaggggctgggcctccccaagaactggggtgacctgtaaccttgatgccacctgtctgccccaccccaagactaaatgcatgcagccttgtctcatgtatcatggtaacttcaagtgacccctgaaacagccctgcaaggcaggcaggatgatccaccatccagaaggagaaactgaggctgagtaggaggtgtttgccccaagcacagcagccatggaggctcagactgggcccatccgactcttcccatggccccgctgcctccaccagccccactaccctgtccccatcctggaggggcttggccagagccacctgagggacaggaagcctgggctcctcccacccccagcccctgccatgctcacccagtgccctgggcagagtcccacactcctggatggcactggcctccctagtgccatttgggttgagcattccactccaggaccaagaggggcatgctccagggagccccaggggcaaggccatggggcacctctgctccccacccggtgccccaacttcgcttcccagcccctctcaggtgcatgcctagcacccgcgggagctggtctgtctggcagggccactcagccccaccctgggtgcccaggccccacctctgccattctcctggggtgggggagggtggcccttaccagcaatgctccctgccagcctcacctcagccttccctgtcccaccccacatgtactaggctctgtcccacctccaggcacagctcccgcaggacccccacagcatcaccgccttctcccctctgtgacacgaaacccagagcgcctgaaggtcctgctgcagccccctgggcctcgccccaggtctccgctctccgaggcagctggtgccatggaaagagaaacgctttcggtgtgggctcagcacactt

SEQ ID NO: 1241758 - DNA, 4001 bp, Homo sapiens
ttttattacctctcaactaaattgctgcaatagcttgttttcttttccaatccattaagtacactcctgcttgatcaatctaagaatatttctcttctgcctttctttccttctttttaaaaaattcctgcttagaaatcttcagtaattcctccattgaatctcagttccttaacctggccttcaaagcaagccttccctaattcaatcctactttcgctctccaaccttaccacccactattcctcagtatgactcctttgccaaactggtttactgaatgtgcttggcagatgccccactttgcatctttatgcacatgctgttccctccatcctgtatcctctcccctgaaaccaagccacaaattcatcatccttccaggctcagttcaatgccacttccgctacaaagtcttctccggaaaaactgcatgtttcaaaaatggctaccgcaatattcccggtcacacaagtgctttcaaaaccttgccatccctgttgagaggtagaatctatttcctctccctttaaattgagtaggcttcaatgttgccagaagtggtaccatctgctcttccacatgggcacatgttctagttcacatgcatgtgcgtgctctctctatacacagacacacacacacacacatatatatacacacatacatatatgtgtttgcttgtcccttgggacacagcccatcacacaaatgaagaatcccagatcacacagacgtgtaggtgctctggctaacaatctcagctaagtaaacatccagcatcaactgcggattgcttgtggccaggagttctagttcagcctgggcaacataggaacacccttgtctctttctttttttatagacagtgtcttgctctgtcgcccaggctgcaactgccacctcccggactcaagcaattctcctgcctcagtctcccaagtagctgagactacaggcacacgccaccactcccggctaatttttgtatttttagtagagacaggctttcaccatgttggccaggctggtctcaaactcctgacctcacgtgatctgcccgccttgcctcccaaagtgctgggattacaggcgtgagccaccaagcccggcccgcctcttaaaaacaacaaaaaagggactaatcaaattttgccgcagagatttacaaaacacgaagatgccttctgcttctgagctacaagaaaggccctgcgggagaacaatctagaagttactgccatgtgaccgtggccagcctgggtttttaagtgtcctgtgcggctctgacagggcaaaaggctcctcttccttcttccagttaaaagaagtgcctgttgtacagtgttttgctttgcagctgcctttttataactccaacttcttcctccttccttccctcccttttgtgagaggagagtgactgggcctgaggcggtgcgtggcgcgcgagggcaggcctcttcccgggcacgggcggctgagggaactaactacctgctgccgagcccgccaggagccaagcaacccagcgagcccggacctgcgtctactgagctacctgtgcggatcgaaagcactgcacctgcgtgccctgctcctcagccttttgaggctctgctcttctttctgcgaacacaacacggcacatgctggctgggaggcccgtccagaggcacgcgtgggcccagtggtcctgcctgcccgggcgccgcgggcccctcggcagaggctgaggcactcacggcccggcctctcagtggggggccctcccggccggcagcccgcccgcgctgcccggcccggccgcgcctccgcctcggtcccactcactgtcccgcaggcggcgcttgaacgcggggtccccgcgccgcttccggttgaggtaaatacaatagcccaggaaggcgaaggcgccacaggccgccgcggcggccaagaggcggaggagggagcggacggagggcatccgaccgcgggcgtcccacaagccgagcgttgggcgcgggccggccggcagggggcgtcggcgcggcggcccatccggcctcggggcctcctgcgcacccagctgcgcgttgacgcctcgcacccaggcttgcggaccgatgaggaagccgagcgttcgagagggtgtgtgcgggagccctcacagccacagagtagcagagctctgttcgaacctacgtctgtcgcactccaaattctgaaccctttctccaaacacgcctctgcccctgtgtctacaacacccattcaggcaaagcacagtatgctgcgaatctgctttactgggagccagtggtcgtttaggtctctgttccctcacctgcaaaattaagttgactctaaggtcaactttggtcacctcctagttcacattgtctaacagtagcccgtactccccaatctggtatcctttgtctcctgaaaggacccagcagtccaaggtccaagggaggaattcagaagcaacactgtttaatctagaaaaatacgttaaattgctgggctgagactgacagtcaaaggtcccaaagcaaaaacaactgagagtcccatgatactggcctagctgcttttctaatatttgccttactcagcggacacagcagaaagaaagaaggtaagactttgtcctaaataccagagttctgacttttctactaaggaggagaaaaggcataagctagggacctaaagaactagataattcatttttatttaggttatacaattgctatttactgatttacaatttactgttattactagtgtgtgcatagcaaggtgctcatcactgctctgaataccagtgggtctagctaggtgcagtggctcacaactgaaatcccaacactttgggaggctgaggtgggaggatcacttgagctcaggacttggagaccaaccagcctgggcaacattgcaagaacccatctctaaaaaaacaaaacaagggccgggcacaatggctcatgcctgtaatcccagcactttgggaggccgaggcaggcagatcacaaggtcaagagttcgagaccagcctggccaacatggtgaaacactgtctctactaagaatacaaaaattagctgggtgtggtggcatgtgcctgtaatccgttacttgggaggctgagacaggagaactgcttgaatccgggaggcggaggttgcagtgagctgagattgtgtcactgtactccagcatgggcaacagagcaagactccgtctcgataaaacaaaacaaaaaaatactggtcgtggtgtgcacctgtagccctagctactctgcagggatcacttgagcctaggagttggaggctgcagtgagctctgatcactgccactgcactcctgcctgggtgacagaatgagaccctgtctctataaaaatacataggtggctgggcgtgttggctcacgcctgtaattccagcactgggagaccgaggtgggtggatcacctgaggtcaggagtttgagaccagcctggccaacatggtgaaacctcatctctacttaaaatacaaaaattagctgggcatggtggcacaagcctgtaatcccagctacttgggaggctgagtcacgagaattgcttcaacccaggaggcggggaggttgcagtgaactgagatcaatcacaccactgcactccagcctgggcaacagagtgcgactctgtctcaaaaaaaaaaaaaaaaaaatatatatatatatatatatatatatatatatagagatagataggtaaattataaattagtagatagattaaaaaaccaatgggtctgagtagtagcctcagccctcaaaatttaagagttagcaggggtaagttacatatcatgctttcttgagtactgtatgttttttctcatgataattgtcttctagaagggaacttggttattgtgaaaacctgattgtaaacacagaggagaggatagtgtcagcatcttgtaagtattactggtgatcagggactggttcag

SEQ ID NO: 1241759 - DNA, 4001 bp, Homo sapiens
atactagattcacacttatcctgcttatgagaataataaataaaagcaacaaaaaagttaaactggcactgggcacattggctcatgcctgtaatcctagcactttaggaggctgaggcgggcagatcacttgaggccaggagttaaagagcctgggtaacagggtgaaaccccgtctctacaaaaattcaaaaaaaaaaaaaaaattagctgggtgtggtggcgcacacctgtattcccagctacttgggaggttgaggcaggagaatcacttgagcccaggaggtggaggctgcagtgagccaagatcgtgctactgcactccagcctgggctacagggagactgtctcaaaaaaaaaaagaaagaaaaaaaaagttaaactagcaactggcccttgtcaaccccattttcatccatgaaaacgttaggattataggataagcccatgcaacagccactgacaattcttggtaaaaaaaactgatgcaaatggtccacaccacttttgaaaataaatataaaagtcctcaaaaaatggcagatggttcaagacttcagtttctcaaagacagaaatttttgtctgttccaccattctcttttgcctctcccaaacaagtgatacatatctatattatgacaatatttcaaccaaacttttttaacgaacacttcagggtttcatcataacctttacttctactttaaaacagcataagaaactataattacagctgtttgacagctggggaaactgtgacatacaaagatgaagtaatgtgcccaacgtctgagtcactggcaaattgaaacacatgtcctactcaactcttttatattctctagcagctatttcctttcctcctgacattagcaaaacaagctgacaccatgtaggtaaaggtaaccacaaattttttatcaaagtaggaaatttaggccgggcgcaatggctcaggcctgtaatcccagcactccgggaggccgaggtgggtggatcacctgaggtcaggagttcgaaaccagcctggccaatatggtgaaactgccatctctactaaatatacaaaaattagccgagcgtggtggcgcacgcctgtaatcccagctactcgggaggctgaggcaggagaatcgcttgaacccaggagacagaggttgcagtgagccgagatcgcaccactgcacttcaacctgggcgataaagcgagactctgtctcaaaacaaaagaaaaccaataagctcctcccctcaaccccaatttcttcagctgctgaaacattttctttccactgcgatcccctaagattactgtagctatttctccccagagaaaggagacaattccactctgtcttctaatccagaatcccttttctctttaaacaggttatctctttccaataccttgctttctgatgacagcaacttcccaagacttccccagatagtccccacaggctctagaagcaaccgccacttttctctaaacaccaattgcggcccttggttcccagcccccgtccccggagtccgtgctctcctccccactaccctaccccaccgctgcctcaggccctacccccgcggcgtcggcagctctggctcacctcggcccctgacaggaaggggtgcgaaggccctgtgatcgtcaggtaattgtcatttcctccgggaaactggaaaccaaaagaaagtcgcggggataagttagggggagcagggagtcagcttggagcgatggcttttgaccctgacattctgacaacactccccaaaccccgctctctctcctctcccgtcagtcgcctctccgcccggcttcccgtccctgcttcaacccggtcggccgcgttctctcgccagccttcttagctatcaggttcctacctccatcttcacacaaccgctcccaccgtctcagaccctcatcgctcccaccgcccccactggactcggaactgccgtcacttccgcaaggacgtgtgttctctctgctgattggaaggagcgccgtggggctgcagagagtcaggcgctgggctatcgccccctggagtttggagggataagggcatgtagaagtgctagaagcgtccctggaggtggcgtagggtactcccgacctaaggatgattccggggagtgcaatagagacgtgatctgggctagaggagccggaggggcgggggagcggggggaagggggagaagaagaagatcggtagattgagtggctagagaggtcggaggtaagtggctatagaagtcgggcggacccggaacccagaggacgcgacaccatgacttatgcttatctcttcaagtatatcatcatcggagacacaggtaaccctcaggtggttcgccttcaaggctcgggcgggcattcgaagctcccaaattgggtggcgggggcggggctcactttgtgggctgggcgattcgagacgggcggggcggttcggggcggccgggggcggggctcgggagccccccttctctggtccgggaagtccatactctggaaggtgttccagggctgcgtgattccgggagtgtgctttctctttcaggtgtggggaagtcatgtctcctcctgcagtttacagataagcggttccagcctgtccacgacctcacaataggtaagtgcatctacttgttccagaacagatgataaaacctgactagctaaattgctaaagtggaaagttagcagccttcagtgttcgaagtaaaaagttacccctcactactttaaactagtccaaacttatgttaatgaagtgaccaatgaaacgttgatatgtggggagtagtgtaagggagagtatataattgaaaggtaactttttagagtgtgaggtatagactcgtcatataattttttttcaaatacaatttgtatgtttatggaaaatcccacgaaagcataactgcttatttatgaactcatctgtgctttgaggtaaattaataccagccttacttttaaaaagtaaacaccaatacatggacattttttatattggtgaagaagcaaattgaggagtcatccctgccttagaattaataggcaaataaaactaaaaactttccttttaaatgaaagagtgtgttaacagttcctcaaacgcactggcgatcctggaaaatattaacctttcccacacgtttgtgataaggcatggcctgaagaggcttttaactaccccctcttcgttatctccgtaaccccagtccaaataaacaacatatatgaaactagctttcttgccatgcaaatgcagtttctaaataaacccctacatccccattcttaccatattgctacttccaagtcccacctgtatggaaacctgaagctaccactgttcctaacggatttatttagagtcaaataattgatggggttagaaaaggatttggcagtatcaactaaaaggtattttaaagggaatattgagcgaattctcactttgcgataggggctaatgatacaatgcttaacaaggcaacaatgcttaattgtgcctctggcaattattggaaatgtaaaatgtattgttaaaaaaattaggtgggcgttgtggcgtgtgcctgtaaggtacttacttgggaggctgaggcaggagaatcacttgaactcaggaggtggaggctgcagtgagctgagatcgcaccactgcactccagcctgggtgacggagcgagactccatctcaaaaaaaaaaaaaaaaaagtattgtttctgagaacctatttcttaggctcttttcttaaagaaaaacatctggaattgcaaaaaaataaatattgttttaagtagagactaaagagtgactgagaaagtgtcaggaaatatttccaaaatttttagttttttggaaaagttacaaaactaaatgttacctaaccaaatttaagcattaacctaacattgctaaaaaagtattcacctttttaaatttgacttcttaattggttttattttccc

SEQ ID NO: 1241760 - DNA, 4001 bp, Homo sapiens
acagacagagattttggctgctgcacacacagatgtttattgttttccaagctccctggtgttaaacatgcagggtcagggggctagcaggctgagatgaagctcctctctacttggtcttcttatcgtaggtgccagaacccttgtaaccactcacatagcctgtgttgtcagtcatctcttcccgtcccgcaatgcccttgcccttgccactctcatcaaagcgctccttgtgggtgccggtgtacttgctggtgtctgtcaaacggtccactgcacccactgttgttgctttctgcaagccagggatggatttgagctctcttcctttccttacgctgtcatatcccttccccaaagatggcccgagatacttagaacaagtgcttggagctcttgctctgccactggcatggggtgctgctttcttagggcccagatacagctgtgggcaggtactctggtaagagccgttcactcatgggggaggaggagtgtggtgtgggaatgagtgtggcgtgtgcagagggagggtaggttttttgtttccagaggagttattctgactaggctgctgcctgaggacttcactcccactccccgactcaatatccactgtagaaagagcttttagttcagacaggacaattaaaaaagggagtaggtgagaggcaggaggcctgagattaaaccctaaataagaattggaagaggagtgggcatcaggtaccaaattctctacactaatgtcctccaaaagctaccaagccctaattgcctggctcagatactagacacttggaaattagtctaaatctactattaaaatagccatggaccttgggcaagtcacttcccttctctgggccacattttcctgacttctggaatgtctagatgatctctaaagtctgtttcggccctgtctctacagtcacacagttggcagggttagggagggtagactggaacaatggggatttagggaagtagggtcaaggggatgaaggctgtcactcacagtagcgccagtggtggctgggtctttgccctccatgagtccataaatgttctccaggacttcatctggactcttccctttgaagcgcttctggcccagttccttcactgcctctttgaactgttgaaacgtgatggttcgggcgttcttggccctggtcagttagacagaaatccagaaactttggagcatgaatgcattaccttccaaggtccaactcttgcctcactcagatttggcctcttttgtcctatcaatcagtgagtgtctcgaagacaaaggatagcacagcgccaggtaccctgtggtgcttggtaggcccactgcaaatgttccaccacgtgaacccttccgtggccaactacctcgcaggttcttctcacccccacctccatatttttggctcctcacttgactttgctgaacacgatgtccacgtccgtggaggtgactgtcttgccatccatgatgccacagtctttgcacagcttggagaagttcttgttgttcatttcagtgccactgcttgatgattctccaaacgcagcaaaccgatggaatgttttttctgcctctgatgccatggtcagctagaggtcggggagggcagtcgtgggagacacttgggggtgaaggagaagggggagggaggactgtggagtaatgaggatgagtgttatggtaaaatcagtcagcaacaggaacagctcccctcttccctgttgctctctcctttctccctcccagctcccattgcacctacgcaactacagcatgagtctcccattcccagcattggagataccagtgtggatcctacctactgaatgatcctctctttcccctacctcttttatgtaccttagagtacccggatggtggtctgacccttcccggcctttgtatttaagtgtgtgcagatatgtgggagccggttggctgtggcaatgaggagacagagggaggagagggaagattctatgacctcagcagtggttatgtgacatcacttctggccccagctacagccattgccttcaaaggagggggcttttggtctccctaccttgcatgccgaattgagcaaactgccaactttctgaccttttcagatgatcacatttccatcatttcagccaagcttacccatcctctgggtcctagtcaaattgccttatgctctgccccacaacagaagctgaggcgagcccagggaaggtgttgtagtctgtttgggctgctagaacaaaatatcaaactgggtggcttataaacaacagacatttatttctcagagctctgaaggctgagaagtctaagatcaaggtgctggcagattcagtgtttggtgagggctgctttccggtccatagatggcaccttcttgctgtgtcctcacatggtagaaggggtgaatgagttcccttgggcctatttataagggtatgaatcccattcagaaaggctctgccctcataaaacttaatcaccccccaaaatgccccatctcctaataccatgactttgggagttaggattttattttatttatttgcgtatttattttgagatggagtctcgctgtctgttgcccaggctgaaatgcagtggcatgatcctggggcactgcaacctccagtcccaggattcaagcgactctcatgcctcagcctccccagtagctgggattagcccagccactatgcctggctaatttttgcatttttagtagagacggggttttgccatgttggccaggctggtttcgaactcctgacctcaagtgatccacctgcctcagcctcccaaagtgctgggattacaggtgtgacccactgcgtccagccgggagttaggattttaatatatgaatctgtggacaacataaacattcagaccacagcagttaatgaaaacggattaatgaaaacaggctgtcatgttttctagtctccaggctcaagtgtagcatggagaatcccactggctttaaaaggccagtcgcaatagaaacattaaatagcttccagtgttgggcccagcaagccttggagtataacagatgtggacaggtcaggataaaactgggatagactgagggtgaggctcagattctgaaaatcttcagataagtttctatgcaggtcaaagatgttcctcagggttttctctcttcggccttttctctggccagaagcactacagatagatgaacctcacggatcctaaaacagagcaacgagactggtgactttcctccttttcccatctaataatgccaccactttctattttttttctttgtcttacaaatctatgcctttctttccattcctattgcttccacccttattcaagttcttatcatctcatagttggatgactactctggtttctaaatgatctcttttctaaatctaattcttcactcccacccacccataatccatctctattacctcctccccatcagattaattttcacaaaacagtattttttattactcctgctcaagaatattctgtggctcaagatatactatagcttctcattgctaaatctttttgcttagcattcaaggacctatacaactaactaggccccaatctaccctaccaaacatcacccacctctcatcaacattattcttgggcagggcacagtggctcatgcctataattccagcactttgggaggccaacaaagtgagaccttgtctctagataaataaataataataaaaaaattagttgggagtggtggcatgcacctgtagtcccagctactgaggaggctgaagtgggaggattgcttgagcccgggagtttggggctgcagtgaactaggattgtgtcagcgcactcccacctggctgacagagagaccccatctcaaaaacaaaacaaaacaaaacaaaacaaaaagaaccccaagaaacaaaaaacctaagaaccagattattctgcagctggggtcata

SEQ ID NO: 1241761 - DNA, 4001 bp, Homo sapiens
tagggatattttgatggtattaacagaaacaactggccactgttactgcctgtttccagtgaaatgtctttacagcctctcactgagtgaagccatcttattaattccaaaagaagggacagcatccaaggaaaataattggtcttctttcccctcgcagagaaattcacatgaatgtctcaaaaaaaaaaaaaaaaaaaaaaaaaaaaagctggaattctccctggccagctctctctcctttcctggcttctgcattgacagctggaacagatggcgtctgggtgagacaccttacatcttaacccttatccatgataaggtctgattttcaccagcgatgctggaatccaaggtctgtcagggtttccgtcatgagcacccactcacaggatttccagtcccatgtgatgttttccagttttcatatcgataaggcttatcttgttttggccaaagaattttcatctttagactaattcttaacatttacattgtcacaacgcggcgaaaaggtacacatttcctctcatttgagaaaagaacgctgtacactattttgccagacatcctacatatgatgcagtctgttcacaggccattttcaaagacgtgagagacatgagaagatctcaggacgaactgatggtccacttggccattccctacagtaagaattttatagacaaatacagggtaacagcaaacaacatttccaaacgctccggcagtgtgtagtcgcagcaaatgctaggaaaaaaaataaataatggctcctcttcagttgtatgccgtgaatgtaaattaagaagccgctacaacgctcgacataacctttctgacgccacaaaaatgaatgaattatatccatacacacacacaggcacacacaccacgcaccacgcatcacatgtcattctgaaaactgattctgagcttaattcgaaaaacgtgaaatacaactggtcccgtcaacagctcgtaatctgaaggtttcttgcatttccaagcacgtccataacacctcatccgtttccagtttgttactgtttccaaccgaagggagagaattttccacacagaattatctcctcgggtccaaatactagaccgaagtccccacacggggctggctggcggcgtggaaccggccagcccgccgagagccgcctggcgcccgcggggaagacgcagagcccgcggccaggagccgcccggtgccccgggagtcgccggccctcggcggccgcgcgagggggattcgcgccctctgcccatacccggacccccgcgccgcccgccaagcggtcggaggcgcctctgaggcggaatgactcaggaccaactttccaataacgcccgggcccccccggccggcccgggcagcgcgctcggccacgcagcccctgagccgcccgtccccccgcgtgaaacccgcggccccgcggggtgccgggtcctcaacgccagcgggggtcacggccgtagcgaggcctgcgcgccccgtttcctgaaaaggtgcgggcgccccggccccctcgggccccgagcccggcctccgggacaaagtttgccgaagttgaggcgtccggaggcgggaggcagcccggctggggcgcggggccaggctgaagccgcgccccgccgtcgccgctgggacgggccgggcctgcgccgcgccgggcccgcgccgggcagccccgaggcccccgggccccgccgcccagggcgcgggatggaggcgacggggatggaggcgcccggccgcgcgccggaggcccgcccgcccgccgcggccccttacctcgcggtccgtcgccgctcggccggctcaggggcgccgggcgcgtcctccgccgcggtccgcagcgttctgctccccgggctgccccatggcggggggcggggaagagccggcggccgccgcggctgccgccggctggaaagtcccggctgggctgcaaccccggctcgcgcacgcggcggccgcgccgcgctccctcgctccctcgctccctcacgcagccccgcgcaggcacttcctctcgcgcgctggaaatccccggcgcgcccgccgccccgcccccgccgcccgcgcgcgtgggagcggcaggagcccgcgagcgccgccggccccacgcgcccgccggccccccgcgcgcgcccgcgacccgttgctaagggccctagcgcccggcggccgcccgcccggccttagcaacggcggcgccgcggcgcggggcggggacggccccgggcgccccccgcctccctcccgtccccgccgcgcgccccgcgggcctcctcgctctgcgccgcccccgccgcgcccccgccgccgcgcgtccccgcgtccccgcctttccgggtcaaaaagccacgcaggccgcgtgggggccgagaggtgctggcgccgctcctccccgcggccacctcgcccgcaccccccacgccagcatagcatacgcagcccccgtgcgtgcacgcccgtgtgcccatggccacacgcgacccctacgcacacgcacgggtccgatatgcggccccccgcactgtcgcggacgcatacacgacggtcacattcccctcaagcggacacgcacacacacgctcaccaacaccgtgcgcacgcgtaccaggccacgcaccctcgcgcacacgcaggtggggctgagggtgactcaggccgtggagccccttttcgcatgcagagggcagggctccacattagtttggtggcactttcctttctccctcccttggaccctcccacgcccccggagtggtgtcttgctcacgggtggacagggtagccagtttgccacgtgcccccagcgtcctcggcggtcctggctgcccctgcgccccctgcaccctccaccaggccgctggggcctgcgcatttctcccgaggcctctgccttctgccccaaaggcatcagtggtgtgtcagtgattcacctaggcccaccaaggcagcacccagcctggctgggcctggcgaggtgggaagcgaagggagggcttctgggaggctctgggccagctgaggggtgaggccttcgctggagtttgcaagtcagtggtgaggggacagaaaggactttgcatttttcacttctcaagaaggcttataaagagccctaccccagagctgagaccagtgtgagtagccaaggccagtctgccttcttgtattgctccagtgactcatgtgagtggaggcaggaagtccagcatctcctcctacagcttcacccatggaacgttccagaaccccagatagtccgacctggctgctggaagtctatctggacatcagagacattggaccatgtctctggctccattagcccaacagatgcttgttctacagccacactcaccaggccacagtggcacccccgtctgcgccacaggcacagctcttttagaggtgacaggcccgccttcgccgtccctcacagggacctatggactccagcggtctcccccacccccatggtggactccccttgggagcctcaggtgccctttcttgcctgtcaggagttgggatgttactgacctcaggctcagggtcccaaccacttcccatagcccaggcactgaggcctcccatgtccccagccctgcttagcccacagtcctggcaccctgtcgactggggcccactcccaacgcctgccttatgctgtgtgttacctatggcctggtttaactttgccaaaatcaggaaagactccctttcctaggctggactatttttggttgttttaaaagaagcaggacatggaccgggcatggtggctcacacctgtaattgcagcactttgggaggccgcgggcaggcaagtcacctgaggtcaggagttcgagaccagcctggccaacatggtgaaaccacgtctctactaaaaacacaaaaatcagccgggcgtggtggagtgtgcctgtaatcccagctacccaggaggttgaggcaagagaatcacttgaac

SEQ ID NO: 1241762 - DNA, 4001 bp, Homo sapiens
aaatctctattatagatgggtcatttgaataagaatagaattcgcttcatttccaataaccttccaaatgtatcctgcctatccttcttgtgcaaactggcagtacctttttttggatgtcatacaggcacctcaaaagttcaacctgccccgaaataactcattatcttacctccttatttttttcttctcctttatttccttttctgattaatagtaccaccatccaacccagctgctcaagctgaaaacctgacgataattttcaactcccactcccatccttaaacaaggcctacagaattccactttctaactttcaaatctgttatctccttttctcactatccctgtcttaatccagatcttcatctcctcctgcagtgactcccgtaataaaggattttccccctacaaggatcttccctctctagcccaaacactggattacttttctaaaatgcaaatggtccacatcattcccttccttaaaaatattccctcgaaaagatccgaattctttaattacacaaagctttctaacttcacctctcaattcttctcactctctattcagtctagtccaaagaaatgcttaagtgtatttaaatccaccactctttcatacctctaccactttatctttgcctaggatacatttcctatccccactctccactcattttttatcaatagcattaaagaaagggctcctgacttgagcatgactttggagtatttctaaaatccgttacaactccatgattctaccagccaatactcagtgttaactattcattaaatcactattccctaaatactgtgaggcaggagtattattttatttaatttatctagcagtgtcagcagtgacaggcccacaatgattgaataaggactcccacatattagaagtaaccgctacatactatcacatttcggattaaattagattaaaaaaaaatctctacaaggatggggccattgtttcattcactactatatccctggcacctagaaatcgctctgacataagggcactaaataaatactttctgaaataattaatttaaattatgttccctaattatcctaacgcctgcaaactttcctttgcaaactcaaccttcattaggcttcaggtctcaagttgtgtggagttgtactgagcattaggaatgaggaaggagggacaggcttctcaggttggcacaggtctgtccagtgcatggctcaagtgctggaagtgccagcaaaactaagtaggctctgcagttaaccctctcgtaaataatggcagggacaacactaaaagtaccaaaatctgtggcgtgcaagacaaacgtacgggaatagacaaaagagaatcaaatagaagaagatacgaaagagaaaacgatgaaagatgacggttcaaaggagacaactgacaggttctagggtttaggacacctggaggtggaccattttgtgtacacctcgggaggcgtcgggtggcgatgggacaggggttgaaggaaagcactgaggggaaacaaggtgtgtcaccgcaaaaggacctcaaggttgtgtggcagcactcaccacctccccctgctccgcggacttgtacactccagacaccatctcgttatggagaagcaaaaacaacgcctcatccgccatttcctgctaattcttccaagcttcgagttttggctcccgtttgagctggtctgggggttccagctcgcgcctcagcgacttcgccggcgccgcggctccgtcaggccgccattctatccctgtggctaagagaccgaggtattcacacgacttcccaaaggctggtactgaaatgagtctggtactggagagagcccacacttcggggctaccaaatcctagggccgaactaaagtctgacgggagctctaaccaaagccaaccagctgagatgcgatccggccgctgggcgggggcgaaaaaaacaacttccggtcccctctaccccggcattcggccagctctatgatcactgagttcctctctcccaagcccggagaggccagcgcccagatatgaggaaggttcccctctcaccacgatgtcgggggcagagcaagataaaataagacctaaagctcccgcctggcccgggcgcggtggctcacgcctgtaatcccagcactttgggtggcggaggcgggtggatcacatgaggtcggaagttcgaaccagcctgagaaaccccgtctctactataagtacaaaattagcggggcctggtggtgcatgcctgtaatcccagctactcgggagtctgaggcaggagaatcgcttgaactcgggaggcggaggttgcggtgagctgagatcgcgccactgcactccagcctgggcaacaagagtgaaactccgtctcaaaaaaaaaaaaaaaaaaagagctcccgcggccacctccttgttaattagcaatagaagttaaaaaaattcttttggcttcatcaaaagcatccacttcctgccatatgttcttcaaatatgaaaagttgtagaaagagtttaaaatatacgttttcacagtgcaaattttttaaatattgaaaagttatcccaattcctattgaattaagcccgggtatacaaaaagaattagagccattttgaccaccaggaattttcctgttagtggggtgcaagggacaagggaagtggagcaaacgaaaaacaagatacacttgaaccggaaaatacagactaatcagaggattaggtgaaaagtgctatagaattcagaaaagcgatgtcactgcaggatggagttgctaataatctacagcagtgtgagacaactgtaggaattgtcccactgcatgtgcaaataaatacacatgctacatcatagtatgtacatcttaaatttggcaaattcaaccgtaagcatgttgcttagcctgtgattagttcttccattggtaattcacaaaacaaaatttttccccaattgtccctgttgttttcccccaaattaacataccgcaaggtggctcatgcctgtaaaatccagcactttgggaggccgaggcacggggggtgggggggatcacgaggtcatgagttttgagagcagcctggccaacatggtgaaaacccgtctccactaaaaatacaaaaattagccgggcgtggtgacaggtgcctgtaatcccagctactcggggggctgaggcaggagaatcacttgaacctgggaggcagaggttgcagcgagcagaaattgtgccactgcactccagcctgggcgacagagcaagacttcgtctcaaaaaacgaaacacacacacaaactcttcatgccctttcacaggaatttaagatcatgttccaaaattttaattgtggtaggttttttttttaagcatgtcccttctaatgtttgaatcagtttattccattcatcacgtaaatccagcataaaagctccacttaagcctttgaaaacactaaattgtgtaattttgaagagtattttgccatggtaatcttaatttttccagcactaaattttcagttatgcgaaatcaggtcctttatgtctagatgacattcttgccctcatcactaccatcaagaaaaaggagtccaagtccaccacacaagtcaaaaagtaagtaaatggccaatttatcaaagttgacttctccaaccacaataacatgaggcttttaaagtacgtttctggatagaaaggaaacttatttaatgaggacctactaactattgaacacagcatcctacttatccttctccataaagttaaattgccaaggctcctaggaatagatcctatggaagcaaggacagtgagtgtggtgtgtgtgtgtgtgtgttttgagacagagttttgctcttgttgcccaggctggagtgcaatggcactatctcagctcactgcaaccccgcctcccgggttcaagtgattctcctgcctcagcttcccgagtaggtgggattacagg

SEQ ID NO: 1241763 - DNA, 4001 bp, Homo sapiens
tccctccccgagggttcgcagcccgccctgccctcgagcgtgcctagcggccctgggcactggcgcggctctacccagctatgcagtgctttcccacacactggccgcggccactggctgcagacccgccgcggaaagggggcgccctgagtcccgctcgcaggcagcgcgccccgagagacccgctctaaggcatccccgcaacaactctgtgggggcattcaactcccccgtgcgccggttaagattcccccatgcctcctgcaatgcaccagaccagggaggtaaacatcgaaggcacctgcattgcgcccccactgggatgcgctgtgcgcaagagacggggaccgtctgctgcaaaaccggatgatcggagacgcagggagttaggagtgggttttcttaggactcaccttatgtagtttccacatggcccccagagccttgacttcgtggctggagtgtttgccctcctccaagcactggtagcacacgggcatcttgcattgcacgcagtacatgctgtggttctccagctcgtggtctgtgcaggtggagaccttgcgtgggctcagcctccggctcacacgaccctgggccgggggcaccaggcggtgcttggctaggggcccccggggcgggtggcagcgcaggcggcacggatcgcagtagaagacatcgcactgttcgcacatgacggtggcttccttgggcgccttctcgcagagctggcacttgagggccgcggctttgctctgctggtagcggtcaattaccccttccagtacgcgattcttggggaagccgcggagcccccggtcatccaggatgaggctgcggtgacactgggggcaggtgatacaggagttgcggggcaccggggccagggccggtgacaagtgggtggccggtggcggcatagccgggggaaacacgcggacgccgttgggggacttctggcacggggtagtgggggcgctggcgaaccccccgtaggagccatagccgctgtccgcctcgctgtataggctcatcttgtccaggtccagatagtcatagtcggagaccccggagcccgcggcccgatggctctggggggattcagactctggggtctgcaccaggatgttgcgggcgcacgcctgacacaaattgtgagagcagggcaggatgatgggctcccgatagaaggagccgcacacggggcatttcaactcctcttccatctcctccatggggaccggtctgggaggagacagcgacggctgcagcgggtgcctgagctggcgaggtggccgacgggcccgtcttgtccagcaccctggccagcggcggcggctgtggtggtggtgccttcccgcgcagcactggcacggacacccagagaggcgctagctctgtgagccgcagccgcgtagccgccgcgccgcgcgccagcccggaccgcccctacctgccctcctagtcccgccccggcccatgagcagcggcccattgggcggggggcaagagatcgaagctctcattggccaccagacccgtccgtctcctcgtctccgcaggccacagggggttcggtagagtctgaggatagggcagtcttcgctcgcggctgcaagatctctgaagggggccggcgtgcggaggctaggggaccgggaaggaggagttaggcgggatgattcatcctcgcccggcttacttccgacctccggtgcagtctcccaggagctgggggcgtgagaaacccctccccgcagcgagtgggctgccggagggggctggggcttctcgccagcgtttgcgtttggctcccagctctgagctccgcgcccacctaccgcgggcgagtgctgcgcagcacggaggacgccccttctcttccgctgctggcagccttcgcaggcgtctcacccgggcctaggcttctgcacggcagtggggcttttctccttctccgtgaatccgctgacgccgtgccctggagctcccccatcccgggagtctgacggcgctggcgcaagccctggcgacactcttggcttctttcatcctgcgtccctcgtttcctaaagagcatgtataaagtcgatttcctagtgtcgacatgagattcaactgggtaaccgatggaaatggtcagcattagtcagaatctatgaccccttcgtttcatgctttaaattatagctcggcccagaggcctcagtgccgtggtgtgaacgtgcttccttccacggatccttcttcctcctcgcggcctcccaaagcacctggctgagctttttcgaggcccgctgggcctttggttcggttgaggcaagaacagtttgtctatttctgagtgcccgtagtttagtaaagctctgtaaatgaatcactgtgtgactgcggagtctcagtgtttcactccaaacagcattattcaaccccacgtgccctgggcatctgccatagcttacagcatcgtgtgcctttctgtttcttccaacgaggggcatggtgaggcggtgattctagtgttagtccctgtacaaggagggagggagggagggaagaagggaaagagggagagagggaggaaggaagggggggggaaaggaaaggcggaaggaagggaagaaagggagggaggaagaagaaaaggaaaggaaaatctttgagtcaagtgacattctgaggtagtaacatttgaaatagtacatagccggcttttgctgaatgattcatgaagtaaaggacaaaaactctttgcaagttctagaaatattccaattttccaccttccagacaggagataacttgattatatgcagctatgttgataatttaaaagtactttattgtccagaaaaaaaatggacattttattacactgcccttgtagaaattgtccaataaactaggttatcttttcaacatctttagttgcagtgagaacagtagttgatcattgtgtgggggaataaagtccccattgttatttaaagccatgttaatcataaatgtgacgtgatttatttttaagctggctttcaactagttgagaccagagcatccaaaggtatatgcactctgtttacagacatagataaaatttcttcaggtatggttgggacattagctgcacttgcaggatacacttaatttataggtcccaagagaaattactaataattatattcaatatagtattaattgaattgtaatgaaagttaattattgagaaaatattagaaaggagtgtccttttatggcttttgtatgcatttgaccacaagtcacaatatcttggaccagcaaggtgagcagctgttacactttgtatgagtttgaactctgcttataatagtatatcatctaagagatcttattagcagaaagtttatgcttagttcaaagtaaagaagaattttagaggatgtctcatggtgtaatgcagtgttgggttcgcaaaaagaacaacacaggtttataatatagtcaatatagaaagatttggtctattatgaagtcgcttgagatgatttcattgttagatctgtttgtttaggaattagctaaatcagtcaatcctaggagagctcttaaaatgactcatttgttgagagttcaccctgttccaaacaggggatttatttatttgtatacattacttggttaaatccctgtaattacaagaagaggtaggcacaattattcccattttacagataaataaactgaagataagcaaagacacttaagtactcaaggtcaaatatggtgaggctgggattggaacccggacacatataagtttgttcctttgttcattcattcattcattcattcattcaacaagtgctgagttctactctcttcaagctctgaatgtgataagtacccaaaatgttctttgttaacttctatgatattctgctcaccttctctgaaagtttactttttttttccttttttttttttgagactggagtcttgctgtgttccccaggctggag

SEQ ID NO: 1241764 - DNA, 4001 bp, Homo sapiens
gcaaaggacaattctggcataggataaacaagatatcatgaccaactggaagtaggagatgaaaaaagacataaaacaaggacacgaagatttacagtttaggaaactgagagtgaagctattaagaatgagaaaacagcacatttggcaggagaacaaaatgaacaccaccttaaacctggaagacatccaggttgagggatgcatattctctggcttagggtctaaggaacagccaaccgttttcccctatctaggatacaaggagcgaccagtcatttcccatagttatccagcccttctgtgcttctgactgccctcaaggtcccatgctttcccccacacataaagaagccctttcatttctatccccaaagctgtctcactgatgcacctttatggcatggggaacgtaaagcggtaaaatggatttcggtagctccccagtctattcttccttccatctaaatagaccccacagaaattcaaaacataagcattatctttctatcaaacaatctttcccgatttctaccaaataaatatgaaggatctgttaaattagcaattaaaaaaaaaaactaagccagaatactaatttattaaatttatttataagaaatacaattgtcaaagcagcagctctcacccaaaagaacagcccattatctccctggagcagacttagattgaaacttaaaaactgttttgatccaaacattgcttactaaaatgccaagaaatcaaaatagtaattaatggatagtaactaatgtagccattgattaccatgtaactctgggtcactattcattagtaaaacgagattgaggacttcaaaaatgagtgaagattgctaagggtaccttaagaatagggttgtcttccctattctactgtcgaaatatgggcgaaatgggcgattatacacaaaaatacattctcagctggaacgctataatgtatcatcacaataaggaaaagtaaaaaataattaaatagaaaaacatggccgtgtttcataacatactcaagacagaaaagagcaaaactcaccaagtgtttaaattatgagttatttcaactgttacaaaaatagaaaacagatatacaattctttaaactgggtcagaatacaggaagatgttaagaatgagatcagcccccaaactgagggcaaagtggtgggcgtggatcaaccaaacgaaaataaactcgacttaacgtaggagcagtttcactctactgtactttgagatatccagaatatttaaagagaggagaaccaggactcttcccctggcccccagtggtctttcatcatagaaaatctgttgagaagaggcaagaggaggtgtgtgaagaaaaaagggaggagcagcattcctttgcgacctgtccgcgtctcctgactgatggaagtagggaccaaacggacgttcccagggtcttagaaaagccctcccttccctcgctccagctgttaccttccacttcctccgtgccctccatcagcatatcctttgtaaagtttgatatctggccagtgagggaagccaggctgcccccgacttgacccagagactggcccaatccggagccgaggcccccaagccaggacgacatcgcggcgagtttagagaacgacccggtccgctcggaaaaaagaaaacgtttagcgccgccgggcgatccgaccaaatatccttgaacgcctgccttcgcgagacaggatacgataacacaaagctgggttctcaggcaaggccgactccaggttctgcctagaaacgcagaggcctggcctggaattttaccaggggcccgcctctagtgacacagtcacctacggagggccttctgctcattcccacgaattcccaccgtccagattgggccacttctttctcagctctaatgactttcctcagttccgtgggttactcctgccaactcgacgccggccgccatgacactcgctcggaaagcggcagcggatcatagaaaagcgccgcggtggcgtagacaggccccgcgaagccgccggacgtgtccttggcgcaagggaggctgggatcgcggaggaccgagcgcgggctggattaaccgcagccagtgcctagcgcaaggttaggtgcatgcaggcggccagcttcggccggggaaggaatggcctggataactggggcatcgcggcgctcctcggcctcctgcagctgcgtttcaaagcagagccgacccttggtgggtagtccggggaccctgcggaccctccttgtgttgttgaaacctagtgttttaattgggactacacccagcagtgccgggagacttggcggggacgttccactgcgcaggaagtggcttcaaataacttacacgcgtcactgtgtcgattagctgctccgtgacaggcactatggtaggagctgaggctacaaagatagaacggatgggttgcaaaaaaaaaaaaggaaaaaggaaaaaagaaaggatgggttgcaaattcaggtgtccaagcaggaaacacaccttccttctataggagaaatctcctctggtggctttatagctcacaattgaaaccctaccttctttaacatacgatgagcttttttcatgaagctgccctcacccaagtagttgaaaaacggacaaccgtttttcaaaatgactcgttagaagacagcagggcaacttaatagagaagtgccgtttagtgtcaacgctcctatggtattggcggcactagctatgcaagtgcccacacctccctcagtccttagttacccacactggctgtaacacacagagtcctaccttgcttgcttccttccctaaaggaagaaaggttgtcatgtgactttcaagcaattggtgcaggatacgtggacacacagcatctagccagggagacttccacattttttggtttcaaaaggatatgatagatctgcagttcttttaagcatagcaataagtatactggcatctttcactttgattatattcacaagaggggctatcacagattgcacagtttgtgaacagaacattgggaatgcctccagtatttgggatctgatggcaccaggcagtagtaattctccgtgaaagctgaattttttttttttaaattttattttttgagatggagcctcgctctgtggcccaggctggagtgcaatggcgggacctaggctcactgcaacctcgtctcccgggttaaagcgattctcctgcctcaggctcccaagtagctgggactacaggcgcccattcttcattttactaatgagaaaccagtgcccagaaatgttaagtaacccatccaaggtcatacagctagtaagtgacagacccaggcagtcaggcgttggagtctgcacatctaaccgctgggctgtgatgttcacatgaatgcagggacagcatttaataaacacttccagaatgagatgtgaattttattttaagcacattcagatatccagtgtgactccgggatgtaaaaaaaaaaaaaaaaaaaaaaaacagggccgggtgcaggggcttacgcctgtaatctcagcactttggaaggccgaggcaggtggatcacctgaggtcaggcgttcaagaccagcctggccaacatggtgaaaccccatctctactaaaaatacaaaaattagtgggatgtggtggcaggcacttgtcacgggcatccgtgtgaagagacctccaaacaggctttgtgtgagcaataaagctgtttatttcacctgggtgcaggtgggctgagtcccaaaagagagtcagcaaagggtgttaggggtggggcagttttataggatttgggtgggtagtggaaaactacagtcaaagggggttgttctctggcaggcaggggcgggggggtcacaaggtgcttggtgggggagcttctgagccaggagaaggaatttcacagggtaatgtcatcagttaaggcaggaatcagccattttcacttcttttgt

SEQ ID NO: 1241765 - DNA, 4001 bp, Homo sapiens
agagggtatgtagctcaagatctagcttaaagttaacatgataaaatgttctgcctctgtaacttggcattaaaaaaaataatttttaaagctaaaattaacaatttgcaaattcccttcaaatacatgaatattactatgacacacgtaccaattaaatgtttgaaaggcagctgatgatctcgaaggtttaggtgtgcaatatgtccaatcctgctaaaccctgaagttacatcttgaccttcaggaagcacagctctcaagatttcttctgacttaaagtgttcatatgttagttccaaattgtatttagagatctgtggactgacattaagctgctctaaaacactgagttctgctttctcaaaggaatcatgagtaaatattttatagggatccaacatgattagtctactttctttatcttccggatcttcaatcacacgtcttatgcctgggcgctgcaatgctgccctttttagggatcgcatcaatttactgactatttctttcctcactttaagcactggaatgttgactgtctttttaaaagctgttctatcaagttttgtcatgcctcggacatcagaaggtggtgaaaacaattcagtctctctctcatgtgtttctgtttctggcatggttgagaatctttttctttgacccaataagaaaataccaggtgcttccaaaagcatctgtgtcagggatgtccaagctactggaatcaacgattttgattcagttatgctatggctttccagtttcagaaatcttcctgagaatccaaatggcctccataagatccttaaaaaaaaaaaaaaaaaattcacacacgacagcttttgagaataaaaatctaaattctactatctcaaataacgggctaaatgctgacaaataaaacgtttagtgatgtgtgggaagtatactatcttttccagactaggatgacttcttcaggaagtcgtattagtggtagataatagtggtatatattaaatttacaccttcaacccatctgctcccagttcagagggcttagtgatccattagccatactcaatgatcctcttcacccacaattttctagataatacatttgggattggaagactgaagtatgagttaaatggtcatctgtaaatgaaatagtcattatacatgaccattactagtggtgatatttattaggatagtctcatgggtgcttattgtgtcagatactgcgctaaatgctttatgtacattatgaatcttgggaggtgtgcagtattgcaccctcattttgtaaataagtaaactaaagctcagacgtaaggtaacccacccaaagtctcccagctgataagtggctaaacatggattaaaacctagttttgactgacttcggtgcttgtgttcttaatatattgctctgttgtttgttttcgatgctttactgccacatgtcctgcctttaactagaggcttctgtattttgaggacgagagctttgctgattgttatatgcatagtatcagttattcactgtcttctaaaataccaaagaatttacttgtaaggggaaagggccctgtcccagaatcctgtaaagcaacgaagtctaacttcaccgtcagagatcaaattggttctagcagctgaccagctgggtgaccctggataaattactataagtctcggttttcccaccagtaaaatgtggcgaaaggcttttgaaacattccttactatccagaacctcgaaactaagctcagcacctaggcgggtgggtgacctcgcgatgtttctgtgcccaggcagcacatggcagagagcagccctgggcgggctggtacctcccctggaccattagcccctaacgcggccgccacctcaccaaagcaccattccaattccccacgtcgctctgcagctggatccgcgagccgacccctcacctcccgctccggtaccgatcggatgtgggtcgcgggtggatgggcgggtcttctatgacatcatcactgttcgccgcgaagagggcgcgcgtcatcagatcaagtcgactcgctcctctccttccaggccctggtgaagtacggaatgccggaagggccgggctcaaagctccgcctctggcgcgaccgacgactggagcgcagggcaggggtagaggctcgtagatggaactggtagtcagctggagagcagcatggaggcgtcctgggggagcttcaacgctgagcggggctggtatgtctctgtccagcagcctgaagaagcggaggccgaagagttgagtccgttgctaagcaacgtaagtgggctgtgttcgcttccccgcgctgacgccctccggcttccctcaagtgcctgccaaataagacccagaaaaggaggaccgcaccgggacaggggagatgctggagcctgaaccctgggggatggggtctgaaggcagccgccgagattcagatgagattggcgcagttatgaacgtgatagcagcctagcatactctagaaagaaaagatgaaaagcgtcgggtggaagagatgcagcgttgagtggaagctgcgaacatgatgggatgagcggccctaggattatgtactcactgctgttagttagtatttttgtcaccttattttctccaccagtctcgtgaggtctttgcaagagtcacaggattttcctcttccgacttagtcatggggggagggaaaataataaacattttaatacagaaattcttagcggtagaatggaagtggcttggtagtaagtgcatagcacgttcctgaccctaaagcctgtgcagtgggcactccgctttttaactcgagtcctagacactgttcccaggactttgttcccggtgctgtttgtggggagggggatgttttcagggatactgccagaacaacgtgaattgcttctgtttataatattgtcattgcaagatattcctgaccatccttccagtttggtagaactaattcattagatatataagtagagattagttgtgcagtcctagtaattgaggagaaacaactgcccacagcagtcccaggttgactcagcaattctttagtaatcacatgagctgaggccttatccctcctctctctccccactccattcccatcctatcttcatctcttgcagtcacaaggttagtcatggcccttcctgaactctgcctgtcttgtgtactggtggaaatcattttcctaagaaaccctagattcctggagctgcagtagtgggaggtgggaaggaaaggaaaggaaattagtgttggttaagcaacgagtgtgtcatacaaaccctggtggtttgcagcttttttccataatctttcatttatggaatttctttacgaaattttaacttcaccgtccaaacatttaacactactaaatttgtgtgcttacaggaacttcacagacagcgatccccaggtgtttcatttggtttatcagtgtttaatttgatgaatgccatcatgggaagtggcatccttggcttagcttatgttttggctaataccggtgtctttggatttaggtgagtcttcatattttagcatcaaatttttttttccattttgataatatacggagaagtagagagatagattccagaagctgctattatacaatttctagttagttatttctggggttttagcatttttcttgttattcttgttgctagtgtgtaccttggagggctactacatagcttcttaaatacacagaagtgtgactagtttttaaaaatgggaacttgatccacatttcatttataatgaaatatgacacttaagagtggcatattcattgtatctccttggccaaagtgaatcaaagccatgcagattaacttccaaatagcaattttgtgagtgcaaatacaacacataatcttttcattcctcgctgtctctttgtattgttaagtagtcttatttcactttcagaggccagacatgtgttttgtgcctgtt

SEQ ID NO: 1241766 - DNA, 4001 bp, Homo sapiens
gaggggacctggcatatctgaggaggccaggagaaggtgctgcttgattgagctctctcgcgagagtggggcaggggcggagaggccagcacccaccacaggatgcacaggagcagcagctgatggagttggctaagtcctgctctccacccctcccacccagacaccccagggagggacatggtgacctgcagccctcagaaagccagcatggcagtgctaggcactcttcgtgaacctggaccctagctctcctgcccgggaggaacacgccaccaacaacctagatgcatcagcgcctggggccaatcttggcttcaatcgccacactgggcggccccagcacctgtatatgtgcaggggttcccacagcccaggccctggactcaacaatggtgctcacattcattggtagcaggtgaggatctgatcatggatgaggatggggaaggctccccacctacagtgagctcctcggggtagccctggcctctttccagaaggggcaactctctctgcttcaccatcagcacggaggactagaggttgacggtcagtacctaggacagcgccaagcatcaagctggccacgccccaccaaggcaagcaggaccctcactagagcaccagtcctccccagctcctcctggtccatttcccaccacctctcactccagttacagcaccagcctcctaacgggcttctctgcctccaccttcactccctgctgtcagcatcccggaaagatgtgaaaatagaaactgaggagccacatgtgtctgtaggaagggcaggctggaggctctgacctccacctttgtgtcaatttctgcgttaaactgaggcagcctgaggaactcaccagactcacagaccacagagccgggccgaagctccaacatcatggtgatgagggcgatgtctgtggagtagaggatctgcgtgcggtgcggcaggttcagcgtccagagctcgggcgtggggtgcagcacatacacccagccacctcggccgcacgtcaccttggagccgaaggggcggccgataaggtcaactgagtgccgcaggacaccatgccgggtctgggtctgtgccccacgctgcacacgcaccgccaccattgcaccatggcccagtgacaggatggccgtgtcaccctccttgatcagctcctcgtatgccacgaagctcatggtgctaatgtctggcaagggccaaggacctggggaggggtgtgtgtaggcatgagcaagtcaggaggcaggatgagggcctagggtctaggtagaaggcttcgaggcctacatcccagcagtgggcatgggcggggtgtggctagctcagcctcagtctctgccactgcctgacagggagcccaatagcgctgcactctggcctggcctctgaagcctttcttggtctaggacaagagacagggactatgagcctaaatcagagatgaaaagactgaggcttggcaatggcggagttcggtcccaaggattcccggagtgaggacccgaccctcccatcacccttctccaggagcttgactcccattcccaagatgtgagatgaggaagcgcctttgcgaggtgtccaccggcgggggagaggcaaatggtcaatgaggtcacctccaagccaggcttgattcctcaccccagtctcccccacgggggctaggtggcagggtatgacagaggattcagggctccccagtaaggggctggggacgcggagctggccgtccacgcaaacaccgcccagccgatgcagaggcaacaaggggccaggccgggccggcgggggccgcccatgcgaggctggagggacaggccctgcgcgccgtgcccggcccgggtcaccctcacccgcgccctgccaccctgtaccccgcggagtctcacctgcgacgctcctgctgccggggctccacacgtgcctccgcgacgcgcggcggcggcggccacaacacttccggctccgcgcccgctgatgacgtcgcgccccgcctccgcctccccctccccccctccgcgcacgggatcctgggagcgccaggctgcccttcccgcccctcccagaggacgtttcctgggcgacttcttccctcatgtgagctgctctgtttacatttgctggtcgctggaagatcgaaagactggacaaaatccatatggcggccggccggcgcggtggctctcgcctgtgatcccgcgctttgggaggccgaggcgggaggttcttctgagctgaagagttcgagaccagcccgggaaacgtagtgagacccccaccatctctacaaataataacaaacaaacaaaaggtccccccgccccgccggccgcgggttgccgtcgcacccaggcacatttgaagggcggcaggagccaaggcctggctgtcactgctgtcccggacccctttgacggcccctgggggttcaccagagggctggcccgtggctcactgcccagtcctctatgaggacacttcgccatagacattttgttattgcagactgctctgggaacacccctgactgggccctaaaatgaattccagaaaaggaatcgcaggtcaaggggcggttctaaaaggcttgggctagggtcagccagagctctgtgcagcagatgggggcctggaaaagtctgcagaagtggccttccgcccaggccctgcctcccccgacgggggcacgttgtcctgagtgcagagctgcttctaggagggagtaggggtcctgtgtcccctcctgcgaaccaaggcataatgagaactggatgacttgggcccacttttgggtctggtgagcagcctgggcaggagactggaggaggtgctgctggaggatgggcagaacagggaagcgggagtggcgttctgtctcagcaacaccattcccagctggctcctctgtggagtgtgtgtgcaggggagcgggggcaggggacacggattttcttcctccagctcttagctctcaggaccagagcttggagaggaacagagacccccctacccagcctagggtttagcctgcgcccgaacccaagccagttagcaatgaccctagggcaccctccccagtcactcagccactccagcctggtaagatgaggtggccaggctcctgcagagcgagctcccctctggagccctggcagcctgtagagcactctcaactctctcgcctctggggcaggccaggccaggctgtttgtggcccttgcattggcttctcagggtccatcatggaaacctaggggtccaacctcagcccctctgtgtccctgccctagctgcggctgagagcccccaggagtaagctggtgagaggccttccatggcctcccactctctgtgggctcctgtccctgtggggccaccacgctggccaccagctgcctctacttctgccttacagcctccctgccttctgctctcaacgttgaaacagccccctccacagctcccgaacctgtgttccagcggatgcttctctcccttgatgatgcacccgcctgagtcaccccctaatttctcccctgggggattctgactttccacttctcttgggtttctcttccccagcctctcagctgtggttggtgtggagtcagggccgggtgcctataagggcctaaggtaggacttggtgactcggcggtggtttcccttggttccgacttccctcttgcctctctgtctattactggctggtcaactcctccagtgccccttcctccaggcagcctcctcagccctgcccacctgctccatctgagcctgccccagtccccagcctgagtcctcaagcagaaccaatcccccctacctcagctgatgattccctgtgcagagtttgtattggggctcccctaacaagagctgatgctgtatatgcccagctgtgccatctcattgacttctccccaggatcctaggagggagggaacactttacagatggggaaactgaaactcagaga

SEQ ID NO: 1241767 - DNA, 4001 bp, Homo sapiens
acattcagagacctggcatattcatttgtttatttattcacttaagtttttttttttttgttttttctgagtgtctaagtagttccagggtttcaggaattcggggttgaatggcagttccctatgttagagaagcttgtgtcctgcttgagtgggcatgcaaataaataacaagttacaagaaagtagacaatgtctaagggctagggttaggttcatgcagagaacgctgttgggaaggggggtatagcttacccagcctgaaggtcatgggtcaggagaagcttcctgcagggttgatccaggatctggatctgggagtaggcattagctgggtgaagaaatgggtgaaatgtgcttcaggcagaggggccagaaagtgggaagaaaggcaagggcagctgtaacagcagggacctttggggaagtgccagaagttctcagcaggagggggaagttagagaaatgaggagcaatgaggttggaaagacttgactaggtcttgaaagatctggtaggctgcacaaaagaattttattctagaggtgacaagcaacctatgtagaggtgtaatcaagaggccattacaccttttacacatcttattctgtggtggcagcatggagaatgactaccacactgtttggaggttattgaactaattaattcaggtgtgctaagacactaggatatctctgagcacagaaatatatctctgtgctcaaatattcatctactgttaaatagtcttcatgagctaaattcttgagaaaatctagaggtgcaactttcccatttcttttcatctatcaacattttctttaataacctgcatttttttttatcttaactggatttaaccagcctaggttgttttactgtcctttctttctgttctctttttaactaatcaagacagactttattcccttggttttgtctacaatttcaatgatcactgatttaaattgctgttaagaaacaggttgtgtgtgtataatcttatttaacatcaggtttctaatctggtaacatttaacatgcagataaatgtactatacttttatgaaatttcatttctttatacctctatcacaaagcagggttctggacgtactatttcactggcagttcacatttgagtaagtaacttacagatactgtatagacagttcattttaaaaagggcccctgcttaaacctttgtcaacaatttgatgaatcagcagaactgctaagataacctcccatctagagaaacaaaaaggagaaatacatatttttgcaattttttattacccaaggtaagatcaaaaaggtcagttcctgagatgccattatccttattaattcaaataaaacagattcaaccagggttaggcaaagtgctgaatagcagcttgttggaaagaacagctctcacggtcattgtacaccaaagttttgtaacattttcctgtgttgggaatgaggatgtcaacaatgataccttcccaagtgtgggcgattaagtttttagcacacacacacatctacacacacagacattcactcacacatacacacactcacacactacttcgggctgttattgagctgcttttgtgcacttcgggccacctctgcagatgcccttgatctctgggtcctaccctgatctctcccgggtactcacagagtctgcgtactgggcggtaagctggggatgcgttgaatatccttgcaggtgactctgaagtcctcctcctgatggcactcgcagggtggagacgaacaccccattccgcccaggtccctgggcaggtcgagcagcagcaccagctgcagcaagtccgccggcctcattttccacgggactcggggctatttctccatcctccgaaatcgcctcattctcagctctgcacctcgggttaccccaggccaaaggagacccgggagcgggaggggtgggaagagggagggctccaaggggctgtgacctcaccactgtggaggaggctggagaaggggaaaaagaggcacttaagtgctccgcttccctaggcaaccttgacccaaacaagtctgcttgcttcactttccttggctggacccacgcagtccgctccgtctgttccctgacacccaacaccagtcctggctgtcccctctgttttccagcccgcccccccaccccgggcgcccctcccattagttctctccaaagcctagtttagatgccccctcctttcctcctctttaaatccaaggagccaccttccctagcgtgtagccttctagacaccctgtctgcctgggagccactcgcacgcactccttatccagagaaagtccccgcggagtggactgtccgcgggcggaccaatgtcctgcagaacttcagctcctcctggccagagacacctctgctgagggtcagaggcgggcacgcagccctggctagcccgcggtgcggccgaagccgtcgccctgcacccctggaggattctcgttgctatccaactgcaggggccactccggtggttgagtcgactggcagcggccgcctcacgttgcagcccgcggctccgcgaggcaattcaggaactgaactttggggccatctgctgggaagaatcgggaatggcagaaataattccaggttcccttaataatgggtccagtatggaaattctggtcgacccaagaatttcattgagtcatattccccctggaagatgggaagaaaaataatacttaagtggcatactcaccattcttcgcacagtagccaaaaagatcattacaaacataaatcagattgtgcctatttccttcttaaaagtcttcaatcacttattcctcttgggataaaaggaatgtcaattccttctatactgcataattccttttatatgaacttggctaggacaggaaggaaaaagttgtggttatgggaatcagaataaaggttaggaaagattgactagaaaaagacaggagggaacacacagggtttccatatcgtaattaggctggaggttaagtggatgtatacatttatcaaaattcattaaaccgtacatttaaaatatgtgtattccaaattttacagaagctttattcataaccactaaacgaaccaagtgtctcgcgactagataatggataaacaaactctgatacctccacattggaatactattctgcaataaaaatgaatgaactgctgatacaacatgcacaaattttcttttctttttttttttcttttgaaacggagtcttgctccgtcgcccaggctggagtgcaatggcgcgatctcggctcactgcaacctttgcctccgaggttcaagcaattctgctgcctcagcctcccgagtagctgggactacaggcgcccgccaccacgcccggctaattttttcgtaattttagtagagacggggtttcactgtgttagtcaggctggtctcgatctcctgacctcgtgatccgcccgcctcggcctcccaaagtgctgggattacaggcttgagccaccgcacccgggcttttgttgttgtttttttaaaaattaccatggtattgttatggaacaaatcttgaatgcataatgttaagtgaaaaaagccaaactcaaaatattacgtatttatatgtaattattcatattaatgattcatttatatagctttctcaaaaaggcaaaaccatagggacaggaaaaagatcagcggttgcaaaggcctagggtagggctgactacaaatgaacaccagagaattttgtgggtaataaaactgttttaaatcttgttcgtggtgatggttccatggtagtttattaatgtggtgaatcatagtgatcgattttcgaatgttaaacccaccttgaattgcagggataaatctcacttgatcatgatgtatttatcctttttttgtttgtttgtttgagacggagtctcgccctgtcgcccaggctggagtgcaatggcacgatcttggctcactg

SEQ ID NO: 1241768 - DNA, 4001 bp, Homo sapiens
gtgtatcaggcaaggtttggagcctagtggttggccctttatgccttccatactgtttattataggacaggagctagtgtgtgagatggctctggtgtgggaagagcctttccccagggttgggaggcctaggttgggtgacctaggttggatattcacccctccctgtgggtcatccctgaaggctcagccctccttaggtagccagtaccttgcactcctgggagatggtatggttagctgggaaagtgacctccttctgagtctctcttagcagctttttgagattggtgtcatcaaagggcagatgggcgaccactagagtgtaaaggatgacgcccatgctccaggtgtcagacaggaaagggttgtagggcaagcctcgtaagatctctgggcaagcgtaagcaaagctgccacagtaagtctggctgaggtgggaaaagcagttcacttggcggtaagaagggctacaacccacaggctggttagaaggcaccatcttggcaaagccaaagtctgatatcttcacattctcccacttgtccagcaacaggttctccaactttaagtccctaccagcagcagaaaggctgggcatcaggctggggagagggcttagttttagactgggagctgaagggccaggggtcagagggtaaagatgaggacagaggaagtgggaggtagaaaccattatgagggcacaaggtagagaggaaggaaagccatggagttgtgagcagagcccaaagtagggagagagacagaggatggtatctgaggaccaccgggagctcaccattgtatttcataaaatgctttgcatacagtgagtactttatcagtatccttgaccatatgattaaaatagagtgcatgaataggctagatattgaggagggagttcgaaagaggaaaaaaggacaggaaatgggagatgtgcataaaacccccttgagggcaaaggccccagtctgggtggcagcgccctcaccggtgcacgatgctcttgctgtgcaggtaggcaatgcccagggtcagctgggagaaccacttgccagcaaggggctcagagcaggccccgtagcgctggatccattcaaggacatcaccaccctgagccagttccagaatgatgtatactcgagatgtgctctcaatggcccgatagaagttgatgaggtacttgtgccgcaagactttcattacctgaccccagaagaaggacccatcaaacctgggaagggagaaccctgactgcactcccagccgtctcctaccctcagctactgacttaggactttgcaataggatcagcccctcaaccccagagaactggtggcctgtgggcaaatgctatgttttgtgcctttactttttggggactgaaggtgagtgggtggatgggaaagaggtttaacttacataaagtttcctagctgcttagtgagacatttcagttctggtttaggggtttctggccccacccctcctggccataccccttctgagaaacctcaagcagcttagtaccaagctccagttccctcttccagccccctttccaacctgtatttcacggggcaggaacttgttaagatagtcatcagaggccttcttctttgagatgatcttgactgccaccataaccttctgctttgtgtagaaagcctcatataccgacccataggagccatggccaatggccttgcccacctcataaccatattcatccatgagggaatggtaggctgtggtggttggtgctgcctctaagacatctcccttccccatggtgttgggcttgctgagagcagggagctttactacttggaagcctcctatccaaaggccaacaccttgagctgctgaaggctagggtatcaaagtgaagtaggtccccaaatgcttgcctatatagtcacacgagtctgggatgctggactcagccctccactaggaacttggagggggaaagaaagagaagcagttctttttgtctccactggctgttgttactttctccttttggttacggaactcctcaaggtcccatgttccgaatacatcacaatccacctcctatccatcgttggccacaaaacttgagaatgaagtgcggccgggcgcggtggctcacgcctgtaatcccagcactttgggaggccgaggcgggcggatcacgaggtcaggagatcgagaccatcccggctaaaacggtgaaaccccgtctctactaaaaatacaaaaaattagccgggcgtagtggcgggcgcctgtagtcccagctacttgggaggctgaggcaggagaatggcgtgaacctgggaggcagagcttgcagtgagccgagattgcgccactgcactccagcctgggcgacagagcgagactccgtctcaaaaaaaaaaaaaaaaaaaaagagaatgaagtgcagttggaaacgtactcattcccagaggcaccttccacagtctggtgaaactcctaaagatcagacctttcattgatatatgagtacctactaagtaccagacactgtgctgaatacttggataaaatgtcacccaaatgtcatgccagacccttcctccttcctcaatccctacatacaatctttcatcaaatcctgtctctgctatctcctacttatctctttaatgatacactcaaggctttccgagcccattgcagcccccttagttcaataaggccaatagagacactatgatcctaaagcttataatgcagcatgagaaatacgagtgtgaaagtattaccattgtaaggtattgaacatgttctaggaaaatctaaccttgaaatgcatccttatcttctatgagccagaactctctagttttcctccacatccttctggtcactcctcagccttcactgaagttatatctttctctatccatcccttaatcatatcccaagtgttacatcacaagctttattttctcaaaccttcacatcctcccttaatcttgtccatacccatggtgtcaatactacatttatgctgactgctcctaatttcatctccatcccatatatctggagtttagatagagcagccagtattacgtggccatgtctgccccaggcatggaacttaccatatccatctcaaacttaaccatatcaataattgaacttattttcttctctcagacttttctgtgagttgtacactaatcacccttaatttagacactcatatgtcatcccagaccctcctgcctcagtccctacattcaatctatcacgaaatcctatctcttatacctcctgattctctctttgataatattctcatggttttctgagcccactgctaatcccttagttcacgcctccatcatcgaacagatggcccccgccagccttctgctccactccagtctgtccatcccaagtccaaagcataaatctgattttatttccatttgaaacaattcagtgtctccccattctctttaggatcaagtccatccaaattctttcacacagctttaagtctgatcctgcttacctccccaattttattttttaacacacacgtaatgatccacaactgcttttctgtatttgtggcaaactccaaatcttccttgagaacttggcataggaccttttttctctttttttttttttgagatggagtttcgctcttgttgcccaggctggagtgcaatggcacgatcttggctcactacaacctccaactcctgggttcaagcgattctcctgcctcaccctccctagtagctaggattacagacatgcaccaccatgcctagctattttgtatgtttagtagagacagggtttctccatgttggtcaggcaggtcttgaactcccgacctcaggtgatctgcccaccttggcctcccaaagtgctgggattataggcatgagccaccgcgccccgtctgtttttgttttgagatggagtttcgctcttgttgcccaggctggagtgcaatg

SEQ ID NO: 1241769 - DNA, 4001 bp, Homo sapiens
caaatgaatccattccttctctcctctactgttatatcatactcttatttttcttcatacttatttaaaatcatgtggcctatcattaattgtctattgtctgcctccaccactgaaatgtaagctccaggatggaaaggcctttaatctgttttgtttcgagctacacctgagcaccagaacgggacttgggacatgataggctctaattcactacacttgattgaattaactaactaactatccctgttctaacaaatacatatgtgctatacttaatttaaaatcctatccagaatgaagggaacagactagcaccctctgcaaattttattgtattatatccaagacccagcctgcagagactctgattttaacagtttagcagaactcaaaattctacatttttaacaggcaccccagatgactgtaatgaaactgtctgtaaaacacactttgagaaatatccatttatacactctttttacactaaaatgtctttaacaatgaaatcaaagtttaccaccatctccatgaacagcaacaccattatctaatccttttcctcttctctacttcactcctttattccattcctgcaccgaccccaccccaagataacggaagtatcctctcccaagctgcttaggacatttaccacaaatgaacctaggaaaagacaattctcataaaaaattacaaccaatttccttttgtcctgcaatcaacatggctgcaaattaagagttttagagaagggcttattgattggttttagttgttaaaccaaacattcaagaagttgtttggttttattgtttggttttgttttcctctggactgaatgtttttagaaacttattttttcatggcaaaatcaatacatgtaagttgttaaaattcaaatagatacatgtaaaaaaaagaaagtacaaaattaccccaaagaacctcagtgataaccactgatttgtataccttttcagatttttttctgtgcatatacaaacatatatacacaaataatgtttctaatatagaaccagaattgagaatctctgatttcagccagtcacagttagggaataaaatgaagttaatccaaatcagctggaacactctaaaaagtgttactattttaatgtacccaagaacaaagaaatttcaccagtatttaaatttgtgcgttaaacacctttaggcaagttacaagcctgtcatagttctaatatttaagttacaggctgccttagaacgaagaactgagttcctgaggtgtaaggaaaatcatgggttcttaaaggcaaagagccaagcaactagttaacgcctccctaccaagtccaaaagactagtcttacctgtggactatgtggagtctggacccctctgcatcagaccccaaagtggaattacacaggttgaaagaaatcaaaactgaaatcctaaggggagtaaccaggacacttgcagtgcaggtcattagcgtgattgttgccaaattcaaagcagaaaggtgttaaatggcttttgtagggatcaaaacaacatgtgacagtagttcatgcagatctgccacacacatgtatatgctattcgctatggatgaatcgagaaaacaacgtcctctctaaaaatgtacatgaacagttaggagcaacaaatcttcttccatacaggactgaaattaaccgcagtcaggtcggcagcaggaggttccaacgaggctccctggctggctgcggctgcaccctcgagggttgttatagtaaccacacagacgcacgcagcttcgcgtgtgtgccgaggaattcacgggcagtacataaactggactccctgcttcattcggagtaacaaaaacacatacagaatttaatctacggccccacctgcaatttctgcaagatcggcttgacttcttcctcttcatcagccatcatctcccggccactccacccccaactttataaccacagagacgcacgccctctctcaccgcggaaccacagcgacatctggcgttctggaggcttttctgccccagaagggctttgcttcaaaccgacttaaccatttatttccacagagatgctctacaatcacttgtgagttcataaacttctttctttcccagatcctggaaacaaaatgtcctcagcttaatttctatattcttgtttcatgtcttcctacttatttatactaagattataatactccataaagaagagagtttaagaagtgcacacctgtgttgtttgaaatttcgaaagccatgtagtacaatagctactttactcaatcttttccaaactttgcagtaattttctatgtatgattaattttatcattttaatgcactatcttaataaatactacacttgggatggctcataaaaaccaccatgctctacactaacaatgcctccatatttatagacaacatccagaaggatatataagaaaggatgactgtctctgcagagggaaacacagaaactggggaactgtgggtgagcgaagaaaattttcactgcctgcccttttgaattttcttgccatctatatgtatcacctattcaaatataaacatttttaaataaaaaattatttgcttctacatagtctctggaaagagacacaagacactggcaagactatcgcttacaaagagcagaagtgagtggctggagcaaaaatgagtgaccagggaactggggtagacttttcactctatgccttttttgtaactttaaagtttgtaccttgtgaatatattaaacttctgaataaatcttttaaagtgtcatgtaatattcctggcagttttgctttacttttttagttttaattacagcttcaagctgattctgtgaaactaacaaagaagtaaaacgttcaaggcagaaatcatgaatatacataaaatcatttcctcaaatcattttccaacataaaggaaatagtttgtattgtaacctataaaatctatgtcgttagctgtaaaatagggagggatgttttaaaaatttttttttgagatggagtctcactgtgtagcccaggctggagtgcaatggcgccatctcggctcactgcaacctcggcctcccaggttcaagcgattctcccgcctcagcctcccgagtagctggggctacaggtgcataccaccacgcccggctaattttttgtatttttagtagagacgggatttcaccgtgttagccaggatggtctcgatctcctgacctcatgattcacccgcctcagcttcccaaagtgctaggattacaggcgtgagccaccacacccggccctaaaactttaaaatttttcatcctctttctcagacattttaactttggtgcacacgaggctgggcacggtggctcacacctgtaatcccagcactttgggaggccaaggcgggcagatcacttgaggtcagttcaagacaagcctggccaatgtggtaaaaccccatctctactaaagatacaaaaattagccaggtgtggtggcatgcacctgtaatcccagctacttgggaggccaagacaggagaaccacttgaacccaggaggcagaggttgcagtgagccaagatgctgccactgcactccagcctgggcaacacagcaagactccatctcaaaaaaacagtaataaataattttggtgcacattaagaataatttttaagagattttatactctatattcctagtgaaggaaacactacttgcttttcaattatgtaaagcaggggtatttaattgcctttctacaatgactaaatatatcttcaaatgatttcagtataatttttattacctaaaaaacaatgggatttgacatttagggtaattccattgttaacacatcttaaaccattaagaatcaatcctaaaatttaagagttagaaaaggctgtaaggataacttaattcagtccttcattttacagatacagagactaagtccaagaaagttca

SEQ ID NO: 1241770 - DNA, 4001 bp, Homo sapiens
atttgcttatcacctgcctcctgagagcagggtgagggcataagggcaggggcttggtcagtgctgttcaccactgttctgtgactggcacaggtgggcacgcaaatattgggtgaatgaataagcaaagacagcaggaaacaagtggattcagaagaaaaaagaccaggaggctcacaaataaacccatttaatcctaaaatcaacctgcacagaaggtgtcattatgcctacaccgctgggaagccacaaagtagacccaggactgtgcaactccgagaggaaaagagaaaatgctgcaggtaagcggagaagcaggtgagcccgacacggagggcaaaggcaagctgcctctggggcccagggcactgaacaccatctcctcaaaggctgacataactgagaagggtccacattttccaccaagtggagcccgtgtagggtcggtgctatctccatgcccctgacacaccatggcacctgcgttcacccagaaggtacctgcccacagcatgcatccatcattgagagtgcgcaaaaccaagttctaatttccaggcactaataccataggacacaaacataaaccaccctccaggaggacacctgacatccctctcctttctgggtagtctgaagtgagaaggttgaaaatagtgcagatgtcctttcttagagcagccccgccatccattcattcactctttcattcatttgttcagccaacatgtgctcactgggcctggggaagcccaggatgaaatgagacaaaccctctgccctctggccacggtgtgctggtgcctgcgctttaggcgggtactaaaagacaagcaaatattaaagatactcgcttccaaaacaaataaggccacgtggagctgtgcactggaatgggattctggatgcaattttatttgattgggtacaagaaccaatccagttaaaggggtcatgaaccaactccaggcaccaggctcctactcagaggctgcctcagacccccttctggcccaggcaccaacccctcacccacccaactccatctcccgacattcttcaaccacattcccatctcgctccacaatattctccctccaggtccccctgactctatttctcctctattcccaaccctgacctctctaggtcggcagccttgatgctacttctccgaacgccaggacgcacatcccagcctgctttctaccaccaccccacacacctcgagtctgcgcttccacccagaaccccttaaacaccatatgtttacaaaccagattccccaggggtctatgtacaacaccccattctcaagaccccataaacacatcctgattccctgagcacaccatacacacactgtggacttcacccatgtcctgagggaccccctcaccccatcacctccaacttcttggaagccccaggccggcccctgacctcctgtggtcccagtggagcagcggactcgctgagacccccggacaccccagactccgcagaagcccgccctgcacgcttgaaccccaggcgccgggacagcccctggcgcccccccgggcccccacaccgcgtgactccggggcacccgggctcccccaggccccggtcccgcgcacatcccctgggccgcagctccctcgcggcccggccgcgcccctgcccgcgccccgcgcccggccgcgcctcgggggcccgttcccgcggaggccgcggcgccccccgcagcccaggccggcgcgcccggagcgtaccgttggcgatgagcttggccgacagctgcttgacgagctcagggatccgctcccactggcactcggagcggcagcgctcgatctccgtctccagccgcgagcctgccttcttggtcgccatcgcggcctggccgggcccggccgcccgccccgcaggccccaccgccgccgccgcggcgccccctcgccgcctcccgccgccgccgcgggctcgggctccggctcccggctccgcggcgtaacgggagcgccggctggggaaggggcggggaggcgggcggcggcggcgggcgcggcggggccccgggcgccgcgaggagcggcccctgccggccagggccggagccgcagcactgaccggggccggagccagggctggggcaggggcgggggctagggcgggagacaggggcccgagggaggaaaggcggggtgggcatggaggacagggagagggactgggggtgtctggggcggggtgaagaccgaggggaagtggggatgggggtgggggagcggggtaggagagagatctgaccaagggcgggtgaggggtctggtggggtaggggtctgggcaggatgaaggggagggagaggatcgggagggagctagcgacagcctgggagcgggttggatccccaggagtagggccaagaaagggcagtgaccctggggaaggtcaccgcccggtgggaccagtgagccaggtgtgaggggtggggggaggcctgcccgagtttgtcctgccatctcaggtggccagcggttccctggggcccggttggcctgtgccccttagcagatgcccctctgccccgcagccttagcccctacccagccagaggtggacggagactcctccatcccaggcaaggcacagcacctgccaggggtgccctagatggctgagcggagccaggcaggggctgccactctcacacgccagctctcggaccccctgaggggaaggcacagtcactggtggggcctcctgtcttggccacctagactgagacctagggaggtgtccctctgtgttctctcagtgaatcaactgtctagtgatcacctactatgtgctgggcgctgctttaggtgccagagatagaattgtgagctaaaaaaacaaaattcctggcttgagagagcttacattccagtttgggggaaaaataagcaaaataaaatagtaaactagactgtaaaaatggctatttgaagaaacagggaagggttcagtgaggaacataaagagttgggacaggcgggtggctcatgcctgtaatcccagctactcaggaggctgaggcaggatgattgcttgagcccagaaggtggaggctgcagtgagcagtgaacgcacttcagcctgagcaagtgttgccatttaaaatggagcagtcagggatggcctcacggaggtggcattagacttgaagaaactaagggggagccatgaggatatctctgggggaggagtatcccaggcagagaacaccacaagtgcgaaggctctggggttagagcacactgggtgggatggagaaatggcagaggccagaggggctgggtggagcgaaggagaggggccgaggcaggagatgaactctgagaggttggggggagttctgtgtagtgcctggtgggccattataagaccttggcttttggctgggcacggtggctcacgcctgtaatcccagcactttgggaggccgaggtgggcggatcacgaggtcagaagatcgagaccgtcctagctaacatggtgaaacccgtctctactaaaaatatttttaaaaattagccgggcgtggtggcaggcgcctgtagtcccagctgctggggaggctgaggcaggagaatggtgtgaacccgggaggcggagtttgcagtgagctgagatggcagcactgcactccagcctgggcaacagagagagactccgtctcaaaaaaaaaaaaaaaaactttgacttttactctggtgacatggagcagccctgcagggcttttcacggaagagtggcatgatcagacctacactttggactatcactgtgactgcagtgttgagaatactgccagggaaatagctgtggtggtggcagtgttggattctgggtcctgcatttgagagtgaagcggtcagtctggaaggttccgtagcccgcccgcagtcacaaggaggcactgaggggtcgtcgtcattccttctgggtgcccttactccaactttcca

SEQ ID NO: 1241771 - DNA, 4001 bp, Homo sapiens
tagccaggcttggtggcacgtaactgtagtcccagctactcggtagtctgaggcaggagaatcgcttgaacctgggaggcggaggttgcagacagccgagatcgcgccgtgccactgcactccagcctgggcgacagagcgagactccgtctcaaaaaaaaataaaaaaaaataaaaaaaatttaaaaaaaccttggaaaaatgcttgtctacagaaatatagtcctattaattaatgtgaactaacaacagaacctagctttgtattaccactaacgtaggctgttctaagagagatgtactatctgaaagacaaaatgttcatctcagcaggttatcatccatcatccatttgctgggagctaaggcagagcctagtaacagcattcacactcaggcctccgcttttgtaactcccttcaattttccattttttctaacatctccaaggcaacaccactagaggaaaagctagggaactagaactacgtaggtatattccgcacttactaaaagcactgacaaactgccgcagcgctacttctgttctcccattttctccttttttgcctattccaggagccacctgcccaccagaattgtaccgctcacgtacattgtatactaccttttccactcgctatacacattactctagtttaagttctcttttcatcaatgccatcattccttcttgtaaggagcctttctttcccatttctccctcctacaattagagcttcccttgcctaggtaattttttaaataatgaatgtatctttctccctcctagattctcattcttctaatttgcatatttgcctcaagctaaactcatggcctccttcactcttggacaacagtctaaagatgaggtgggaggatcacatgttcgatccaaaaggaagaaggcagctatgttaacaggaggtggagagtcacagatctttgtttatgcatattttttagaaattaacaacgcacacgctgagagcttaaagcccatcaatatgcaagtataaacgaattatcaaagttcctcgtcaagtaaagttcagggctctcattctgggacacgtataggggaggggaggctgaaaattgtgaggagggggcggtcatggcacagaacttgctatccccgtggacgtggcggacagcggacccgctagtcacagctccacaaggtctcgctccgggcgcctccgagggccgaacggtcagccccgcctcgggccttcctccccggcctcccaacccggggctgggatatgccccagaccccgcagcctcagcgtcaggatgcacaggctgacgggagctggccggtacctggtcataaggggacttctccagcatctgcgtgcatagatcggcgcagagctggaacttcctgcgcctaaaatagctccaggccaggagcagcggctccatctccgagctcatggctgccggtgcggccagcgaaggcccagcgctccaggagagaggtgggcgtggagtgaagagctggcggcgtccgactctgcccggcaacccgcgacggctggggccttgtccgagaggtgcccgcagcgcgcctgagaacaggaaaaagaaaaacaaccgcaagcagaactcggctacagggcttgcctaaacttggttggaaaaagatgtctacttttaaaggctacaggtttcattgattttgaaaagaaggcaccgcggctaaacaaaaaggtagtgagttagacacctgcccctggggtcccccaccctcccaggaggcgcagctgcctagcaaccgaatgctctgcctgccctgcaggtccggaagagtccctggagttgatctctgtctggtgtctgtcctacttcttccattcgctcgtttccatccctttcgctttaccttccgattctagaaatacaaacaagtaaacagcttccacagtaccatccacccatcaagacctaaagtcctaaatcctgaaattgtccgctgtttctcgaggtccttcccaccgaatctcaacatctgaactgcaagtggtttgcttttactcattttacagatgagaaactgagatagactcagagaagagaaattattaaaattgcattgagttagggagctggaactgcaatctggttgactacaagttgctaatacatttgttaattcgactcacatggtgattccggattgtaaattggtgacagttttaccaaactagataatgtgtgcaaaataataataataataataataataataatttttaaaagctttgtgaaacatcgtctcctggcacttgctgtttggcaagggtttacttgtgcagagtgatttcttcaaacacaattctgacttttctctagaaatttgcacagatgacaaatatgcttaaaattgcaatggttatgaaaagagaggtgtgaccggctaaatccaggtaggcttttctcaaaccactggggtctgagaaaacattagacattctatttaatccacatatttatatttttcataggtattaaaatgaaacttatgcttctaaactaagaaatttattgttaccttttattctctactaagcagtctttcttgaattgttgtattttggaagtcagtaattatcaggattgtcattgttacagttaagtgtattgtcattagtctatttgtgttctcctggaactgccggtagaaatgtaatctccctaaaggtcctaatgaagcagcccatggtttctgagtgtcaaatttttaagaacgcacatgccgacaattgacaattgggctcaatatttcacagcgtctttttgttttctggtacactgtaagcagattactatgtaagtgattttcaaccctactagagaaagtgaagcacagagaaaccctttaaaagggtcagtttcacaaatgatgctagatctcagttcatagatccttatcttttactctctagcatatagtcagatgttctaaataaacttttttaaagaatagttttcgatttacagaaaagtcacaaaaatagtagacagttcccatatacccagtttctctattgtgtgagatgttgacatttgttttagtgtaagatgatacatttgttacaactaaggaatcaacaatggtacattactattaaataaactccacagtttatttggatttcagtagttttcccttaatgttatttctctattccaggatctcacttagggtaccacataacattcggttatcatgtctccttcacctcctctgacactgtggcagttttttagacattccttgtttatgatgaccttgacagtgttgaaaagtgctggtcaagtattttgtagaatatctgagaagttcttaaaaatagagatgtcccaattccagccctagaaatattgacttaaattgtttgaggtaggactggggcatcggttttgtttttttaagtgtctcaggtgattctgatgggtagccaggattaatcacccactacattgagttctagtcatgtatctattgagattattgccaacttcctacagagaaacactatttacataagtggggaaataaacatgccaataaacatataaataaatgtggaacaaatgaggcattaaaatattttagtagcatataatgtgtgttaacttctttcagaaggctgtttttttcctctcacaaaagtcaaatgaatgaggaaaattgtaggatatttagtaaattacaggatgttaaacatgtccaaatgtagcataaaatgtgtctttaaaaggatataaaaatatgttatttttaatatcatgtaaatatgtttatggttcattgattttatgaatttatagacagacttacattttttaataatatctaactgataaagcagaaaccatttttttaaagatatgctagtaataggaagaatagacaatgtaacaattcctggtgaagggaatagataagagttactaggaccattttcctcctagagaaagtgaag

SEQ ID NO: 1241772 - DNA, 4001 bp, Homo sapiens
ctgggcatggcattctgggaagacagaggtaggctggtactagaaacctcagagggaacagagagatctgcatttaagaaccgagcagaattgccagtatttatttttactcccccaccactgcctcggcttcagacacattcaccattccctgccacacccagtcactcttccacccctaccctgctctaactgtccatagacagtttaggcaacctcacatgtcaggaactaggaggaactgccctttgtttggtcggagaaggttgaccatgccagaatctcaccaaatggggcaagagaagaggagagaatgctttttaagttgcctttgccaacctctcccaccttctcccaggaaggccctagcaagagccagactcttctttttttaagagactttaaatattcctgcgcctaaattaaacaatttttaaatccctgattttggctcttatccccaaagggaatgttggaatgtacaccttctttgcccaagagtagggcccccttttccttcacccctagcagccagctggcgtgaggactgatgctacacatagtgagaaacgggcagggaggagagggagaatgcagcatagttcaagcccaaccatgaaccaagcttcttttgagatagagatcttcacctggcaaccgggagccccagcagagctcagagagaagaaagtggcattctggaatccattttgctcaagatgctgaaggcatggtgtcaaactcccctttgctactggggccaaaaaacttggggaagatcttacctacagggatgcggttagttggggaaaaggcgaggaccaatcctggtgctcatgctacctaaggagagcagacaggtgcgtggcctcccttgggacccacccgcaggaaaaagctgggctagcggtggctgcgggggcccaccccgggcgctgcttccgcattttggacccaggtccactggtgagcagtagcagcagcagccatagccaggccagctgggtccccttccagtcatttctaggtgagatttacgatgtatgctagcgaagggacaagagatgattatggcctttgaaaggcataatcctgaaagtcacactttttccaaagcgcctccctcccgggttctccccagagcaacacagtcacagcaggagaatctgcaccgcgggagcgccgcagtggtccgcggagggaccgggccgaagaacggggaccgcggcgcggggggcgcggcgcggctcacctgccaggctgttgtaacagtcgatctcgatggcttccaccgtcttgctctgctcctccgagaggcggccgggcttcagggccccagccggggaggccgggcgcgagtcccgctcccgttccccggggggcggcagcagccccttcagctccagcaacgcccggtggtatttgcctatggcttcacggaatttcttgtccttgtagcactgcgccccttggcttttgaactcgtgcgctcgtcggatgagctcggccggctcggccgccgccccgacctggcccctcgctggggctcctccgccgccgcccgggacgcacagcggcggcggtggccgctgcccctctccggccgcgggcgggctcgggttccccttggccccggccgccgagccctttctctccattcggccgccgccccggcgcctggtgcgcgccgcgatctgcccgccgccgccgccgccgccgcgccttcccgggtttaaaagccgcgggcgccggccccgcgcctcgcaggcttcgtggcggccgtgacaccccgcggcggtctggcgccccgcactcccattctccccgctgctgccagaggctgctccagccgccgccgccgccgcctcggacgccggcccctcccccgcctcccggctccgcgccgcccgctcccgccctcctccctccgcaacctgcgggtggcgggggccggtgctcgcgggcccgggactagcgctgcggggggaccgtggccccgagtggggtggcggggatggtcgctgacccggaagaagcttggcttgcccgaaggaggggaggattaatgacaaagacggccccgctctttcccattcaatcccgctctgcgaggcgcgcctagtctgaaaggaggtggggggaggggggtaggtgtaggggaaggggagtgtgtgtgtgtgcgtgtgtgtgtgtgtgtgtgcgtgcgtgtagggatggggggcggcggcgacgaaatgcgtgcagaaatagatttcttaactacaagaaaaggtgcggcagggaacaaggggcgcaggcgcaagccgtagctgctagttctttgcagtaaggtgttagtattttttaagggggcagggcctcctttttgtggatccaggttgtcgctgaggtgtgtctcggtgtgtgtggtcgccggggcgtccagaacgcgacgggcggtacagcgtgtggggcgccgtattctgggagcctgtgtatgcgtgtgctgtgtgcgcgcagctgtgcaggatgaatcacagacatcagagatggagaacacctgttactgtgggtcatcggcttggcgtgcgtccggtctagtttccatttacaggacagttctgtgcccttcctcaggaggtcccattccttccttcttttggtcggttctgagtgtcagctgtctactggggatctgctaaggctaagaggcaaagataggcaagtcactcccctgacctcaagaaactcccagtctacaggcgaagatacaccacccaccggtagagtcgctggaccaggtacagatggtgcctgtcattggggaggaacgaaaagtgctgtgcagccctgagggggggagggagaggtagctttttgagtagtggtagatcaggaggctttatggaggaaatagcatttgaggaccttgaaggctgggtaggatttggcatgaagaagtagaaggaagtggcatagccggagtgaggaaatccagcggaagtcctgatgtttgaaatctcaggtgtgtttagggcatagtggtttgattttatagcctaatgagaagtagtgggaaatgacggggttggattatgggggcttttggatgaagagtttggatttgattttggagtcaatggagaagcctgacatattttttagtgccctcccttccttaatgttaagaaaaagaaagattctagagcaccggttgtcagagtgctggccccagacctgcagtgtcagcatcacctgggaaacagttagaaatgcaaatcctaggatcctactccagacttaagaaatcagaaactctgagggtgggtctcagttaaccagtatattggttcagatatgctgctttaaaaccttcctactcaaaatgtagaccttgggccaatatcatcagcatcacaggagaacctatcagaaatgcagaatctgaaaatcccacacctactaacccagaagctgcattttaacgagcatactgggtgatttgtttacctattaaagtgtgagaaacactgctgtagagactttggaaaatacagtaaagtataaagaaccccccagtctacacccagttgtattctttgttaatattttgatgtaattcctaccagttgtttcctaggcatctatatttgtaaaaagtgctcttttagccaacataagtggtatggaacaatatacacaattcatttactgtttgttgttgttgttgttgttttcttttcttttttatttttgagtcagggtctttctctgtcacccaggctgcagtgcagtggcatgataattgctcactgcagcctcaaactcctgggctcaagggatcctctcacctcttactttagcctcctgagaagttgcaactataggtgcacaccactacccctggttaattattttttttgtagagacagggtcttgcaatgttccccaggcttgcttcctgtgctttttactttacattatatgtaattaaatattcttttaaagcctaatttttaata

SEQ ID NO: 1241773 - DNA, 4001 bp, Homo sapiens
tcctcatcctctgaggatgatgctgtttcctccaggtcccgggccatcacgattggcatttcctttagggtttgtcatgcagtcagcagacgggggcctcagagacctttcctagcagattcactggatcaagcaatttggatggcacagattcctgcaagaaatcaacttgattggatcaattgacctgaaacacaatgcagttgtctatttattggttattgctgataatctaagtaatgaaaatgactatattcctaaacagtgctcaacctctagaagtttactttccataacatatggaatgtgcctcaatatgtgcctcaatatgccacaaaaatcaagatttttttcaaacatacagtctgtgctctatatatttgaagagctgttactaagtttgagtttctcattatttactaaatcgaatatgcaccaaaaggatagactcctcactttcactcagtttgaggcaggtgactgattccctaaaacatatattccttgctagacaaacctggcctgggttaaaaataaataaataaaaactcaaggtttaagacccttgcaggccgggcagggtggctcacgcctgtaatcccagtactttgggaggccaaggcgggcggatcacctgaggtcgggagttcgagaccagcctgactaacatggagaaaccccgtctttactaaaaaaaaaaaaaaaaaatacaaaaaattagccgggtgtgctggctcatgcctgtaatcccagctactcgggaggctgagggaggagaatcgcttgaacccgggaggcggaggttgcggtgagccaagatcgcgccattgcactccagcctgggcaacaagagtgaactccgtctcaaaaaaaaaaaaacaacaaaaaacccctgccaacatttatttagactctatgacaagcacgctgacaagatgccatcatgtttccagtaaaataaattcaacaatgaaccgaaagatgaatatattctcttgaatcaaaggtccatataaataggtgggggaggggaggaatgcccttccactcttaaaaattattcttcctaaaaatcacaaagtttggtacgactctcaaatagacgatgaaattaggaaatttccaacactgcatttctaacttaaaatattttttctaaagtaaaaaagtacatgttcgttgtgtgtgtcagaagaagaaataggaactacaaataaaagaaacatgtttaaatgaccataatcccaaattactcagcgataattacttgctgtcaatccttcttaacttttccatgcattcataaatacgatgagactgtaaataagacaaaaaaaaaacagaccccgataatgatcaaagatcttcggcgcaataggcaatgtctaacaacttcaatggctttcttcaggggattctcaacgggatttcttgatctttcccaaaatgctgggaagccctttaagtttaaacaaacaaaacctccaaacgggaagggatgccaacctctcctaggctgcctgcagagcggggagaaacaggtctatcggaagaagagtagagatactcacctaaggagactcctctcccgaaaggaatctgcttctcagccccacccccagctcaccccaatcccacgtaggtccgcagatgctccccccgggaaggacgggacgaccccgcagccgcgattcaacgcggcgcgcccggaagccaacagctactcccgggctctgagcgggaagtcctgctgcaggcgccagcccggacccgggaatgctcctccctagggtagggaagcgcgcgggcgcaggcgtttacctgtctcatcttcccatggttcggggcgagcaggcgtggaccgcgctctgcgcctacctccctcctccttccccaggaaggctcagggcagccgccgacggctgcttccccggttactacaacaaccaacaagcaaccgcccgctcggagccactgcgcaggcgctcataacgctcagctgcggacgcgggcgaatgtcgtcaccgccgcgcagcgcgggcgcagagccctgccctcagctgaagggagtcttcttttttttttttttttccgctgtttttttctccgcccctaagaggttgactccaaacccggagttccgctaggtccaacaggagggcttacggcgtgagcggcgtacctggggagaggcttaggcagcggcaaccgctgattggcagtaaaggggttcactccccatctcctgctcgggcgaaaccgggacagccaatcagagagagtactgacggaaacggcccaatcctggagcagggctgagggagggggcggggacaaatggctcaggtggactccgggctggagctgtcctgggggagcttgtttgcggcagcggctgctgctgccactgctgtgctgggggcccggtcgccaggtaaggagaatatgggggagaagagggatgtaggtgtctgtgttgcttctgattgagaggatccggagagtctggaaaaatggaggtgggatggaaggaagataactggaaggcaaccttttggggggaaaaggtttcgagaggcgatgacaagggggagctaggaagatggagaaggcttggtgaattcaaggaacgaaggaatggatgagcgaatgagcagccactatgagcctagcactgtacaaagagccttcactttttgtcatataattcttacaatagcccttcgggttgatatttctatctccattttgcagatgaggaaaccgagactgaaaagtgtaaatgacttacccagggtcacacagctactaagtggtagggccaggataagaatccctttctcctgattaagttttaacagcacacctatgctgggctgggcttggctgggctgggccagggccaggacaaaatttggaaatagatgttgtatacactctaagaggcccttaagctttagggaaattaggttgagaaattggcagagcaattcagaagtgctcaggctctgtcctcatcagctatctgttgggatttctaacagataacacttctgtgaaatggaaggcatacttgtgcagaaaagtggagaggtgcatccatgcagcttttctaaaccccggaggagtctcctcttgagagagagtgagaaaataaagaggatgggtggatcttggcccaaatgataatggcctgtgatgtccagtagaccctcagtctctctgatcttcgacagagaccacctttgtgatccagctctccctgaagggctcatcaattcacccttccttctctagatctctttattgcttgtttggggcggggagttggcgggggggggcggcggtgtttcacactgtcttgggccattgctgactttaatatctgtcccactgggtagcagagaacaataccgaaacttgtattgccaaagtgacaaagaaagcctgttagtttattaccacttcaggcccaagaggttaacctgacaacagataaaccgtggaccaagaaaataataatgaggatgggaaaaagtcattccattattagattatttatctattttggttttatttaaatcagactaactgaaattactactcaacaagagttgaactaagccttaaaaaaaaaaaaaaaaaggctgggtgctgtagctcacacctgtaatcccagcatttgggaggcgaggccaaggtgagtggatcagttgagcccaagtggagaggttgaggtaggaggatcacttaagcctttgatttcaaggctgcaatgagccatgactatgccactgcattccagcctgtgtgacagagcaagaccctgtctcaaaaaaataaataaataaataataaattaaaaaacaaaaagtatgtaatctaattgtattttccatacaacttgaagacaaaagtggatatggtatgcttttctttctcaaaaaatgggaacttcattaaaatagtctcaaacaatgaggtagcactgcagcagtcca

SEQ ID NO: 1241774 - DNA, 4001 bp, Homo sapiens
aggtaagcctcacaggccaagacctaaaattagtatgggtactatccagatgtttactatcactttgagcagagaatagaggagaaaaagaaaaaccttttaaagtctattgatgacttgaaatgtgcacctcaatgattatggaagatgcaaataggccatggcagagaatatgtggcgcccttgattttgacaagtgcctaaaatcacacaactctgattttatgctcaatttaaatacttaagcacattactgcaatcaattacatcactgctgtcatgagcatcctgtctcctatttgaagagaattgtgtaccgccctgaccacattctctaaaaatacatgagatgaacttcttaggttccaataaacataaaatccttctccaaagcatagatgttggattaggcctgttaacttcttagagcaagccgtaccctctcatacactgcactctctacctgctcagctgaacgtttcatctgagggatgtctaggtaacagtgctaggcctgtacatctaccacagtttgtcagcatacctataaagaactcaaaccacactagcatctggtacctggacaaacgactgtcccagaatctacaaaatagactttaaagttccctgtggaatacttagctaggaaaaaagacagcaacactcttcttgggcaaagcatatgacaaaggccagcctggacaatatagtgaaacctcgtctctaccaaaaaaaaaaaaaaaatcagccgggcatggtggctccagtgcctgtagtcccagctacttgggaggctgaggtgggaggactgcttgtgcccaggaggtggaggtttgtagtgaactgtcactacagcctgggcgacagagcgagaccctgcatgaaaaaaaggaaaaaaaaaaaaaaaagcataggacaaaggatggtgaggtaagaaaagctgggtctttgttgctccaataaacgtagcaatgtctttcacaaggatactgaattcgtaatgtgctgtgtattctaaagaaaacaaattatttccttttaattttgcactacttgctaatcttatttccaaataggaaaaaaaaaagtcaacaactatgtgccggcccaatatacgttagtcgatctgattattcctcggttcttcacagcagtaacacagcatgtattttctctctcaggcccaggaatagcgccaccatctaccatacacaggtccaaggcttcgatacatgtggaatttaaacagtacagaatattctacttcctctccaggcaatcatcatacttacaagtctgtttctgcctttttcccaaaacttaagcccagagcatcttcccaaattctacgtttgaaagaaccagcttccccctgctcacagatcgcttcaacatccatctgatactactactactcttccttaagagacatttcccttggccttgggaggaaagggtctttcacttaagagctccgattctccccgtcgcccctttccatcccctcgacccacaaagggctccggtgtttcccgccgttcatgcagcgaaaagagaaagcaaaatgccctcaggaggctccaggtgaggcccttcggtgccccagagacgggtgtcttaagtcagactccggagctgtgcagtgcagccctggctacagaaagctgcttcgtctgaatccccgggtctgcaggcagagcccacagcctgaagggccagcgctgtcacctacctgcccgggacctgcgggcggggacctgggccgttcccgaggccgcgcggccaacagttcccgccgccacgcgacggaggaggaggcagaagacggggccgtgccagactagccgggtagcctggaaccacttcgccaacctgcaaaggcgtagcacttctccctcccagcctgcagccgccaccgactcggcggagtcggcctcctgggaaaaaacaacctgcgaagctcctccttctcctcgtgctccctacgcgaggcactctctaaccaatgggaaacgtggtgggcggagcgagagtgacagacgattacagagtcctcccgccggcgcgaacgggcggtgcagtagcagggccaatcagcagcgtgggtgggaagtacaggggcgggagaaagtagggaaattacgcgcccaatcagatctcggggccctcgagcgacgggtcctgcggcccgtggccttccgagcgcggcgctcagggggcgtgcctgcctgggccaatcggcgcgagcccacagtgcggagcgagcgcctcaaatgctcgggtttctcagctgattgtctccagccgagagttgttttttgcagctacggagccgagccgcagcaggaggagccgagacccccggggggtggggggaaagaggaggcggggtccgggggagccgcggctgctttgcgctggactccgggtcccgtcacggcgcttcctggggttagaggctggggtgggtggggggtaagggggcagtccttctccccttcgacggcggctccgagtccagccccttccttcccgcgctcgctcgcccggcccccagccccctcatgagggtgtccgtgccgggtccggcggccgctgccgcccccgcagccggccgcgagccctccacgcccggcgggggcagcggaggcggaggcgccgtcgctgcagcctcaggcgccgcggtgccgggctccgtgcagttggcgctgagcgtcctgcacgccctgctctacgccgcgctgttcgcctttgcctacctgcagctgtggcggctgctcctgtaccgcgagcggcggctgagttaccagagcctctgcctcttcctctgtctcctgtgggcagcgctcaggaccaccctcttctccgccgccttctcgctcagcggctccctgcccttgctccggccgcccgctcacctgcacttcttcccccactggctgctctactgcttcccctcctgtctccagttctccacgctctgtctcctcaacctctacctggcggaggtaaggcgggagggccggcatgcggggcccgggcgggtgcgcggggccgccgggatcaactcccgctgaggaccagcgggggcggggggtgggcagcgagaggcggactggaaaccagcctggggaaactgaggcacacctggagtgtgagccagtgttttcgccttaaacttaagtggctgattggcttgattactgaggggttcgggctagggggtgagtgagtgagtgtgtgtgtctgacaacttaaaacagcaacggaacgaaccctttgttcggtgttctggccctccgaggtaaggcgttggtggcaccaacaaagtggcatcgcaagaagtagcagccccggtggctctgccgaagccggactgtgttgagggaggttggatgctgaggtagcagcagctctgctgaagctggactgctgccagccattacgtcaccaggcagagctgttcctctgctattgttgctgcgtttcttttattagaagcttatattccctcctgcatctcctttcctgtggctcgataagcctcacataaatttcgttcgatagttccccagcagggttgatgatcaataaccaatgctgaggatcaggataaggacctccataaagcccttaatgtttgccccagttgcttcgtgctttagcggtttatcctacctcctattagcatagtcttttttggagctaattaagagaaaaaaatactagcttaacctgtgcctattgcagaaacaaaaccaccaaactgtttttgcaataacttgcttaatatctggaacctaatcacaccccctttctcttttatggggaattgctggttggattgcattgttctgcagcgcttaggtatttgacccatttcaaacaggtttgggagtgtaaggttgtcaatcatgtgtgtcagcttgtggtatttaagccataatattttaagactttcccccaaaaaagtcctccttcccaccaaaagaaaagcttga

SEQ ID NO: 1241775 - DNA, 4001 bp, Homo sapiens
cagatcacttgaggtcaggagttcaagaccaacctggtcaacgtggtgaaaacctcatctctagaacaccccatccactaaaaatacaaaaattagctggacgtgatggcgggcgcctgttatcccagctacttgggaggctaagacaggagaatcacttgaacccaggaggtggaggttgcagtgagcagagatcatgacattgcactccagcctgggtggcaagagtgaaattccatctcaaaaagaaaaaaaaagtgaatatgtataagaggtatagttaccttcctctaggaaggaggaagatagataaggaggcttccgggatgccagtaaggttctatttctttttctttcttttttttttaaagttctattccaataagccttttgcactcctaatgttctatttgttgatctgggttgtgggaacacgcacactttcctttcaagctgtgtacatgatttgtgcaaatttccgtatttttttttttaccacaaagaaaatattaaggaatccattttataaaggtaactacacttcaaaaatagtttacatatagacataacttttttcttttttttttttttaagtaaagcaggggaaaaattgttttagtggtgaccaaaggttttaaaatacctggggctatgtctggataccaggtttattcaacaatctagcactttgcagtgtaaactaaccttggtcaacaacgagaactggtattatgatctcagttcataccacataatgaatacaagtctctcccctcatctccccagtgttccaatccacccctcttcctaggtaacccttcttcctaccaattctcatcctttgtcagtcttcttcctacccatccttttccatttttgtacctcgaagtgtagggtgagtcactaaacaccacatcacaccccctcaaacacttgctcactcacaacgtcttccaaatgccaaacagatccttttctcctctctcccctcccttgccagagccacttgctgttctgtttccggtctatttccaggggaggggggcagactgcagatagacatgggtacttgcttcattttgccaaaaaaagaaagaaagaaaaagtactagctagcacttgtccaactaaattgcagaggaactagctgtcaaggagctcaccgcaaatccctatggatttgaaaatctctttaacctgactctcccattcggtccctaataaataaataaataaataatcttaggatgggaaaatcagggacaaagatgtctggatctgagaggtcgcggggtggtttcgtgaaaagcagtggtgcaccaagaagaggctggagaggacggacagagcagctgctccagggcccttcctggcgggccggacagagttggagacaggggagaggggggcccctgctggacacaggctgaagggggcccaggaggttggggttaaaagggaagggtgagcttggggtgaggaagcggcagactaacggcggccccggaccaccactggggagacgactgcggcaaggcgggaatagggacagccgggccgggaaggggaggttcggcgggagccgggggagaggaggcccgggccgcgcgcccacctgagagtaggagcacttctcggagtcgctgccgcccaggacagcgcacgcctcattctccagctcctcgtcctcctcaaggacgtcgaccaacgataccacgggctccagctccgactgccgcccagcggcgccctcggctccggccatcctcaactgtcagccgaacagcggctcggccccggcggaggcgggaaaagcggccgtgaggggcgtagccggaggaggtggggcccgagtgccaggaaccaatgacaaggaaaaaaagcgaaggaagggggaggagcgacttccgacaaacggatgtcactcctctcccttctcccgcctgcgccggacgcgggctgatttccgcctccgggtggcgcttcccggtgtcgtgttctggaagcttagcggtcaccatggagctgctgggagagtacgtcgggcaggaagggaagccgcagaagctgcgggtgtcctgtgaggcgccgggtgacggcgaccctttccagggcctgttgtctggcgtggcccagatgaaggacatggtaacggaattattcgaccctctggtacagggggaagtgcagcaccgggtggcggcggctccagacgaggacttggacggtgagctctgagacggtgctgcagtgaccggaggacggggcgggcgcccaggggaaattggcttggggagcccgtgtagagtggcagacttggacaaagtgagcctcgaggaaagaagaattgcatctaaaaatttttggcgggctaggcgaagtggggctcacgcctgtaatcccagcactttgggagggcgaggcaggaggatcacttgaggtcaggagttccagaacagccagggcaacatatcgagaccccgtttctattattatttttaaaataatttaaaaaataaaaattgttggcatttatcactatatttatttgggctgcttctactcaagcgtttccacaactcatcgctatttcgtttatttcacaaaaaaacgtgtcgaatgcctactattatgtgccaaaccctgagctgagccctggaggaagaatgaggtgaatgcgactcagttcctgcccttgtgaaacacaaggggactagacaggcagacactcttattaaaagtggaagtggtccgggctggtggctcacgcctgtaatccctgcactttgggagaccgaggcaggcagatcacgaggtcaggagttcgagacaagcctggccaatatggtgaaaccctgtctctactaaaaatacaaaaattagctgggcgtggtggcatgctcctgtagtcccagctactctactcgggaggctgaggcagaagaatcgcttgaaccctggaggcagagggtgcagtgagccgagatcgcgccactgcactctatcgtgggcgacagagcgagactccgtctcaaaaaaaaagaaaaaaaaagtgaaagtggttctgtggtcctctgtaactgttgcaaacccagacaccctaggaagtcttcagaaaggataagacttttgagctgggtgttgaataaaaaggagttttatcaggtgtgaaactacagacatacttggaagagtacaatctatcgcagagtaggaacaggttccaaagactgggacagacttcattttatcacgtattaactcccagagactcccttgcctttccagttttgtaggtgcagtttgaaagtagaaacatgaagtttaactgcattatttttaaaaaattgcctcgaatgcagaaataggcaggtacttttttttttttttgagatggagtctagctctgtcactcaggcttgagtgcagtggcacaaccttggctcactgcaacctctccctccccggttcaagcgattctcctgtctcagcctccggagtaactgggattacaggcacccgcccccactcccagctaattttgtatttttagtagagacagggtttcactgtgttggccaggctggtcccgaactcctgacctcgtgatccacccgcctcagcctcccagagtgctgggattacaggcgtgagccaccacacctggccaggcaggtacattttaaccgtcctgagctgaaaaacccaagaactagatattagagtcaggatttacaattatgtaagaagagcttaaactgtactttccttccatcttgggaaatacatcttgataatatggatgttggctataatcaaaaagaacaataacaagtgttggctggaatgtgaagaaattggagaccttgtacattgttggtggaaatgtaaaacagtgtaaccactgggaaaaagagtttggtagctcctcaaaaagttgacatgaagttaccatatgacccagcagttccactggtagtcctcccaagaaaactggaaac

SEQ ID NO: 1241776 - DNA, 4001 bp, Homo sapiens
acaaatggtttctagatccaaacagtctactagaagtctccagctgtgcagatagacaaaaggacaaggtgcaaccagcagaccttacttggcttttcaaaaagttttagatttccacatcaaaggctgttagaaaaagtgttatcctgaaattacttagaattctattgttgttgataccattttaattttgttttttaaattgtggctaggaaatagaagcaaagtcaagtaataaaggttagtaataagtgtaaacagtggggactgatcttatttaacatttccataaattataaagaagcagtgtttacacaccgctttttagtttgctaatcatagctctttcagttaatgcaatacagtcatcccccatatactatatacgtgggattggttccaggacccaccacatataccccaatccaagcatactcaagtctgcctgtccgtcctgtggaatgtgagtataagaaaagtcggccctctcaatacggtgtttagaatcccatgtaccaggttgcattgatcgatccgcacagttcaaacccgtgttgttcaagtgttaactgtatttagcaaattaagacaaaggtaaaatgatggaaaataacagtaaatggcttgaatttagataaggttcacttacgcctttggggaagtataaaagtgtggaacaagaggtggacactcagaggtaatcattggctccaattagatggacctatttcttttatattttctcacttttccatgcatttcttgtctatcgccctgaggctgtatgttcaactgaagtgacccttaccagctagaggggaatttcaggcaagggactgctacaatctctgctacaatctccaaaccttcaaggattgggtaagagggtgaaaagggtgagatgggtaaagaaaatgaagtaatacaaattggaaagagctatccttttcaaggaagtaaggtgatgaagaatgagggtgaggaaaatacaaatctgaaggaagtccagaggaaaacaacaatgatattgtctccaactgaatatgaaaagcataaaataatggagggtcaagagatggttaaaaacacatcacaaaattccaaattgctcttatcctttgaagcttagaggtggtttcagaacaacaacaacaaaaaactgtgtgacacaaaacttgttaaacaatgggtagagattgaaaatgcaaatacaatactttcaaataaattcccagagttgctaatgtctatcagaggaaaaggaggtgtaacggtgcctcctcactgggttcagaatgcctgggttctgatcttggcttgcctacttgttagtatttctgagcctgtctccttggttgtaaaacagcaataaaaacacctatcctgactaccacaaagggtggctttggcgttcaaatgaaaccatggatctctctggaaaacgacagtgccccataaatacagtatttttgttattgcatcgctgaaattattgcaaacccccaaacaaggggcatctagggaagagcgacttggctctcccacgtggcgactgtgtgttttcatcaattttgtcctttgtttacaggggtatcttgttaaggaaaacttttcagtgtcttaaagattattttttaacctactacacaagtagcaaggtggtgcctgtaaaagtaccatgcagacaagtgcttacgatagacaagtgctcactgccaagaagcagccaccggaatgccaggactgtcagcaatgactttccgcggaagagttgttctcgagaaagatgcactcattgcatgcgaccacccgagggacgccggccgccgaacggaaacatgaattcgtggaaatggccatctggtgacgtagtagtgacacagttcttatattctgatacatttaataatgtgtcacaattcgctggactaagcaggatgctgccacaagaggcaaactcccagcgacccgacgcccggctcccagccgacgagcaaaaataatgcgcgcgcactccgctcccatggatccagcgaacgcaccgcccccccacgcggcccgactcgcgcggcgacgtcgggccacgtgaccctgagcgggacgacggcaggggagggcgggggctccggccggctccgcagcgccgcgcaggcgccccagggccacgccgaaccgagcccctcctgctccgtctaggagtcaaaatggcggcgaggggaacctggagcagtcccggagcctgagccactgacaggagaggagagggcggcggcggcggcggtgggaggaggatggccgggggtgctggcgccggtgcggacggcggtgctggtggcggcggcggcggaggcgacggcagcggtcccagcggcagcagcagcggcgggaggagcctccggggtgagtgtcccttggtgtctctgaggctgtggagccgaggctgtgtccggtgtggcgcggggcgtccgggagaggaaggggctgttcttaggcgtgggggcgccggggctggggccaagccgccgcgggaggcgctggggcgccgggcggggaggggccagtcgtccgtctggggctgaggcgcggcggcgccggactggccggtctctgtgcgctccgaggggcgggctggagcgcgccgccgtccctggggcaggggcgcgaggtgtggcgctcggggcggggagagcggcccgagggagtcgcgacggcagcccggccggctttgggctccgggcgccgaggggcgggacccgtcgctcccaggacgctgagaaaccgctcccgagacgggggcgcgtgtttacccgggtgcggggttgcgaccgccaggggtgggcgtgagagtggccggcggggtctgggaagggagcaggcctgaggactgctactcccaggggaagttagattgtccgggtaagttactattgcgggataaacctggaattgagctttgacaggttgggagggagacaataccgagtgtttgataaagaagaggaggctgtgcttgttggactacttgaatggcaaaaagtgtgcatatttcagtaccttatttgcacagtgtttgctagctttaccccgagggtgagaactttctcaccgtttttcaagaaactctgaggagtgttgtttctcctgtgaactacaattgcacgtcttcacataccagcacagataataagtactctggagtaggcctaatttacagaagcagtcttggttatctacaccagagcactgttaactctgcgaaaacatcttactgtaatgagaaagtagacatttttacagaattacttagctttttcaactaacaacctttttggggggggggagacggagtctcgctctgtcacccaggctggagaacagtggtgcgatctcgactcactgcaacctccgcctctcaggttcaagcgattctcctgtctcagcctcccaagtagctgggattacaggcgcccgctgccacgcccggctagtttttgtatttttaatagagacgtggtttcaccatgttggccagactggtctcgagctcctgacctctggtgatccgcccgcctcgtccttccgaactactgggattgcaggcgtgagccaccgcgcccggtctggtcaactaacaatcttttgtccctaatagcatctgtttcctttagattgctgaaatgaattgctttcttcctgaaatgtggaagaaagacttgaaattgctttgcaagaatcatacgttgttaatagcaactgttattagacttgtcatggaattttggagtcagaaaaacttttagagatctaaaggtgtgaatattgttttagagccgggaaaccagacccagagaggcgagtgacttgttgtggatcctacagctggcgatggattagaccaaaactaagatgtaggcctctacaccccattaccccatttagagagctcattgttactacactgctgagctgcttacttttcattgattgcattcttcaccatt

SEQ ID NO: 1241777 - DNA, 4001 bp, Homo sapiens
tgggaagacaaagatgaatgagatacagcctctgttttcgttggtgacacaactgaagtatagctgtcatggaggaggagttacagccaacacagaaaaattatttcattttatgcttctccataagacctcttctaatgtgcttgaatctactgtccaacagagaagaggacctggacacttccctccaccaccaccccccgcccttctcctgaagacctgaaattgaatctcagttctgccacttactggctgtgggatcttgagttcctacttgagttttcagctttctcatctgtaaaatgggaatccaaactgtacttacgtcacaaggctgttgggagaattcaatgacataatgcacgaaaatattttctcaacatatgaagccctgcatctccttagtcattcattacatttgtctgctcacagttctctggcttggcaagtgtcatcaagcaaatgagacgtcaagccatcctactgtgtttgttagttccatctgctgctgtcccctcctgtaaaacgtggacattttaaaagacagcggggagggcctcctggagacaatgtatgtgagcctccctcctagaatggcagtgagagaaagttctcctagacaggtatgatatcactgcattttaaagatcttaccgagccagtggtcccctgccccgtgggaggagagtgtggcttcactcttggccccaaggtcactaaaacctagactgtgctatcacccccctgacccgtgtgtctcaccttgggcaggtctgtggccccacggatccgttgcgccaccttctctccatcggggtggatcttggccacgtgtttccacatcctttcccaggtggcctcatccacaggtagcccaccccggttgacaaagaaggggacgcctccgtctcgcaggtcctcttccccttcctcttctggctcctcatctctctgggctgaggttccttcgctggtctccaaacgcctgaccccagagggggcggtggccgcagcggacgttggagtggcaccgctgctgccacccccagccaccttcttcccccctggcatccctaaatcttcgaggggggtggtggaggcgggaaaacaactggctcacaagaggcctcccacacaccggctgcagagataacacatggccagagtgcaaggcgcctttaagaaatcagggcgtggctcctgtacaataaaatacgacttgataaaaaaaatcagtgcaataaggtgaattagggtccgagggggtgggttgtctggggtcagccttggaggccttgttctgtttgaaaaacggaataaagagaacacaccccaacttggcagccgtcacaaagcacccccatctaactgcgagaacaatgacgggcagcagtgagggctggcagagcggagaaaagtcggagggaaactgaggccagacagctcggaccagcggctgcagaaaggacagagtcaaggcacgggtgcccactgggcgccctgggtctcagtttcggagggaacaaaatcccctacacaactctcgcacgctcacatctgcgcgcgccccaaggaagaccgaggcgactcccggccgcgcgagctcggaaccaagacccccgggcgggagagcggcgctggggggcgatttctccgacgcgacgagacaagtccgggagccaagactcgcagctggccgggagcggggagggggcgcgcgccgacgcgcacattccccgcctgcggccaactccctgcacaaagtgggctttgtctgggtcccctgtcccctcgtccccagaaacagcggcggagtccccagaaagggagcgggcgcggcggggaggcgaaggctgcgagccccgaggcccagcgggtccccactcgggcgcgtctcagcgggaggacggctggcacctggcgccgcgctgcaccagccgagccatcgcagggcacggggcccgcggctcagcgggaccggctcgggcggcgcgcaggggccaggctgaggtcactgagcggcgggctgcggccgcggggtcgctgcctgggactggctgcagcatgggcggtggcgcggcccgggcgggcggaggatgctccgtggctgttcgctcgggctgcagctgccctggctgagggtggaggaaggaccgcggggcggggaccgcaagcccggaggctcgcgcagcctcggccggcggatgtagctggaggcgagtgacgaagccgggcgagcgcgcgctgcgctggtgcctggggagcagcccgccaacgcggagcccgccaacgagaagcccaccagccgatcgctgctcggcgaagctggggccgccgctgctgcagccccgccgcccctgggccccgctgccgccgaccacgtcccctgccagccagccgcccaccaggctcgactacggcccgcgccgcgcatgcgctccgtcccccccttaaagggccagcgccttcgcgcccagtcctccgccccccgcggcggtgcctctgtcccaagttaccccaaggacgccggtgggcattcgctccctcctcacccagctgtcagggcgccgcgaagccggtgcgaagctgcggaggacgttttcaacgtgccagagggagcgcaaactccatggagattcctagcgcagaaggaattcctgcggtcgggaatttcttgaaaaagattcttcgcaggggccctgagccggtaggaccgagagcactggcctggaagactgggattctagaccggattcagtgcctgtgttgctttgggacgttcagcagttcccttccctctgtaggcctcagtttccccatatcccagccgaggtggtcacagtgagtgagcgcagagtccctcccagcgcgcacagttcttagaggaggacatctagggattgagacggggggtcactatctctggaaacgaaaagggttaaaagtcaccctgttttattcgattgcctgcactggtgggaatggggtgcgcagagctcacccctagaccatctgcctagaccgggctttggacgctctggaccccgcggaccagggtgggaccgcgacgtgggcgtgggaggcaatgcttggggagggtccgctggcctagaggaaggtgaaagtacaaccagctgtggtgcgtggttggacactggacgcaccctccgcctccctcatgccatagagttgtaaatggtgggaaaggcactatctctaggctgaagccaagaactttaggaagagacggccgagtgtgtgctttaagatgctccccctctcccctgcctgtagttagcatgaatcacagtcttgtgggagaatgcagattccttggccttagccggcagattcagattccttagttgtggggtcgttgcatttcttgacaagctgaggttactacacaagggctgggttaaaggccttagagagaccccagggcctcagtggtttcacatctgttctctaaagctgtccctagtatctgaactttctgggtaccctgtgctcccgtagcaacctcttactacctccagggtcagaaaccaagggttatcagtgatgggaaggattgcaagactccaagaaagttagttcagcctggatcttcttaaactcactaaggcaagaagactccaagcgtagaaaaatcactagggatcaacaactatcaccctgtattgtataaaccaagtctcagagggtaatttccccaaactcacacagctagtaagtggcagagctagaatgtgaacagaagtcttacttcttcagacacttgtttttcactctatacattgcttcttgtgttagccaagtggtgctggttttaaaattggcttgcaagctcttgaccattcttttcaaaagatgggatctaattcctttccccctgaatgtgggatgtacttggtgactggtgtctaatgaataaagtgtgatgaaagtgaagctgtatgactcttaagaccaggccataaaaaggagacagcttcttc

SEQ ID NO: 1241778 - DNA, 4001 bp, Homo sapiens
aatatcaacactttggaaggcagaggtggaaagatcgcttgaaagcaggagttgaagaccagcctggagaatacagcgagagacaaaccaccccccgcaacaccttacaaaaaatttaaaaattagccagcatgctggtgcacacctatagtcccagctattgaggaggctgaatgggaggattacttgagcctcaggagctcgaggttacagtgagctatgatcactccactgcactacaacatgtgtgacagagcaagacccctatcttaaaacaaaaacaaacaaacaaaaacccctctgtaactaatgattgggtaagctcctgttaactaaaccatgtactgattttggtttccagaaaaaggattcagatgactgcattttggagttctcatgggaaacaaatggaatcaaccttactcttaaaagtttaattttatttaatctaatttgggatttaaataatcaacgatttccctacaaaagttaaatctgaccctaacttggttcaatgctaattatttttaaaataatcgatgcccacaacactatacaaactgatgttttttttttttttttttttttttgagacagagttttgctcttgttgcccaggctggaatgcaatggcatgatttcggctcactgcaacctccgcctcccaggttcaagcgattctcctgcctcagactcccaaatagctaggattacagacatgcaccaccacgcctggctaattttgtatttttagtagagacagggttttgccatgtaggtcaggctggtctcgaactcccgacctcaggtgagccacctgccttgacctcccaagtgttgggattacaggcgtgagccaccgcgcccggcccaaactggtatttaaagaaaagaacaatgaattatttataacttaattctcaatgtcatggttaacatgttccgtgggaacaaccaagggaaaaagagaggattttggcttttcataacatccaattggcaaaatcctttaaaatttttacagaagcctctagtaaaatgcatataacacttttctcaacatgcttcaccaggtcggtatgataatgatgagcgtatatacatatggtccctggtgacttttatcttctctttactgcatcaactataaggcaaatcccggattcaaagatgttaaaatgtgaagaaacgtgtgctttagaattcatggaataaggttcatcttctaagtgaagagacttcgctcactggatacttacctcttcatagtatatgcagtcggccatcagtatgaagtcgggtggagaaggaaagccttctatttcttccccccttaaaaatgccaaacaaatatttcaattgttttaataattcaaaatactcttgttttataaagaaccggaaagtccccttccatccttttaatgaaacgcaattcaaaacaaactacaaatcaatatcttaaaacaagctgaaaggccatacaaaccatttcagtaccttggcttgaacagaaccagtgacaagatgcttgttcatattaatattcatcttcagcaagtcttgcaattcctcaagatcggtgactacaacatcagccctataaaataacgtcgactgaggtgtaggcacaggggggaaagcctgtaatccggatttccccagcaagaaggcgcccccacatcccgcccgcccgccagctcttacccgagggtagcagccatgagccccacggccccggtgcccgaacccagctccagcaccgaccgccggctcagcgcgtgggccccgtcgccagaaaactcgggcgtttccaggtatttagaaaggacaatggcagcgtcccacacaacgcaacccacgccaccggagctatactgctgtagtcgtagcactgtaccatcccgcttctccaaaactcgcacaaagctccgcagtgggtcctccagcgaggactccagcgtatccgccattgcgcccggcaacagaaagcggcgcgcgcagggacgtcacatcaacgcgcaccgccccgccctgcggctccgccccctgcccgccgctgagttggcgacgcagcgcgcgcgagttaacaaagcccggaaggcagcgttacctgggcggggccgagcgtggggcccctgcttacccgacgcgcttggcagcctccctctaccctaaatcacacgtttggcttaacgaagaggccgtttaaatcactttcccagacaaaactattataatctgctctttaaaaaacaaagccaacctcagagtttaccaagttggacacttgatttacatagtagttacaaggcttaaatgcaatcagcttccaagatcctaccaaagatggctataatcttacaatcttccttttcaagttcctagtatgctcctagttttttgtatgaattcataaaagtggttgctagaagcctgcagctcacatttaacagtgaagaaaaaattgtgtgtgtgtgtgtgtgtgtctataggactcaacaatctccccctttgttccttataatgaaaacacatattttaaaagtcttttaaaaattaagactggggtgatttattaatcttgttaagaactctgatacaaagcacagtaaaaggccacaaaccagtaaataaacaacgtggcttttggctactttacaactgctgctacagcactatcagcaaaacactctatcactttgaacgaaggcatccaaatggcaaataaaagctttactcacttatctgattaaaatgtttaataaagctttaagtatttgctggtttaaatattaccaatctaaaaaatatatttaaaaaaaatttcagttaacacgagatttatagagaaagttactaggtcttgaaggcaaggcagttggttcctatgccatagaattttttttgaatttatgaattagtaaagtagcagattgtattataggcctcaagtcacttaaatttatataggttattagcagtatctttaaatatacaatataaacaaaactgtacatacatggcatattaactgttttccataacaataggcaattcattagctaaagacgtcatagtctgcaaaaacaaaaggcacatctgaatgagatacatgccctttttccctccatcattgggttatgtagtctttgtttacattttgacaaaataataaacacttacagtgccattctattattttcatcctacttttcatttttgtcttcagcagcaaataccggcatttaagacatggcattaaagagtttaagaacagttggtgttattcacaattctcctagatgtaaaaactagaagtaaaaactagaagatggtcaaagaggtttaaaaatcagtaacaccatatacccctcccatatttgtgtaaattcactgccttaaaaaggcatctattactcaaatttgaaaaatttcacaaaagcactatcccttttcagtgcaatcatgtcactttaaaccatatttttgcagagtttacagtgcaaatataaattctttatactggccttttggcagcactgaggatccaagacaaggcaatgctactgatcacctgaggataatggtgaaggacttttgtatttttatttttccaattcttaaaagcttatttgatcagtagcatttttgtaagagcattatttgtaaaaagtactaaaatactatgtctttttttgaataaattaaaaaaaaaactttacaaataccattccagtgtcaatgactacatatggctaaggtcattggggagtttctgcattttctagcaaaggcagtctgtacaatggggggtgcgaaagctcccgtttgtaagtctttggtggcagttttggcagatgagggcttgaattctgccttggtggaacagggggagctggaggatgagcaagattattctgactagaactgagcacatagcatcgacgcggtacccttggagagggtgtgctaggaggagtgcttggcgaatttggaca

SEQ ID NO: 1241779 - DNA, 4001 bp, Homo sapiens
gcttttccttttaatagcaccttcatcaataaaagcttgagaaaagccttgtcatggtagtcctgttgaggcttttgatagcccttaaagatactctactgttacttcctgactttgttttcaactcaggggatatagggatagcaagggtattgtggggattttctactatctggtcccttctcacggcagacatcactaattgatttctactggtacagggttgtttaaaaatccttttctgtatttaattttagggagataaaccaaaaatgctggcagacaccatgaaatcatcccacacagacattgtagtcaggcaaccttgagttcaaatcctggtttctcttaattctgagcaaagtggataaatgactttacttctaagccttggagaaaattatatcctatctcacagggttgcagggaacatctataaaagtgtctagcagaaagtaaatactaaatgttatttccttttaatatggaatatcatactgacatttttctgtcttggttttcccgtctgttaaatgggcataacagatgacctaccttagaaatggttctgaggagtaaaccagttaatacatgtaaagtgcttagtgcctgacccaaaattaacactcaatagtaacttttattattaatacatcatcctggtaccttgggaaaagctaaaaaagaaaatattttttagcaatcctaaagattaaaaaaaatacaaaaattctgagtagccacaaatgctgaagatgtgtatagaacatataaatgtctctggcacacatgtcagttcataaatcactctgtcattcgtttgatcctcagaacaatcttgtaaggtaggcctgggagattccatttccatgttactcatggggaaagtgaggcacaaaagagttcagtatcaaagccactttgttaaatgctcctatttcaaattacaatccaggctttctggctcctagaccatttctagtgtcttgcatggtccttctacctatttttcactttccagaaaactagagatcattccttcactatagtaattatctacagatagacatagaatgtgtctaacaaacacaataatctaccagaggatttctggaatctttttaaccatgcaatggcagtagacaactgccatcaatttgtatttataacgccaaatgagaagctaggtttacttggcaagtatagataatgatctagtggctctagagttataaagtaatcaggtacgattgtcactcttaagagtgacaggtgcttcaacatgatttaaaatacttcagaggtttgtctttatcgtctcttgtttactgacagcccacaaggcagggtgagagacctcaggggagaacaggaactttacaaaggaaaacagaagaatcagcaagaaaaccacaacatgctccctgcctcagaaaactccaaaaaccacctactgagaagtcagacttggtttcaattatcttccgagccaggaagatacaggtgaggcttgtgaactgagaccagggaacaagagttaagctaggatgactctacgggtgaacgtccaggaagccatggatctaccgcagtcgtcagagcccagcggatccctggcagagttaaatgctcgttctgaaccaaatgtccgcttccgaaccaatcgctggtgctcactcgcagccccagtcccaagcgtactccagcgcccaagggtcgccctgactgaaagaagagaatcaggcctgtagtcatagggtgtagggatgcctcctagaagaggggaaaagatcaagatgcggagaggctggatccagccagatacgcgacccaaggggcttgggacaccctcacctcttccgcacagagccctccctctcaggacagcgccagcctccgccgccgctggaccagcccttctattcaggctgtgcagcttagagaagggggcggaagggaataatcgtagggcggagagaaaacacgaataacgagaccgcagggcatgctggaagtcgtagtttcttctgcctctgctgtcaggcgctgtcccgacgaaccacaaggcttcttgactacagcccccagaaaccccaagcaccgtgctaggtcatttcctctcctttccgcgagaccttccgcggttatccagcgagtcacgtagcaagactacaattcccatgaggctcagcaagggcgatttagggtccagggaagcaatgagacgtgttctttgttttcctatgggtgaggaatggttgtatgagcagttgggtttcgggacgctttttggggagaacccgatggagtctgaaggatctctaaatcaggcggaacccacggtgcggcgagttgggacggaagtaaccggtgggagtggggaggagccggaagttaaggaggggagggggtggagggaaaagcaagccaggaggtgcttgcggccgcttctagtagtttccaggcgctgccgggcggctggcactaagcggtcctgaggctgtggctacggctgctccggagctggtggcgccgcgataggagagccgatggccaagtggggtgagggagacccacgctggatcgtggaggagcgggcggacgccaccaacgtcaacaactggcactggtgagggccagaaaagcaggccggccttgggagacctgcggccgggccagggtttcagggttcctagaacctcggcccggacagagctggggctgaggtagccctgtccggagatgggggtgggtccttcctgtggcaggggtccgtagccccaggcctctccactccgcggtcaccttctcagtgtttgaggggagggagatggacgtggagggctgcgccccagaggagggttgtcagagagactaggagataacgccctggctgctgcatccagcccgagcagggaggtgcttattacacgtggccagaggagtcactgagactggaacctcctttgattgtgttgggagatagctgtgaaaggcctaaggccaggggtctgtaattcctattttgcggcctgcggtaaaattaaaagtcattcataggggaccgctgcagcggtcccgcgggagattgagaacgtgttgtgcaggtgctcagagctcagatagctgcggcctctcacccggaactatcaggtcgggtgtgttggaactccaggttgccgagcagccgtggttttataacctgaccgttcttaaaataactgccctccttcatgaaatcttcccaaagtaatattagtttccttatttttgaattccactgaacttttttcgtaatgtttgtattgtaccgttactttgttgcagccttttttgctgttgttttctctaatagttgataagtaggaaggcagatagtgatgtttcttttccatatctcactttgtattctctcttcttaacatgcagagtacttgacctaatttttgttgtttgttttgaagccctggacttaacgtttttgtggccatctaggggacagtgaatgtgtaggaagtttataatgcaagtgcgaatctgataggtcagaacaccgtgccaatgaggtcagggttattggtttaatcctttctgggccttttagctaagtactattctttcatggtccagtctgtgttcctgatctcagcaatatgtgcagttttccacttggtcaaatgggggcgccatgttaaagtatcaagtattcccccgcaccatcatgccgagaaaggagagcataattttccattgagtttataccattttctacagcagctgtctttgttgacagtgtgcaaccccttgtcttcctaaaaaagaatgacatgtttgtggacatactggagtgcgactgggagtttttgtgttcttttcaaactatttgtcaggcctcctttaacctcgtattctcttgcatagagcagcgtatcctccgtttgactgctggttcatagctctgtttctgctttgcaggacggagagagatgcttcaaattggt

SEQ ID NO: 1241780 - DNA, 4001 bp, Homo sapiens
ttctcaaagttaaaaaaaaaagctggcctatttcctttaagaaatttaattttagggtctgtcaacattttgaatgcattactgttatttttaaaatacacacttgcatactggaataaaacttagcataagctttccatataaccatttcctgggcacttactaacttactatatgccaggctctatgcttaacacattactccattatctcatttgtttaacaaatatcctctcataatttttgcagcactgaacataacaagaagacattgcactataaaactggtatttgtactggataccagaactaaattgacagtaacgcctaacacaagtttattgttattaaattcaagttgtgttactgtattaacacagaatctgatcagcaatgttgagatgtagagaataccatctgtggtagcatcaacagagaaagctattattaagtgactacttaagttacattcccttctataggtaacagatgaacataatcttatctacccagaaatttaattccaatcactacatgccattttgaagaacataaacgtaacctacataaaatgactatataaagaacccttgcttccttctgaaaatgcttcaaaattctagattaaattctcccccaaagtatcatgctcagcatgtcataaagaaaggtgcctttattgtcaactcttgaaaataaatgctgccctacttttttttactcttgaatttcagtctcaacagatgggcaattccagtttaaaaaaaaagaagaagaaaagaaaaacacacacacaataattaatgaagttcttcaacagttccctaaaaccaacatcctcccaatagcaaattgtatttccaagttgttccaagaaagggacacaggaaagggaagggaagagtctatacaaaggaaaacaaaaatgagtgacttgaaagaaaggacatcagaaaaatgggtggcctcaacaggaacctatagtgtctgactctgctgctgtctgtcgaatttaattctaccacctaagagttttgagacgagaaccacaatactatttcggtggtaggaaaaactatgcgttgcccctgaatggagctgcaacagtaaaggatgccaccctgccaggtaaggacagaatgaggaggaactgtcaaacggttatgaaagtcccttgcaaaacacacaagcggctctaactgccttgcaccagacagaccctcaagtacaggatcacggggcctccccgcgatgtgacagggaaataacgggcggcctcgcggtccccaggcctggctgctatcctcaggggtcggcctcccctctcaggtctcaagtcaaaggtcacatcctctgagatgccctcccggatcacctaacctaaagagcctcgcccccattcctctagcccgcaactgcctgtcccgtttctaagaaagcatttccgtatccgcaaaacatcgcagctgcgtgtgttgtttcccttctacagagtgagctctgcggggcaggggcctcgcctgcgctgttcacccggagccccgcctgacagaaccggcttcccggtgaggcccgaggcggcgtttgcgagctcggccgcgacaccacgcgcgtccagaacgtggagctcagatgggggccggcctggccagtccaggcatccccgggggcgcctgcggggcctgaacgagacaaggaaggagcggacgcccgcgcaggcggaagccacgcggcggagcgcggtcccgcggggcgaccgaggctgacggcgactcccgcaccccggtggacccacaggccgcccggaaggcccagtgccggccccagccccggccgcccgcctccgcgcccccggctcggcgcgcgagtcctcgagccgtgtcgcctgcggcctccctaccctaagccgcagacccgtcgcgttctgcccagtacgaacttcccgccgctttcgccgactcgtaactcggcagcggcgccggccccttcgcaccctgcagtatggagccttcccattggctcggaggcgacgaggaggggcgggacgagtggtaacgcgaggcgcggggcggaggctacgctagccccgcgcctccccgggaatgccgggagctgtggtccagcgctcccaaggcatcctgggagttggagtctcttagcggcaaagggagatccccgtccttctgctccctggtcttctaggaaatgtggtttacagccttgttcgtagtagcttgatttattaagtgtattggcagagagttgggtgtaaaataagtttcctgtttctgttaggattaaatgaaataatctataggcagtactttaaacttagttggtgctcaataaatagcagatagtgttagtattattctgcccactcattgatatgtgtctaaatcctacctgtttttcgaagcctatttcaaagcatatctcaatgtctacctaatcatctatagtgtttcatctgtaatcaacgtatgccacagtttgcattgtgtttattatttatttttatttatttatttttttgagacggagtctcactctgtcgcccaggctggagtacagtggcacagtctcggctcactgcaagctccgtctcccgggttcacgccattctcctgcctcagcctcccgagtagctgggactacaggcgctcgccatcacgcccagctaatttttttctgtttttagtagagacggggtttcaccgtgttagccaggatggtctcgatctcctgaccttgtgatccgcccgccttggcctcgccaagtgctgggattacaggcgtgagccaccgcgcccggccgcattgtgtttattataatcagctaagtctccatcacccatgaggctgagagcttattgggcactgggtcattgttctaggtcaaaatcactgaagtcacaggcagagggagattaacaatgaagccaatgaagcgtaagcttcaggacctcacttgcgcaggtccctcaatgagtttacatagctttgggggtttatttgtcgattttacttttctttttcttttttttaaagatatagtctcactttgtcacccaggctgcaatgcattggcgcgatctcggttcactgcagccacgacctcctgggctcaagcaatcctcccacctcaaccctccgagtagctgggattacacgcacaggccaccacttctggctaatttttgtattttttgtagagacagggtttgaccatgttgcccaggctggtcttgaactcctgagctcaaacaatccaccccgcctcagcctcccaaagtgctagaattacaggcatgagccaccacacccagctgatttttcttaaagtagatcccccaaaattatgtgagcttcagtccctacaaaacctggaatcactctgtccattagacagggcaatattgtgcctgatgtcttacattttcccctccagataccctcatctgctccaaatacttctcctgcctgccctctgccccaggaggctgacctctacaaattacttcgcgctccctgtgccccctggctttggggcgtgcccagtggagaaccccacagaagattggaggaaaaagaaaggttggttagagtaggttaagcccctggatcctgactggcaaggtcacctccagttggcaggtccctcagctgaaggtcactgctccctggccctccctccagtttgcggtagtagcccttccctttgtgcctcaggtctggaagtgatgacatcacggctgctgctgacccacaagttactgcatcctccctcgtggttcctacccccaacaccgttgtaaatagtctcattgcaaataaccttcctcaaattaccctatttggaattatgtcatctgcttcctgttgagaccctaacagagcatgggcaaggtgagcactcgataaaatctgtcagcaaaaaagtctcaagattcacacatctcatgggtgtggaatcccccagcaagactctgtggccagaa

SEQ ID NO: 1241781 - DNA, 4001 bp, Homo sapiens
accttccaacacaacgtccagatatgccacacttcctcttgcacagtccccacctgtccccaccctcctcgtcccaccctatctactcttcccaggcccagttccacccggctccacccaatttcattcctttctcttccccaaagaggtaggaggtacaagtatgtgataccccacttctggcttcctcaaaagcttaaggaaaagcagctccacactcactcccaacccacagatggattcgcccaccagagaatagggccgtgtggaaagggtaggggctgcacggggaagcctatcactcttaagtagacaattgatgatggggttcaggtgcaacagtctttttggcaatggctctcttcctagaagtgcaatgcaaagcagacaagccggttgccaggtgcattcagggaaggaggtgcaaaaagtgatagctaatctatggactttgcccagctggcctgccctggcccccacaactcttggaagtgatctgaaaaggtatgaaaccaaggaggcaaggcacactcgggattgcacaggctcatcccctcctcttgcctgagattagaagggcgggggtaaaggcaggacatccagaggcatccagccaggatcttagctccagtaaagccaaggaatgaatgaatggccacaggctactctgcagggcactcacagcctcgccttcaccaaggtcagcctccccgctcccccattctttatttcaagcatatggggtctcagaacccaggtctggcctcttgtcccctgcgtcttaagagtgagccaggaatctgggtgggccaagggatggaggggcaagagatctgctgttatgagcctggcctggtctttagaacaaaatccttccccaccagcctcattctgggctctagcttaccatggatcccatgttctcagccctcccttttcttcctctccctcccaaagcaggcgctgtgttctctatagtcaacctgcacatgggccaccaggtctcagtaaggctgtgggttcgattctcccctggatggctggctcctcacccagccttgcgccgtgcctctctgccctgccctccctgccctggccacaccagcccgactgcacaggctgcgcctgccagggcctaagggagcgccagccatctttgctccctccccggtggccctggaggccagctgggcaagggcagctgccagggttggctggtggcagccaagcctttgggctgtgacttcccaaggaaattcccaccaccaagggtagtggctgcaccttgggtcacaggggtgggcctgaggccaccaagtcaatccagcccagttcagttgctctactggaccacgtgtttggaagggaggaagagtgcagcccacaaggggaagcagcacaggctcccggttgccccttaaggtgccaggaggcaatgagtggcaaaagagggagctggcaggtccggggctccagggacgagggatccaacctgagaagcccggggaacctggggagggaccgaggccagaccattgtgtagggtggggaagggagataggcagacgggtgggggtggggacagggctggaggtggaggtgggggtggggagaaagagagcttgaaacaatgcgtcctctccctctacatacactcccagacacacatacaccacagcatcttcacggggccactccttgacctgggcccagtagggtcccgagatcatccctgaccccgctggagcctccaaactgtacggggcacccccacccttcctagttttgaggaaactcgctgttttactgacctggagtgtgacccagagccctgggggcatccacttctcgctccaccttccagcctgggacatttaagtcaccctgtggggaaaggccttctcaagtagcgtccccagccgagctcgtctcactccagaaccagtttcatatctgtagaggaccattgagcatggaccgtctacagccaactggccggtggggaagcggcttaagccactccccccaggaaatcgcccaccctcaagtgctctgtaccaagatgaaagaagtgcaaattcgggggtcacttccaatggtaaagtgatagcagctattgtcatccactctccccagctgggggtgttaaagtgccctgacccagctctgaaacaaaccccaaactgcccagagaaaagttgaaagaaagttgaaagatttccaaagagtttggggggaggggagggaatgggaggagaaggttcagatcgaaagacctaggggaagaaagtctgtggccaggcttgcagaggaggtggaagagagcaaagctggggcccagaaactagctatggataattgcttaagagaaataccttgaggctctctgaaccctcaaaatgcatctctttgtgaggcagctctcaccaaccccagtcctgtaagacaggcagaaccaggcagactggagagctactcacggccccatcatggggcagtctcccttcccatccaggaaggccccactttctctaaaggctgcatctccaccattctctgagcatcccccaggcttggggctcaacacctctcattcccaaagcaagcctgggccagagctgcatctgttaggagccagggggcctatcccagggcacctaacttactgagccccactgaaaggtgggggcacgcagtacctgcagcttcggtccctcccccatggctcacctagggcccaggggcctcaaataatcccaggaggaaccagtccagcccctgctgatgggggaggtgaaggcctcaggattgcagccttggtggcagcttccccccaaggggctttccagcctggctttaaccctttggagtgctgtagctaactgcttctttccaattccacccacagctcctccgtgctgtctctcccctgacaaccactgtaaaatgcccccatgcatccattatgctccagctccactattatcattttctcctctctcaatcacagctccacagttatcaccaaaagcaaaaatccttcacaaaacaccctttcccaggggcactggaagaagagccgccacacttgaactcaagtccagttcctgcatcttaatcacacccgccccacccaccaggaatggcagtggcctgaggctgtggcttagcgggtgtcttggacttgggtttgaatgccaatcctgccccttactagaatgtggccttgggcaaattgtttaacccctcccagcctgactttgtggttaatggggtatagcatctaccccagagagtcattggataaattccacgagatgataaaatttaaaacatttagaactctgcttggtacaaagaaagtgtattctagttctcagcctttccagttaatttgaaattatgtttaaattcttaatataaatatgctgtatttttaaagttttggagaatagtggttatctcataggaggagatggaattacgaaataccttttctttccacactatgttctctctgtgctgtttgacattttataaaaaacgtctgcattacttgctatcattttaaaaaccaatgaagataatttaaaaatttttaaaaggctaatggaatctttcaaagtgttttttaaaaagaaagtagtgaaaaaacaaaaaggtttgttggcttttccattacaaaagtaagagtgttatttaagaataattgggaaatttttttaaagtaaagtaaagggaagaaaaattacctataatcccattatctaaagacagctattgttaacatctcagtatattttgttctaatccagttcttttttcttagaattacacaagttaagcattctctttacaaaagattgaaataatacagaataaaatggccaggcgtggtagtgcatgcctatagtcccagctactcggaaggctggggccagaggattgcttgagtccacaaggtagaagctgcagtgagctatgatggcactgttgcacca

SEQ ID NO: 1241782 - DNA, 4001 bp, Homo sapiens
ccggcggccactcatcctgctcaaccggtgccgacgccaaggcccccgggcagattccgccaaacaacccgtggtctgcgccctggcacggcctcggacctcagatccgttgtcggcgaaaatagggtccgagagacccgatcccggaacgggggacggcagcggggtgcgcgggcaggagaggtaacagaaagcgggggcctcacctgtgtcgccgcttcttccgtttcttggtctggtttaaagcagatttggacatttttcgatcgctggaggaaacatcttcagaatctgaaaagcgggcgtagggacatgcggcagagtgggggacgcgctccgctgtgcccgaaacccgcgagggccccaccccgggctgcctccgcgagcggcggggacctgctctgtctccccaggaagcctgcgggcgccccggtggccgtcccatccctgagctcaggctgacctctcccgcgccggggcccgaatccggaggttttgaacagatttcgttgtaagagaggcaaaggccccggcgcgcttgggaccgggacgacggagagcgaggcagccttagggggccgcagagatccccggcagcgctcgcgaccctgctgcgccctgccctgcgcggccagccccaatgccccgggccggaaagttggcctcgaggagcgaggagcggagcggaggcgtggggagctgggctccgggaagactgggggctgccgagcaccgtccttttcgcaaggcggcacaatgcgtccctactcgaggcccgagagcctgcgacgcgctggttttcgttgcctttccacgtaaaacaaagtaaaacgcaacgaaaaatcgggggaattgccaagctcaaacaggaatcggaggttcgagcgggccgcgacacacctcccggaaagcagcgcggggagaaggcggagaggtcacccagggtccccgagcccgcgcgtccccgggctccagtatatagtggcgcttacgtgggagaggatggcggccgctttagctgccgcgatggccgggttgtctgagctcgtgggggtgaaaaataaaccccagttgaccagcgcgggatttgggaatcagacaactttggacaccagggatggggccggagccggaacagcatcgggctcgaggagtgcggatcctacaccaggccggggccgcagtggagcagcggtgctggggccctccgacacggccggcgactctgcaccacgggctccgacaccccaaacccagttttcagtggggctccaacagagtgccgtggccgagccctgcccgacgcggggactggagaactgcgcggccgcccgaaacgcttggggccgaaaccctgcggacgccgaagcatcctcccgggccccatcaccaggcgcgtcggcccaaggcccaggcggcgacccccggcctggcaggaacttttccgcctggaggcctggtccagcaagcgagagccgacggcgcggggctcccggctgtcgccccccagtcaggcagcagcgcaacctctcctcacctacccgagctggccgtctggctggtgtccagcggccccgatgctctgcccaatggctgcaagtggacgctctgcgggtcggacagcacttccaggaaggtgggctgcgtgtagaagccagggagccccccgggccccagaagccccatgccgcccacccccgcggggctgagcactgagcgcgccgccagcaagtgcccgggggccaggccgtcgagcgctgcccgcgggtgggagctcgggggctccttgttcaagcccaggatctcctggatgccgaacccagtgcacctggccggggcgccccccgaggtactcttggccactgtctcggatttgggcttgctcagcgcttcccctgctttccccgtcatctccctgttctttggaggggctgaggccgcaggtctttagctccccccacccccccgccgggcttcccgcttcgcgaagttggtcccaggtgccccctccggtgtctaatgctctggagcccaaggagattccccttttatccaaccaggcggcagcccaagtggggtcagagctgagcagccaatcaccggggccaggagcgattaggaattccaaaaagctggcagctcccgccgcaggcaatgtcgaatggccagggtgctgggggtggagcaccgggtgggctctgcaggatgcccatgggcagggaccccaggggccgaagtgagacaaccaggttcaggttcagggctgttccgggaggcagagtggcttggggctctgggcagattctggcagggacaggtccctgaggtcaggtggaaggatgggctaagggcagaggtgagagactgggagacctccttccctcaactcctatgcaggttggcagcatcagggcggcctgaatatggcacctctgtgtaaacggttgaacaagggagaggtaagtgctggggcagtgtgtgtggtggtaagctgggaaaagatcaggccaaggtgtgcagagggtgatgtaggggtagggaaagtttgcttccccagcacaaggtataatgcctagttcggaagagctactcaacacatattggcccaatgaatgaatgataaatgggtcagaaagaggggtccctggtgggaaagaggaacagtgatgattacttttggagaacaaccatggacatccaaacctcttcctagagtaagcatgaagcatgcccaactttcatgggaggacttgattcttccacccaattcattcgactaatatgtattgagctactagctccgacctggtagccaggggttccgcagtaaatcagacaaggcaagggccctgctatacttcagagttcattgagcaaacagaatgaagaggaagggattgttgatgtggagggagaggaaggaggaagcgggtgagaggaaattaaaaggtaagctgctttcccctgcactccaccacctcagctaactcttctgtgaccttcttggggctgggaactatcttatcgaccttgaggctcccttcttcactgcgcctagcatatggtcagttcatggtaggttccttgaattgaaggcaccctatggggagataaggactaggtccattgctttaagcagagattggaaaaccaggctgggaagattccatccaggatttcttagccagtcaggtgcaaacccccaaatggaaggaaaccccctagccatacctggcctattgccaaggtgtctggtaccctcgtggctgccatggggccagcctgagaggtaagaggaggcacctcaggatgtggaacctagaccttgctagcagggctgttgtgaggagggtctccactcccattggtttggtccacataacagctggaattaggtaggggcatctcatggtgcaggagatatctgggagagtggtgcctctgtatcccataataaggccgtgcctactgtgtgcctacatcatcccaggccccttacatggtgtcatctctggtgacacaatctcaaggcattcttcaccttatattctatggaggtgggtcccaagtaacaccactcacgtagacaacaatgtgaatggtgccctctggagttgtgcaaagcagtagactcacctgccagaaaagaatttctgtccccatttaatggatacacaaacttatgttgcctaagaggttacctagctagtaagcatcagaggtcagatgagtcagcgcatgagtctgatgtcagaagctgttttcttttgactccatccctctctcagcccactctccatgccagcccaccctgggaggatggatgaggatgttatgttaatggcatctgtcatgtccctgacttatcatgagacatccacgatgagccagatgccagctgatgggcaaacgtgagtgatggaaaacaagtgtgtgagtgatgaagttggctcttgccagatgaggatgaaaaatctcttgaccaaaccccatgtctgaag

SEQ ID NO: 1241783 - DNA, 4001 bp, Homo sapiens
gctctcctttgctcactccatcccaaacacatggaacttcctgctcttcgctgaacacaccaagctcatttctgcttaaaggcatttgcagtgctattccctccttctgacactcacttctccctgatttctggtttactccctcacttcatttaagtctctgttcaaacgccatctcctcagagaggactttcacaaccgccctatttaaaactgaagtcccaaagaaggcggatcacttgaggtcaggagttagagatcagcctggccaacatggcaaaaccctgtctctactaaaaatacaaaaataattagctaggggtggtggcgcaactgtaatccctattactccagaggctgaggcaggagaattgcttcaatctgggaagtggaggttgcagtgagccgagatcgtgccactgcactccagcctgggtgacagagtgagaccctgtctcaaaaaaaaaaatgataaataataaaataaaactgaagtcccatcccctattcttttactctgatttactttcctgtattctttaacactgcctcttaatagttatatattgtttatcacctacccactagaatggggatgttcgtatctttttcactgtaatttgcaatattcaccagcacctagaacggtgcctcacaattcaccagcacctagcacacagcagcctcacaataaatatatattaaatacatgaatttcattctcaccagtcattcaattcctatgaccttgagtaattcgttgagcaaacacccaagctctgactcttaaataaaagcaataaaacaaagttttgtccttgccatcaaattctatatatccggaggccaagaactatagcagcttttcctatggatttagggccggaaaactctagctcctccagacagaacttgtagcaacctgaatcatgaaattaaggggtagtaaacagtctcagctgtaaaaacgttcaaaacaagaccacatctaaatgccacaatcaggttttaaaggccagctctctaccctccaataactggtatttaccaacacccccaaattatgactcctttgggtttttaaccctttttctgtgctacggatcctctgtcagtctggtgaaaactagacctgtcttgagactagtgcttttaaatgcataaaacaaacaaaaacagctatgaaagaaacccactctacattacaggaccgcagatgcaaaagcccctctgctctatttgccacagtgaaaaaagatgagaaaatgtggaaggccatagaaggatcccagggaactgaatcccgaggtccaatttactctcagtggcagcagggagacctggggctgggacaagccagccctagggggcgtgtctgaggacgcggagggaggagacgcgggcccgggtctgggaggaaggtgggagaatcttccttccaaagcgcgcagggctgcgctccccacggcgtggcccacccccgcctcaccggtccccgccgtccccagcagccgctcgggcaccccttgtaggtcttcatggaggccgcggaagatctcgtgcagcttctcgaaatgctccgaggaggcggcggaggaggccatggcgcaggccgcgctggagcagcggccaccgagattcggggccctgggccctttcctagcccggcggtcagccgcccagcccagtggccataacggcgaccgccgcaccaccgccgcccaggacgaggctcttccggagccgcggcagggtcctctcgagccggaacgcccaccttctccagccagtgattgctggagcgccggcgcgaaagcctgacgagaagtcgggagactgcgcggcctaggcgactcctgagggagcggtgccgcgccggggcgatcggcagtcgcggaacccgagaagtgccgggtccgggttggggaaaggccgcagcgaaaggggcctaggggacctgcgggactggcagcgcggccgccttcctcccgggccccgccggccggcgaggggcgggcgctgcagtgcacgccgggggatgtagtttggctcggacgagagcgtctcgtcccggggtcgcgcgttgctccgggtgccaggttcagcccgcgcggcgacagcgggcttcggcccgatttgatgtatgtttgcgtctagacgtcgtcctcactgtcatcgcgctttgctttgccaccctgacccgaattcctcgtttcgcgtcttgactgttagctttcggccctggaaagatagccgggccaggggctctgcctgccgtcgggaggtggagcacttttcttggaaggcccagcggctccccaagctttcagaagtggaacccggccgggcgagtggctcgcgcctgtaatcccagtactttgggaggccgaggtgggaggattgcttgaacccagtagttcgagaccagcctgggcacaatagcgagagctctaccagaaacccaaaataagaaccgggcatggtggcgcgcacttttggccccagctacccccggaggctgaggtcccaccactgcactccagctttgggagaccttgctcccaagtggagcgagatcttgtctccaaaaaaacaaaaaacccaaaaaccaaaaattcaaaagtggaacccagttaggatgacctcgaaatactctagctgctaggcccgagtaattctcctcgtggagactaattctcctcctaggctgcctcgtgcacttgttgacaacaggtgtttgtcaagcgtaggcattgcgagggatctgggcatgttggtgaataaaacatttaatctctgctccaggggaatttataatctggtgtggaaggtgggcctggcttcattaggtctcatctgccactaagtgtcacgtgttaaaaattacaaggtcccttcttgcactccatgggtataaattcctgtcttcacgtcgggcatggtggctcacgcgtcatcccagcactttgggaggccgaggcgggcggatcacttcaggtcaagagttcaagaccagcctggccaacatggtgaaacccccgtctctgctaaaaacacaaaaattagccaagcgtggtggtgggcgcctgtaaccccagctactcgggaggctgaggcaggagaatcgcctgaacccgggaggcagtggttgcagtgagctgagatcgtgccaccacactccagcctgggtgacagagaagaccctatctcaaaaaattaaaataaattattattttcaccgatttcacggtttgctcaaggtgtctgttctcaaatgtttgcttgggagttcaattttaaactgcctacaaatattaaaagatgtatgactgctcaggagaaaatgctttgctaatttgtatctcctgggccctcatttttattagatcaagttcattggctgttgattcaacacactttggttaagctcttaatatgcactgagcatagacatgaccaagtctgaggatagtcagtatactgtgtaagtcccacagcacaatgctgggacttgtcacagtacagaaataaggggcaggtgcaaaaaaaggatcaatagcctggggccgggtgctgcggctcacacctgtaccccagcactttgggaggccaaggtgggaggatcgcttgagcccagagtttgaggccagcctgggcaacaaagcaagacgctgtctctaattaaaaagaaaggaaaaaaaaatggcccgggatgatcaagaaatgtggaaaaagtgtctgtgaagagtgtcaaaaaaggttaagtaggaaatggtgaatgaacaattagattatcacacaacctaaattaatagcatgtggattgagattacactgtagctagactctggaacaaattattctttagaatgagaaatcattgcacaaccataataatgaacagtgttttcttcttttgactgtaatcaaacttttaattcttagtttttattctggtaaatgaaaacaaaaaataatcaaaaagaatttttatttgtcat

SEQ ID NO: 1241784 - DNA, 4001 bp, Homo sapiens
aggacagccaatctcccactgcaatagaatagataactgtttctttgctagaggatcagctagataaacaggacttgcatttagggtccatgttgcagggaaaaacatgtgtctataaatatcagaactccatttaagaagcacatgggaatgaaattagactgaggaaatagcagatgatcatgatcacaaggcatatactttgcgtgggaatcatccacactattgaaatcttgtgtgtgtgtgtgtgtgtgtgtgtgtgtgtgtgtgtgtgtatgatgcaactttctgtgtggtcagagacaaggagaatggaactaccatcttcctcatttcacgcatttatgagtttaccccatttcctgtgtaaatgttcttcttccccctacctattgacatcctcctttatttctttgttgactttcagaattgagttgaacttcagaggtttttcaacttggagttcaggaacatctgaaattacattaatgcttgcaagtacattggtatgtacatggttttgagcagtctcctggctttcttacctttcgaaaggaggctgagatgccaaaaggttaaggaccattgtcttcagtgtttaccacataaattgcaaataggacattgagactttgttaagagaagtagattcacctgtttaacaaatagtacactctgaaacaaagaaatgcagttataaccagtgaagtactctattatcttccctaaacaaaagtactgggcgtgtaaagagcaaaactgcctactccacagcagatcacagcagaccttcaaggagaaagctaaaaagcctcttgaaaattaacccccagttcccccttttcaagaacttgaatcttgtgctcattctgaaagtttccactgtggtggaggagcataataggcacttaaagaaactgggtattgtattgggatgaggagtggaaaggactatagaattgtttaacagaacaacatgataaagacttgggttgcatcaaaatcatctcacagagatcagggcacgctgattctgcaatctggggaagggtggcatcaagacagccaattctggagcaggtgagaagagaatgtggcccaggagtgtttctggatccctggaataccaccaggaggtagaataccatcctttctatcttggccccagagtgtaggtgacaatacctttggactggcaagttcccagaggacaagaaaatgacttctttagagcaaggatttcttgacaccttttgggacccatcatgttccattttttttaaacactaaaagaaagattgctttccccgccaaataacagcatgaacattatcttaaaaggcaaagacattaatttctatgaagccaggcacgagacacttttgggtgtcacaataagaatgacaatacgttctgatgttgagcacagaaggagggtgcatcagtgaaaattatgacagacagcatgacggtgctgagaggcaagctacggatccaagcccgcgactgctcagccaggatctctgttccctatgggagcagtgaatcacctgaactttgggtcaatggaagaagtaaaatgcataacaccctaatcctaagacacaagtcctgaccccctaaaccaaggttttcagcactttgctaaaaacacgaacaagctctaagcctggcaaagatggcaatacatacccaggttgtggaagacactgcagaggtggccactggtcacgctgggcagttgagctgctgagagtgccctgcccagccagaaatggtctttaatactcttcccctctttctttcagtttcccttctgaaaaaagatgcttttgtctttcgttctccccaccctgcattcagctaagggtttcttataaatcacccagattctcagaaacacttgagctcttgaccaaccttcttgatgagactgtccaatcaggggtgggttgcctggggggccaggttgagaccaatgaaaccctcttgagaatcgagccattagctggtcattgcatcagccacccctcaccccccgctggcctccaaataacctccccaccctcttcccgttccccaccctcagcgtcagtgtgactgattttgtgtagtcgtgggcggtggaaagagaaactgtaaattccccgcatctgttcaccgaggcggcacagtgcagtggaaagatcaggagttctggggtcacagacgcctgggtttcaatcccagcttggacttattcgaaaccttgggcaagggtcgcattacttttctgcttccccttcggtttcctcatctgtggaatgggcatggagaagcctgctaacattaccgttgaggggactaagtgcaacactacgcaaagcctctggcacatggcaggcgctaaataaaaatgggggcctctctcctcgggaaaagcgaacaggcggagacgatgaagggtgccagtgggaaagggagacggggtgggtcggcggcgctcagaggaaaggggcgaggggtcggtggcaggctccgcgcctcacagtgccagaacgcggcgggcagcaagccgggctctaaggatactcccgggagggccaggccactgggcgccgcgccagcgtccctccatcactccctcccttgtttcctcactccgccccggccttactcccctcgcttaccctgcccagccgggccagtcagcgctcccggctcagcaaccggctgtctcctgggcgtccgtggaaacgccgtccggacggaacaacttccggcccgacggcgccgtcattggctgttcgcgcgggggcggggcagaggccgccactgattggctggcggccgcggcgtcgcgtcggaacgtgactggatggtagtgtgctggccggtctgcctccgggagaaccgagcgcttccggtgcgtgtggtgagcggcgggccccgggctggaggggccgggactgggcagcgcctaaagcgccccgtgccgcttaacgcggtctctcatagccgctcgccttcctttcacttcctgttccttcagaaagcgctgtgccttggaccaaccttacttcttactattgacagctcagctaactcctattcatccttcaaaacccatctctggtcgtatcttgtttgttgctttcatcgctctggggcctccggggggatctgtgttttgtgtttgatttccacccacaccagacccagcatagggcttgacaaagagtacgtaatcaggaaatgtttgttgaatgggaatatcctatttcttttacttcctagcatctccccctcccacccgtttgcattccagaaatatttttagacgctgggcattgaatagtgaacaaaacacagaaagtcctgtcctcatggggctgacttgctgatagtgactgtcagagtcactcgctccttccttagactcttctccagtgtccctgccttcccttccatcttactgtctgttcctcttcgtttaatccctcatctccttccagagggagcacgggcaccctggtggtgggaatctgggtgcatggtgggtggtgcctgggcagaggagttgagagtggcctcgggaccaggcttagcatttagagaacagaaatgccaaattatttgcagtgcacggttccattagtttataattagtctttcatattatattagttccattggagatgagctggctggctggctttagaagttgttgttgttgttgttgttttttgagaccaagtctcgctctgtagcccaggctggagtgcagtggcgtgatctccactcaccgcaacctccgcctcccgggttcaagcaattctgcggcctcagcctccagagtagctgggattacaggcgcgcaccactgcacacggctaaattttttttttttttgtatttttagtagagacggggtttcaccatgttggccaggctggtcttgaacccccgacctcaggtaatccgcccttctcggcctcctacagtgctaggattacaggcgt

SEQ ID NO: 1241785 - DNA, 4001 bp, Homo sapiens
gcaaaactgcctactccacagcagatcacagcagaccttcaaggagaaagctaaaaagcctcttgaaaattaacccccagttcccccttttcaagaacttgaatcttgtgctcattctgaaagtttccactgtggtggaggagcataataggcacttaaagaaactgggtattgtattgggatgaggagtggaaaggactatagaattgtttaacagaacaacatgataaagacttgggttgcatcaaaatcatctcacagagatcagggcacgctgattctgcaatctggggaagggtggcatcaagacagccaattctggagcaggtgagaagagaatgtggcccaggagtgtttctggatccctggaataccaccaggaggtagaataccatcctttctatcttggccccagagtgtaggtgacaatacctttggactggcaagttcccagaggacaagaaaatgacttctttagagcaaggatttcttgacaccttttgggacccatcatgttccattttttttaaacactaaaagaaagattgctttccccgccaaataacagcatgaacattatcttaaaaggcaaagacattaatttctatgaagccaggcacgagacacttttgggtgtcacaataagaatgacaatacgttctgatgttgagcacagaaggagggtgcatcagtgaaaattatgacagacagcatgacggtgctgagaggcaagctacggatccaagcccgcgactgctcagccaggatctctgttccctatgggagcagtgaatcacctgaactttgggtcaatggaagaagtaaaatgcataacaccctaatcctaagacacaagtcctgaccccctaaaccaaggttttcagcactttgctaaaaacacgaacaagctctaagcctggcaaagatggcaatacatacccaggttgtggaagacactgcagaggtggccactggtcacgctgggcagttgagctgctgagagtgccctgcccagccagaaatggtctttaatactcttcccctctttctttcagtttcccttctgaaaaaagatgcttttgtctttcgttctccccaccctgcattcagctaagggtttcttataaatcacccagattctcagaaacacttgagctcttgaccaaccttcttgatgagactgtccaatcaggggtgggttgcctggggggccaggttgagaccaatgaaaccctcttgagaatcgagccattagctggtcattgcatcagccacccctcaccccccgctggcctccaaataacctccccaccctcttcccgttccccaccctcagcgtcagtgtgactgattttgtgtagtcgtgggcggtggaaagagaaactgtaaattccccgcatctgttcaccgaggcggcacagtgcagtggaaagatcaggagttctggggtcacagacgcctgggtttcaatcccagcttggacttattcgaaaccttgggcaagggtcgcattacttttctgcttccccttcggtttcctcatctgtggaatgggcatggagaagcctgctaacattaccgttgaggggactaagtgcaacactacgcaaagcctctggcacatggcaggcgctaaataaaaatgggggcctctctcctcgggaaaagcgaacaggcggagacgatgaagggtgccagtgggaaagggagacggggtgggtcggcggcgctcagaggaaaggggcgaggggtcggtggcaggctccgcgcctcacagtgccagaacgcggcgggcagcaagccgggctctaaggatactcccgggagggccaggccactgggcgccgcgccagcgtccctccatcactccctcccttgtttcctcactccgccccggccttactcccctcgcttaccctgcccagccgggccagtcagcgctcccggctcagcaaccggctgtctcctgggcgtccgtggaaacgccgtccggacggaacaacttccggcccgacggcgccgtcattggctgttcgcgcgggggcggggcagaggccgccactgattggctggcggccgcggcgtcgcgtcggaacgtgactggatggtagtgtgctggccggtctgcctccgggagaaccgagcgcttccggtgcgtgtggtgagcggcgggccccgggctggaggggccgggactgggcagcgcctaaagcgccccgtgccgcttaacgcggtctctcatagccgctcgccttcctttcacttcctgttccttcagaaagcgctgtgccttggaccaaccttacttcttactattgacagctcagctaactcctattcatccttcaaaacccatctctggtcgtatcttgtttgttgctttcatcgctctggggcctccggggggatctgtgttttgtgtttgatttccacccacaccagacccagcatagggcttgacaaagagtacgtaatcaggaaatgtttgttgaatgggaatatcctatttcttttacttcctagcatctccccctcccacccgtttgcattccagaaatatttttagacgctgggcattgaatagtgaacaaaacacagaaagtcctgtcctcatggggctgacttgctgatagtgactgtcagagtcactcgctccttccttagactcttctccagtgtccctgccttcccttccatcttactgtctgttcctcttcgtttaatccctcatctccttccagagggagcacgggcaccctggtggtgggaatctgggtgcatggtgggtggtgcctgggcagaggagttgagagtggcctcgggaccaggcttagcatttagagaacagaaatgccaaattatttgcagtgcacggttccattagtttataattagtctttcatattatattagttccattggagatgagctggctggctggctttagaagttgttgttgttgttgttgttttttgagaccaagtctcgctctgtagcccaggctggagtgcagtggcgtgatctccactcaccgcaacctccgcctcccgggttcaagcaattctgcggcctcagcctccagagtagctgggattacaggcgcgcaccactgcacacggctaaattttttttttttttgtatttttagtagagacggggtttcaccatgttggccaggctggtcttgaacccccgacctcaggtaatccgcccttctcggcctcctacagtgctaggattacaggcgtgagccaccgcgcccggtcgttttatttaaactctggctttgcgtgtggaagttgttacctgcctggaatgggctgcgaacgggggcggcattactagaggaggctgactacagacatttatggaatgatgacctgacttgtagaccagtggaaccctcaggcgaatgatgccacttgggggaaaggtgtggaagaggttgggtggttgattccaggggacatagaaacccattgtctagaagaagagatgggtaataggctgtctggaatgacttagaaaaggacttggagggaatctgttgatgctgacctgactccacctgttgggggatggaggcggagcttggcgtgtttgattaaggttgggtgcactgggttttcttggaagtcggtctattgcctgagcgttctgtgctgttccaccgcgccctctgctgtcctaggagtgcctagcacccttctttttctctggattgtgcttggtgctaacagcacagaagtaaaaaattaccaaagcacttctttctgggaactaattgataaccatgtattgtgtatgatggttcagaatttcagaaagattttttttttttttgagacgaagtttcactcttgtcgcccaggctggggtgcaatggcgcgatcttggctcactgcaacctctgcctcctgggtttaaatgattctcctgcctcagcctcccgagtagctgggattacaggcgtgtgccaccacgcccggctaatttttgta

SEQ ID NO: 1241786 - DNA, 4001 bp, Homo sapiens
gggaaaaaccgccttagggctggaggtgggacctgcgggcagcaatactgctttgtaaagcattgagatgtttatgtgtatgcatatctaaaagcacagcgcttaatcctttacattgtctatgatgcaaagacctttgttcacgtgtttgtctgctgaccctctccccacaattgtcttgtgaccctgacacatccccctcttcgagaaacacccacaaatgatgaataaatactaagggaactcagaggctggcgggatcctccatatgctgaacgctggttccccgggtccccttatttctttctctatacttagtctctgtgtctttttctttcctaagtctctcgttccaccttacgagaaacacccacaagtgtggaggggcaacccgcccctacacaaactaatacaggtatcttctaacagtctttctgcatccatgagtgctccttttccaattcatcctccatgcattttctcaaaaacaaacctgatcacatctctctgcttcaagcctttaataccttctcagtgcttttaggataaaacgagattccttaataaagtccagaaggtcttggataggacatccattgcctaacttcacagattcatctctcactaaactctgcatcactctccacattttagtaaggctagttttccttcagttctttgagcataccatgatccctggccccattgggcctttacacacagtattgcctctgcttactatgccaacatcaccaccccaccgccaccaccactcatctctttatactgcttaatgcctgctccgtcttcagatggcgtctcaagaaacacttgtccaaagaagccttccctgactcctttaactagatgagcttctcctcatacatgtttatcactgcacatattacttgtttctaaatacacatttatttttgtgattaatttgtgttcaatgcctgtcaatccaaaaagaccttaagctcaaaggaggaaaagactgtgtctggttcgctctattctatctgtagtccccagcaaaagagacacacaagtattttttcaatgaatcaatcaacatagaagcgacagtggaagccgtgcaatcgagcagtagtgcgtaagaatgggacttggaaagataaaagggaccagaataaccgtaggaaaatattatagtttaggaatcagaggaaaaaattgttttaagccgtcaaaaagttaaaaaaaaataagcaaaaagggaaatagcatcactaaaggcatggaaggatatcattccaaacagaacaggccactgaatttgacaagtaggcagtaactagtgatctgacaaaattaataatgtaagatgcagggaaggggaaaatatatggagagaagctcgcatctttccaactcctctggaagtacgattataactttgtcgatatactacaactaccatgacggcccgaatcaaacaataatctaaagaaatatgtgtgccattttagatttcaacattattcctctatccgcatgagtcatttttagctgactgcacatataaagtttaaggataaatgttttaacatttgcacctaaaacgttgtttctcaaagaaccttacctcccagaatcatcaaaacagacctccgtgtgtccctctgtatgcccatatctcattggcttccgtgtggcaggcatgttttcctttacctatctgaaaatgttttataaaagccagtcttattatttcaaaagagaaaagcagcgaggctagggataggaagagagcttagtctcctctagggcccgttctccgcagcccggtttcccccacccgagtgacaccagcgggataaggcagagggtctgtcagacaataagccggaaagggaacacgcatctccttggtggacgcgggcagccggagtggggactcacccgggtgaccgagcctccgccactgaggatccacaagagctgcttcccgcgcttcggctcgctcaccacactgcgcctgcgccgacccgcccacgcccagcgcaggtcccgacagaggtcgccgggtggtggcgtcagctgcggcgccctccgcgtggaaattagccggttgcccgggcaaatcagggaggaagggagggagctgaacacggaagtggtggcggcgcccagggaaccggcggaggcgatgaccgtgacggctgggttgggaccggaacgccgaagcggggttgggggtggcagaaaagcatctgctttgtaagacctacacgaggtgcaggagtggttgggcctcccctctccacttaagcaagcgcccagactgatggcgatggtgatggcagcagttactcgcacaaccccagttaagctgcgctccgggaggtgagtgggggaagggtggccgctgcctggcctcgcaggccggggtcttgttcctgccctccaggctctcctcccaggaaacaatatccggatccctaaaaggatccggtctctttcttggggcccagttagcagacagatctttgagcatcttctctggaaaagaaggcgagatcttctagagcctctaatcttggcatccttcgtgccctcaccttgtcgcttctgtagagataaagaaggaatgacttaatttctgttccggttggttctcttggtacctgaaggtataattaattaatgctcaattaatgcttattctttgcgactctatatatccgttatgaagaaagtaacttgtgttctctattcagatcccacctaaagtttactgaagtgaatatttataaccaaaagaagagttataacttagtagccttgagcacttacatttgatccatgcaatatctgctaaagtcttggccactaagtttaagtttatgcttttcttgtatcttcattctccatattggtacagcagcctgtgatgaaaaccttcagaatgatattctttcatttgtacttatctttgagaatttttctgcgtttttgtgataccttccagtatcaatcacatttattttattacctgagacgtttttctgttgaagaggtttccctattgtttttttcaatctagttccattgtgaaaagttgcaaacacacaggcaaaccgtcgtgttcttaccgtgggtggcattgtgtgaggcgttgtttttagtactagagctccagatagccttgctagacgctgaggtttgtatatgaatgaagaggaagaatgattggcttaaaaacaacttgggatttgtggaaaaataacccactgttgatctcccgaaagagcagtggtaccagagatgatgctttctgagtgacctaattttttttttttggagatcatttgttttttggatagactggcttataaattttttcgttcaagtaacaatatcattggctagagtacatagagttcaagatgaactctcataatattcgtctctatgttgaataaagcgtggtgagatttctggttagtactattcagagctcagcataagaagaatctgcaaattggaacaagttatagctacaaaatgccttcactataatatctgtaatacccatgagactatgattgatgtccacacatctgtcattttctcttatcaatcaagccatttgattcataggttaaagaacaattttctttgcagattttgcatgtatggtaaaagcttgagcctccgagtttaacagtcctgggttttaattctaactgacacattgtgtgaccttgaatatgttcctttactgaaaatcgaattcctcatctctaaaatggagatgacacctacctccgtcgcattgttagagtatataggagatactcatggatgtataaaagtaattgttattaatatctcatgttactaaaggggtgctttgggtgggtatttagtgttttttgtttaaagtgggatttgtttaaataattatccagtaaatttttcaaatattaaaaaatgtattcttgtttttgctagtatcatgttttcacaattcc

SEQ ID NO: 1241787 - DNA, 4001 bp, Homo sapiens
atttttatataaatataaatttttataacttaaaattctaaacttaatttcctgagacaaaattggtcctttcactctgattatcaatgtcaagacagcagcttcttatttgacagtcagtatttaactatattttacatctactgagtgtttcagggccttaaagttcattatgattattatattattaattacaacgtgcactgtaacattccctttttaaagaggtgcaaatagaagttaaataacttatccaaggtcacccaaacaagtcagtgacaaagttgggagtaggagtaaaacttcagcccctagactgaagactacttcgagcttttgcaattccaaacgaggaaaaaaaaaaggtcaagcgatttacccttaataacttccaacagcataccctaaatacagtggtacacttattatcataaagactaagaaaaaaagattcaccctgaatcaaagaaacaactttgctacatttagataccactgtcatttccctagctcttgtaacaagcgaaaatcctgtactggatctggctatattaaatcctgaagaatgttcactcttcaatatgaacaatttattttcatgctaacatgcatttacgacttaatcttttatcaccttgtcctatttggaggtgctgtgggatgcattaatttcctcactcttccatgacatcaagtcaaagactacaatctcaaaaataagcaattctcagtgaaaacatagttacatagccaatgaaagaaaaactctaataaatggctgcttttaaagagatacttttaaaggatgcttacatgtttcacagaattaccggtaactcgcccgccaagaaggatggtccctttaaagcagcttttaaagcatatcactccctgtttgggacacagtctgacttgttggacaagattaatctgggcactctcacacaacccctctgaaccagcttagttcactggaaacatcatttcaactgtagtactcagcccttcgcatactacaagggacaagatgactctccttaacaatctttcagaaggtccccacggcggagacagtgacagccgtcctcccgcggatgtttttggaaatagaaatgttaacaccaggagaggctcctaggaagtgtcagtgcggcagcaggtggagtagccctgcgtgccgagcaggttctttctgacctagtctcaatgctccgcttcccggccccggttccgccttacagagatcttgttaagccgtcttgcgtccctgttctctaacccagggcgagacttccaaccctccagggaggcgaggcaatcgaagcagacaagacggccacctcacctcttccggggactcgcaggcccgctccctggccatgtcagagcctgatggaccaggctggaggggacgcagccggctcccccgggagcctcccagccagaacccccgcgccccacggtccctttccactgcccccaccccttcgaaacgccaccgccaccaccctccttactcctgaatcccctctcctcaggagtaccccagtggagttaccggcccactcaaaagtaagagcgacggccacccctctcggtcaccctggccccactgtcaccgccctgctcccggcctctgcctacgccgctggctggctccggtgacgcccgggtcggtaccttgcggacccccttgtagatatagaagtacagctcccggcccacattgaagcagaggcggtcgccgttgccagactggtcgttgaggtttacgaaggagacgcggacagggttggatccctgcgagttgaagggcacccggttgggccggctgtactccgagtgcggcagcagcttgtacagaccttcccgggtggtgaattgggtcttaatctcgttcatctccttccctcctccctccgtcgccatcttggaaagcagcgttcatcctgccctaagtgcccggatcacgcccaccgcgcaggcgctgttcctggtgctccctcttcccccaccccctgcctcttccttctcgcccctcccacccgcgggccagccctgcgagggcgggccaaagggaaggggtgggcttgtttacggcccgactgcgcaggcgtgctcacctggcgtgctccacccgactgggcgtccgcaggctcctcccccgggtgtggcctccgggcggcatggctgcttcccaggtgatgccggcttcagctagtggggtctagttgaccgttccgcagccgccagggccagcggaaagccggtcagggggaaccgcggcggggctggtgtcatgagcctgaggtgaacttgagggtgcctcctcagcggtctcccgccctgccctgaggggcgccgggaccccaaagagcggaggaagagcgccaccccgacggccaccgcttcggagccagcacgcggggtaccctacggggagcgcggatgcccccgtgttcgggcggggacggctccacccctcctgggccctcccttcgggacagggactgtcccgcccagagtgctgaatacccgcgcgaccgtctggatccccgcccaggaagcccctctgaagcctcctcgccgccgtttctgagaaggtaccaagggactcaagatttacgcttcactatgttttatttcaggcggggtagggggagagaagaatgtggtacagcataggtgttctcaagccagatatcctaattcctgcgtgtgatgagcactggcggcctccgcttcttagcggaggtttgtcctctccagctgttcagaaacacggggcggggaagcgctttgggaaccggggactgaatctttttaggattcactgatcttgctcagtaggttacgaagagctcttaataaaatttaaggtaattgtttttttttccagaagcctcaggtggagtctgtgagattatttactagtagatccatagggatagttgtatgcatgtaatgtacagggtctagatttataaggacgggcacacgtgtcaaagtaagattcaacaatcactattttatacctgggtttcttggcatgttacaccagaataagaaagcttctaaagtgacagaaacattctaatagaattccagggaggggggaagccaacatttgtaacaccaagaatgatctattcctggaagttcagattatatctggaggggcacaaaagaagtgaatggagagaatttctaaagtaggaggagtgtaaatcataaacatcttccgtattaaaaagcaagtagataccaatagaaactgtgccaatgatgtagtaatacatttgataataacatctttagcctttgtagtgttggaaaaaaaaaagaaaaaaaagcactgaagtacttcttaattaatagagcctgaaaaatacttaaaattttttcttagaattgttttgatgttatccgactttccctaatcttaaaacaccagggtatgttctgtcgttaccatggctatatcccaaactccataactgtgttattttacattgaaaacacgtattttacaataatcaacttgaaggatagtggcatcttgaatcatctaaaaataatttatctgtgtttcctaattatcaagaggaaaaaaagtataatttttggggggggaaaaaaacccagcgagcaaaagttaaaacaaaattttgtattattcttcaattaaccataacattgtatttcccataatacctatataattcaagcattctatcaagattttaccctatataaattcaacattttattataatcacagtaataaactgttcactttgtctcatgcatagcctttggtttagttttgttttttttttcttagatggagtctcgctgtcgccatgctggagtgcagtggtgcaatcttggctcactgcaacctctgcctcccaggttcaagcgattctcctgcttcagcctcccgagtagctgggactacagatgtgcaccaccacgcccagctaatttttgtattttta

SEQ ID NO: 1241788 - DNA, 4001 bp, Homo sapiens
gaggtgggcggatcacctgaggtcgagttcgagaccagcctggccaacatggtgaaaccctgtctctactaaaatacaaaaattagccgggcgtggtggcacacgcctgtaatcccagctactcgggaggctgaggcaggagaatcatttaaacccaggaggcagaggttgcagtgagccaagatcgcgccattgcaccccagcctgggcgacaagagtgaaacttcgtctcaaaaaaaaaaaaaatctttctgaaattctgaaccatcatacacaatacatggttatcaattagttcccagaaagaagtgctttggtaattttttacttctgtgctgttagcaccaagcacaatccagagaaaaagaagggtgctaggcactcctaggacagcagagggcgcggtggaacagcacagaacgctcaggcaatagaccgacttccaagaaaacccagtgcacccaaccttaatcaaacacgccaagctccgcctccatcccccaacaggtggagtcaggtcagcatcaacagattccctccaagtccttttctaagtcattccagacagcctattacccatctcttcttctagacaatgggtttctatgtcccctggaatcaaccacccaacctcttccacacctttcccccaagtggcatcattcgcctgagggttccactggtctacaagtcaggtcatcattccataaatgtctgtagtcagcctcctctagtaatgccgcccccgttcgcagcccattccaggcaggtaacaacttccacacgcaaagccagagtttaaataaaacgaccgggcgcggtggctcacgcctgtaatcctagcactgtaggaggccgagaagggcggattacctgaggtcgggggttcaagaccagcctggccaacatggtgaaaccccgtctctactaaaaatacaaaaaaaaaaaaaatttagccgtgtgcagtggtgcgcgcctgtaatcccagctactctggaggctgaggccgcagaattgcttgaacccgggaggcggaggttgcggtgagtggagatcacgccactgcactccagcctgggctacagagcgagacttggtctcaaaaaacaacaacaacaacaacaacttctaaagccagccagccagctcatctccaatggaactaatataatatgaaagactaattataaactaatggaaccgtgcactgcaaataatttggcatttctgttctctaaatgctaagcctggtcccgaggccactctcaactcctctgcccaggcaccacccaccatgcacccagattcccaccaccagggtgcccgtgctccctctggaaggagatgagggattaaacgaagaggaacagacagtaagatggaagggaaggcagggacactggagaagagtctaaggaaggagcgagtgactctgacagtcactatcagcaagtcagccccatgaggacaggactttctgtgttttgttcactattcaatgcccagcgtctaaaaatatttctggaatgcaaacgggtgggagggggagatgctaggaagtaaaagaaataggatattcccattcaacaaacatttcctgattacgtactctttgtcaagccctatgctgggtctggtgtgggtggaaatcaaacacaaaacacagatccccccggaggccccagagcgatgaaagcaacaaacaagatacgaccagagatgggttttgaaggatgaataggagttagctgagctgtcaatagtaagaagtaaggttggtccaaggcacagcgctttctgaaggaacaggaagtgaaaggaaggcgagcggctatgagagaccgcgttaagcggcacggggcgctttaggcgctgcccagtcccggcccctccagcccggggcccgccgctcaccacacgcaccggaagcgctcggttctcccggaggcagaccggccagcacactaccatccagtcacgttccgacgcgacgccgcggccgccagccaatcagtggcggcctctgccccgcccccgcgcgaacagccaatgacggcgccgtcgggccggaagttgttccgtccggacggcgtttccacggacgcccaggagacagccggttgctgagccgggagcgctgactggcccggctgggcagggtaagcgaggggagtaaggccggggcggagtgaggaaacaagggagggagtgatggagggacgctggcgcggcgcccagtggcctggccctcccgggagtatccttagagcccggcttgctgcccgccgcgttctggcactgtgaggcgcggagcctgccaccgacccctcgcccctttcctctgagcgccgccgacccaccccgtctccctttcccactggcacccttcatcgtctccgcctgttcgcttttcccgaggagagaggcccccatttttatttagcgcctgccatgtgccagaggctttgcgtagtgttgcacttagtcccctcaacggtaatgttagcaggcttctccatgcccattccacagatgaggaaaccgaaggggaagcagaaaagtaatgcgacccttgcccaaggtttcgaataagtccaagctgggattgaaacccaggcgtctgtgaccccagaactcctgatctttccactgcactgtgccgcctcggtgaacagatgcggggaatttacagtttctctttccaccgcccacgactacacaaaatcagtcacactgacgctgagggtggggaacgggaagagggtggggaggttatttggaggccagcggggggtgaggggtggctgatgcaatgaccagctaatggctcgattctcaagagggtttcattggtctcaacctggccccccaggcaacccacccctgattggacagtctcatcaagaaggttggtcaagagctcaagtgtttctgagaatctgggtgatttataagaaacccttagctgaatgcagggtggggagaacgaaagacaaaagcatcttttttcagaagggaaactgaaagaaagaggggaagagtattaaagaccatttctggctgggcagggcactctcagcagctcaactgcccagcgtgaccagtggccacctctgcagtgtcttccacaacctgggtatgtattgccatctttgccaggcttagagcttgttcgtgtttttagcaaagtgctgaaaaccttggtttagggggtcaggacttgtgtcttaggattagggtgttatgcattttacttcttccattgacccaaagttcaggtgattcactgctcccatagggaacagagatcctggctgagcagtcgcgggcttggatccgtagcttgcctctcagcaccgtcatgctgtctgtcataattttcactgatgcaccctccttctgtgctcaacatcagaacgtattgtcattcttattgtgacacccaaaagtgtctcgtgcctggcttcatagaaattaatgtctttgccttttaagataatgttcatgctgttatttggcggggaaagcaatctttcttttagtgtttaaaaaaaatggaacatgatgggtcccaaaaggtgtcaagaaatccttgctctaaagaagtcattttcttgtcctctgggaacttgccagtccaaaggtattgtcacctacactctggggccaagatagaaaggatggtattctacctcctggtggtattccagggatccagaaacactcctgggccacattctcttctcacctgctccagaattggctgtcttgatgccacccttccccagattgcagaatcagcgtgccctgatctctgtgagatgattttgatgcaacccaagtctttatcatgttgttctgttaaacaattctatagtcctttccactcctcatcccaatacaatacccagtttctttaagtgcctattatgctcctccaccacagtggaaactttcagaatgagcacaagattcaagttcttgaaaagggggaactgggg

SEQ ID NO: 1241789 - DNA, 4001 bp, Homo sapiens
aatttctacttgttaaaaaaaatctttctgggcagggcatagtggctcatgcctgtaatcccagcactttgggaggccgaggtgggcggatcacctgaggtcgagttcgagaccagcctggccaacatggtgaaaccctgtctctactaaaatacaaaaattagccgggcgtggtggcacacgcctgtaatcccagctactcgggaggctgaggcaggagaatcatttaaacccaggaggcagaggttgcagtgagccaagatcgcgccattgcaccccagcctgggcgacaagagtgaaacttcgtctcaaaaaaaaaaaaaatctttctgaaattctgaaccatcatacacaatacatggttatcaattagttcccagaaagaagtgctttggtaattttttacttctgtgctgttagcaccaagcacaatccagagaaaaagaagggtgctaggcactcctaggacagcagagggcgcggtggaacagcacagaacgctcaggcaatagaccgacttccaagaaaacccagtgcacccaaccttaatcaaacacgccaagctccgcctccatcccccaacaggtggagtcaggtcagcatcaacagattccctccaagtccttttctaagtcattccagacagcctattacccatctcttcttctagacaatgggtttctatgtcccctggaatcaaccacccaacctcttccacacctttcccccaagtggcatcattcgcctgagggttccactggtctacaagtcaggtcatcattccataaatgtctgtagtcagcctcctctagtaatgccgcccccgttcgcagcccattccaggcaggtaacaacttccacacgcaaagccagagtttaaataaaacgaccgggcgcggtggctcacgcctgtaatcctagcactgtaggaggccgagaagggcggattacctgaggtcgggggttcaagaccagcctggccaacatggtgaaaccccgtctctactaaaaatacaaaaaaaaaaaaaatttagccgtgtgcagtggtgcgcgcctgtaatcccagctactctggaggctgaggccgcagaattgcttgaacccgggaggcggaggttgcggtgagtggagatcacgccactgcactccagcctgggctacagagcgagacttggtctcaaaaaacaacaacaacaacaacaacttctaaagccagccagccagctcatctccaatggaactaatataatatgaaagactaattataaactaatggaaccgtgcactgcaaataatttggcatttctgttctctaaatgctaagcctggtcccgaggccactctcaactcctctgcccaggcaccacccaccatgcacccagattcccaccaccagggtgcccgtgctccctctggaaggagatgagggattaaacgaagaggaacagacagtaagatggaagggaaggcagggacactggagaagagtctaaggaaggagcgagtgactctgacagtcactatcagcaagtcagccccatgaggacaggactttctgtgttttgttcactattcaatgcccagcgtctaaaaatatttctggaatgcaaacgggtgggagggggagatgctaggaagtaaaagaaataggatattcccattcaacaaacatttcctgattacgtactctttgtcaagccctatgctgggtctggtgtgggtggaaatcaaacacaaaacacagatccccccggaggccccagagcgatgaaagcaacaaacaagatacgaccagagatgggttttgaaggatgaataggagttagctgagctgtcaatagtaagaagtaaggttggtccaaggcacagcgctttctgaaggaacaggaagtgaaaggaaggcgagcggctatgagagaccgcgttaagcggcacggggcgctttaggcgctgcccagtcccggcccctccagcccggggcccgccgctcaccacacgcaccggaagcgctcggttctcccggaggcagaccggccagcacactaccatccagtcacgttccgacgcgacgccgcggccgccagccaatcagtggcggcctctgccccgcccccgcgcgaacagccaatgacggcgccgtcgggccggaagttgttccgtccggacggcgtttccacggacgcccaggagacagccggttgctgagccgggagcgctgactggcccggctgggcagggtaagcgaggggagtaaggccggggcggagtgaggaaacaagggagggagtgatggagggacgctggcgcggcgcccagtggcctggccctcccgggagtatccttagagcccggcttgctgcccgccgcgttctggcactgtgaggcgcggagcctgccaccgacccctcgcccctttcctctgagcgccgccgacccaccccgtctccctttcccactggcacccttcatcgtctccgcctgttcgcttttcccgaggagagaggcccccatttttatttagcgcctgccatgtgccagaggctttgcgtagtgttgcacttagtcccctcaacggtaatgttagcaggcttctccatgcccattccacagatgaggaaaccgaaggggaagcagaaaagtaatgcgacccttgcccaaggtttcgaataagtccaagctgggattgaaacccaggcgtctgtgaccccagaactcctgatctttccactgcactgtgccgcctcggtgaacagatgcggggaatttacagtttctctttccaccgcccacgactacacaaaatcagtcacactgacgctgagggtggggaacgggaagagggtggggaggttatttggaggccagcggggggtgaggggtggctgatgcaatgaccagctaatggctcgattctcaagagggtttcattggtctcaacctggccccccaggcaacccacccctgattggacagtctcatcaagaaggttggtcaagagctcaagtgtttctgagaatctgggtgatttataagaaacccttagctgaatgcagggtggggagaacgaaagacaaaagcatcttttttcagaagggaaactgaaagaaagaggggaagagtattaaagaccatttctggctgggcagggcactctcagcagctcaactgcccagcgtgaccagtggccacctctgcagtgtcttccacaacctgggtatgtattgccatctttgccaggcttagagcttgttcgtgtttttagcaaagtgctgaaaaccttggtttagggggtcaggacttgtgtcttaggattagggtgttatgcattttacttcttccattgacccaaagttcaggtgattcactgctcccatagggaacagagatcctggctgagcagtcgcgggcttggatccgtagcttgcctctcagcaccgtcatgctgtctgtcataattttcactgatgcaccctccttctgtgctcaacatcagaacgtattgtcattcttattgtgacacccaaaagtgtctcgtgcctggcttcatagaaattaatgtctttgccttttaagataatgttcatgctgttatttggcggggaaagcaatctttcttttagtgtttaaaaaaaatggaacatgatgggtcccaaaaggtgtcaagaaatccttgctctaaagaagtcattttcttgtcctctgggaacttgccagtccaaaggtattgtcacctacactctggggccaagatagaaaggatggtattctacctcctggtggtattccagggatccagaaacactcctgggccacattctcttctcacctgctccagaattggctgtcttgatgccacccttccccagattgcagaatcagcgtgccctgatctctgtgagatgattttgatgcaacccaagtctttatcatgttgttctgttaaacaattctatagtcctttccactcctcatcccaatacaatacccagtttctttaagtg

SEQ ID NO: 1241790 - DNA, 4001 bp, Homo sapiens
gtgagctaagactgtgccaccgcactcccgtctggaaaaacaccctgtatttacaaagtgagagaaaagaacccaaaaagtagttacatgggcttgatcttacttttgctttacaatagctacaacaatctaaggtaagaatacaaaccaggtaagtaacatagctgcattcacaggaaagtattcctgaatactgaacaaggagataagcagtccatagacgtttcagaggatttctcacttaaatggtacttgactgcaagttaccactgttttactcggccataggttgcagtgcagtccaggctccacaagaaagaatttgaaaagcagaaacagtcacgtggctttcatcggtaacatattttgtatctattaaattatttaatcctcagaactctaagtagtcaagtttggtatttatttcaattatacaggtgaaaaagctgatgctgacttgtccagtcaaaggtcagtaactggtgcctactgcgatgtctttcctctagatcattttaccttggtaacaatcgattaattcacttctaggtgtgttttattgacttttttttttctcttttttgagacgttgtctcactctgtcgcccaggctggagtacagtagcacgatcttggctcactgcaacctctgcctcccgggttcaagcgattctcctgcctcagcctcccgagtagctgggactacaggcgcccgccacatttttgcattcgtagtagagacgggggtttcaccatgttgaccaggctggtctcgaactcctgacctcgtgatccgcccgcctcggcctcccaaagtgctgggattactggcgtgagccaccgcgcccaggcttttattgactttaaataatttcaaattaataaagaaaacggccgggcacggtggctcacgcctgtaatcccagcactttgggaggcagaggcgagtggatcacctgaagtcaggagttcgagaccggcctgaccagtatggtgaaatcccgtctctactaaaaatacaaaaattagccgggcgtggtgccaggcgcctataatcccggctactcgggaggctgaggctggagaatcgcttgaacccggggggcggaggttgcagtaagccgagatcgccccactgcactccagcctgcgcgacagcctgagactccatctcaaaaaaaaaaaaaaaaaagaaaaagaaaaagaaaaacaaaaaagaaaacaggagcaacattttacaaattataccatcttttaattttacatccatggaagctgaatgccacaatttgtcagagacaagctaaagaaaacacaagaatgagtaatgtctaacactgcttcgcgtgaaaatgagaacactcacagtacctacctctttagatagccatgtggtttaaatgatataatagaccagttgctggtatcataccacatcccatactacgggtcgtctcttcccaagtgaaaatctgctttctggcctacaaaaggattatactaaacccttttagtggtggggagagtatccgtggagaggaaagagcaggaggaaacaggtctttccctgaaaatgagcaagggcgtttggcttttattgaaaaacgccccagaggaagtactgggaactgcaccggcaacagcagcctgacccgcagaagtttctttggccagggccagcacaggtttgacctggtggctccgacggcggagcgagactgccaacacgtgcacactccgtccagacctcccacttccctccgcgctcccgcgatagctgtccagcaactctagctttctagactcaaccacggcgtcgccgctcgtcgagagggctgcccatcccggggacccgcccagcctggcccagcaaaatgtaccttagtagcctcaacctgtaccggagaaaacgcaggctgcgcggcggcttagagcggtcaagtggaaccccgcctcgacctctctgattgggtaatgcgcacaagaaaatcaagaggattggtcggctgcagagaggcggcccgtaacgcgacgcgaaagaagtggggcatagcggcccggggaattcttgctagcttccgattggacgaaagcagaacgcctgccccttcgtagacccagcgtacgtacaacgctcacaccaccacgccgtacgctgcgttagcggaagtttaatggccccattggtgggatgcgtggccaataaagggcaagaataaggcggattccgccttcctcgtggctgactggatgcatccgctggtactgatttacgtgagtttcagcatttagacgttccgagtttccaccgagccagagttgggtagagagttattaagatgactaggagactaatgcggggagaaataatttagtagttagactcaggccctgaaactaccactcgtgttcagaaagtctacgtaataccttattgttttcacgcgaagaaaccagcccttcaggccgggctgaatgtggtttagggattctctggctgtcattgggtgaaaaagcgatcagtttgaaggtagctccgcctgggctctagggaactctgggatttgtagtccggaactttcgagtcctgtagctttaaatgtggttgttgctactgagttctttcatgttgttaataacacccattgacatttattgtggtttgttggactttttatcctttcgtttatcagcagcattaaagacaacatttaagaaatgtgtaaacactgcatgtatgttcgtaaacaataaatgttagtgtttccaacaatttactgctgtgcctagctgtatactatatgttcatgcttactgtactaagtagatactaaaattatttgtttctaaaacttttgctgttacaacaaaacagtctgattttcatattagtgtccatttacgattatttgaaccctacatttagcaattatgtgtactgtgatggcataggtagcagctgcttacatgaatcaagtgttgttatgacatgaagcagaactggctgctatcttcacaggaaaatagggctatgcttaaaatgtcaagcaagaccaccatcaggaggaatacacattgtatattattaaagactgtattatagtgtctattttcagcctttattaaaacagttttaggacaggcttttcctgagtctatagaatcctgaactcttctgtgagctaatttagcggtatttcatttttgtgtctagcaaaagtaaaaccattaataaataccaaaaacttgctgagtagacttttcgctttcgaaaaattttaatatttttttcctattttacatgtaatacaaactttcgactgtagaagaaaaaaacatgatttcggatgtatgtaatacttctacacttctagattaaaattaagtacactttacagaattaaagctaagcaaaaactgcgttcattactgatgcttgtaattattgcatttttgtttaaaatatcgaattatttttgtcatttttgtatcttatttctaaatgattagagaaggtttcaggttgtttgtaaaggaaacattaccgatttagctctttgttttgttttgttttggagacagggtctcgctctgtcatccaggctggagtgcactggcaggaggtgggatcatggttcactgcagcctcgacgtcctgggctcaagtgagcctgccacctcagcctcctgaattgctgagactactggcacacgccaccaagcccagattttttttttttttttttttttttgagatggagtctcgctctgtcgcccaggctggagtgcagtggcgcgatctcagctcactacaacctccgcctcccgggttcaagagattctcctgcctcagcctcccaagtagctgggactacaggcacatgccaccatgcccggctaatcttttgtatttttagtagagacggggtttcactgtgttagccaggatggtctcaaactcctgagcttgtgatccacctgcctcggcctcccaaagtgct

SEQ ID NO: 1241791 - DNA, 4001 bp, Homo sapiens
gacctgtatgtcttcctgcagcacccgagctgagcaatgacttcagggggagagctgatgtcacgtgctgctaggtgagtacggacggtcacaccagagctgttaggctcacacaccagactctggaaatgccgtggttactgcctggagctgctctgagccttccgaggtggactcactcctctgccttgggccctgggacctgctgtgtagctttgaagtgattcacagcacttacatagtctgatgttttggggtgacctgacccccctgcaagagtgtgatgtcttatcagaccacatatgtgaggacttgagtgaactccgcaaccttgggaatgccacttaaaccttgtcagacactcccttatgtgagttactgaccctgactgctggactgcaaaaacagacatcagcttgaaggttgtgcagatgctttgaggcaagctatacgctgctggcctgggagctggacctcggtcccagcttctcagagagctcccgctctcacgctctccactgctaccaaggcaaacctcgaactctcaccagatctcactctccaggggcccgctccatcccagcagagcaaccggaccctggccgttctgccactcacctccctgccgtgaatgcaccccatccatggaggccctgcttccctgccaggtgtcttcacctcctcccctctcctcccctctgagcactgtgaacccgagaacaaatcttctttgacaataaaccgtgtgattcgtggaatcatactttgatcatctccttatttcctccacacacaaggacccctgcactgccaatggccccaggagagggcagagtcagccacagggaccccacctcacaggcttcaacactgctgatgcctgtcatcccagcaccgtgggaggccaaggcggccaaggtcgcctgagcccaggagttcaagaccagcctgggcaacacagcaagacctactctctaccgaaaaaaaaaaaaaaaaagaaaaatagctggccagtgtagtggcgcttgcggtcccagctacttgagagcctgggaggtcgaggttgtgcctagctgtgaagacgccactgcactccaccccggatgacagagccagactgtctcaaaaaaaacaataaaaattcacgccttgtaataaggaattaaaggcaggatgaacaaacattttcttcttttttttgtgtgctttctgagatggagtctttttctgtagcccaggctggagtgcagtaatgtgatctcggctcactgcaacctccgcctcccgggtcctggttcaaacaattctcctgcctcagcctcccaagcagctgggattacaggcacgtgccaccacacccagctaatttttgtatttttagtagagacggggtttcaccatgttggccaggctggtcttgaactcctgacctcgtgatccgcccgcctcggcctcccaaagtgctcggattacaggcgtgagccaccgcgcccggcctaaaggattttctttccaaatcaaagtattaaaataactgttcagacctctcccacttcgatgcgaagccagcgcggtcccaggcggacgagcgaaggcatcgaaggccgggggcgcagccgcgggcccacctcggcctcccctgagcggacgcctccccgcgcgcaccgggggccccggagaccgccttccccgctccgaacgcacgcggcccggccccggcgaggtgcctgaacgctacccgagctgcggcggggctcccggggtgagtgctgcagccccaggcccgcctgctcccacaggctcgggcaatggagacccgcggccgcccccgccccttgaccctgcctcacccctcacgcccgctgccgcccacgacctccgaccccgctgccgcccggctcgcagcccggctcgcagcccggctcggcgggcctcacctcccgcgggttccgcactcctcttcccgccgtcctgctcctctcggccttctcctccaataggcgcctagcaccctgagtgggctacaccaatcagagacgaagcggcgctaacgtgactgactaactaaccaatccaaagtctcaatctccctgagaggggcggagcgtacccgggccagccctcgccgccgattggtgatcgacctcagggttgcaggggcggtgcccttacacggattggagagggcagcgatggggcggagttcaagctccgattagtccgcgctccgtggcgggcttggcgattggacgccggcgctgtcagccgcgcgcggaccggggcggggcgggcggtgccccgggctgggcgaggggccgggtgcggggccgctggccgagaggctgaggcggcgtcatgtcctccgaggtgtccgcgcgccgcgacgccaagaagctggtgcgctccccgagcggcctgcgcatggtgcccgaacaccgcgccttcggaagcccgttcggcctggaggagccgcagtgggtcccggacaaggaggtgggtggccgtcgccccggccagcgcctccgacccgccccgccgccccggcccggccccgcgggcttccaggctcccgcgacgacccctccgcctccgggcggccccttccccagccggcccccgcccccgctctctcccaggttggccgcgtccccgggccgccgcctcaggctcctacgcccgcggggagggcgggaggcgcgcggtgtcccggtgcgggggtcccgggagggcaggaggcacctgtccagggcgggcgccgggaggcggggtgcggggcgcgggctggtcccgggggtgggtgcggccctgcccgaggccggttcgtgctgggctagcgcgtgtggactgcgtcccgagagctggggctcgctcccgagaaagtggaaggcggagcgccttcctcgcaggctcggtggggagggcgcgtgctgtccgcggaagcgctggagctggcggccccgcaggggtccctcccgggaaccgggggaggcgtcggtgccgcgggcgggtggccggttccgaagccacctcctgctcggaaggagggccaggacccagtctgcgggccaggctgccccccgtttcccttcgtctataccaccctccacctcggaagcgaggtcgcagtcgcccactggacagtttgaaggagaccgcagatttgcacccgtttcccatgggcccagacacggcaggagttgcccaggccactcctgcagacattggggcgtgggcgtggggtccctgagccaggccatccgctgggcctcccgtggggttccctgtgacctgatcggaggtgcctttgcctcacaccagccccttggccaactgggaaggccccgagtgcatttaatcccactggctgtgcgctaacaggtgtgtccagtttctgttctgtggattttaccacgataaaaaaaaaattgggggagaaaaagaatttttgtaatatgactttcatacttaacacgtgttacagattcgtttaattccctcagtgatagaactaagcagacgttggaactaggttcaagaagtcaaagtagcactaattgactgggttcattgaagcttggttggaggcctggtggggggtgagcggccacagagcctcggggacaggacggaattcgagtgactctggggaagtgtctctggcatctacagtgtacggagccatcaccggtcactgagcgtgtcctggagagttgagaccagtgctgcccacctctccccagtatcgccaccatgaggagtctttttagacactttccgccaatcatcctccttcatcttttttaaaatttacttttaagttgacacgtgaaaattgtatttatggtgtaacgaactcttaatagcacagaaatactctacgtctgtatgaaccgtaaggagcacgtgagaaagtgtggccaagatgaggcagaggtttccaccaaagcacaatttctttctccctgctgtacacatgcactgatcttacggttctgttttat

SEQ ID NO: 1241792 - DNA, 4001 bp, Homo sapiens
cctatcttttggaaatcttttataggtaaatctgagcgtttatattacaagattctcttttttccttagtgaatctaaggtaaattagtaatcgctgaaaaagtgtctactttaggaaatcataacaattgatttattctgctttagtttgaccttccctctctcaagggggaactcgtttattactgttaccctgtcaatttgtctgttctgcgggataagaatggctgactctctcatgaaaagatatcaccaaactttttttacgttggccaaattgcaaggctgtttctttggagtgaatggtaatgacaatgaaacgcagaaaattgctcattatcttaaaacaatctttaaataatatgagaaaaggatgtctgggtcaattcctaaaatggaccaatcgatccccaaaagggtctcgggactcatctatgtattgtatatgtacctataagcataattaggatgctcctggtaagacaagatttccatcctttttctgaaacctcttaattcaggaagctgacaactatccctggcccctaagtaatatttttaaaagaagctaactaatcataaagtttacaaacattcaagtgtcagcccttggcgaggcctctttttcatgctttctctcaaatggaaactttcgtttaaaatacaattttaaaacaagaccctctgcaacaaaatctatttgcaacagcaacaaaatctaagaggatggtcaaagaaaccaaggaatgtatctgagaggtaacttttgagccaccccaccactgtatgtaatccatacacatctacaaacgctgtttttttggtaattcacatctagctaattaaaaagctgagctgtcagccctctgactcttacggaatcctttggagtgttagctagtcattgtgtgttggaattagactaaccactggttaaagccctgaggcctgctcattcagggccctctaggtgaaagatgaggttcaggcagatgctttcttacctgtggagtcatcgtagagggatctggctcaggggcggcttgctgctgttcagtactcttgtttttggccccactctccaaaggctcttgctggacagttgtcttatttccagggggggcggacggtggtggtggagctagtagttgggatttagaatggccctgggaggggcgggaaggagatgcctgagaagagggcaagtaggactgggaatggctcaaataggattgcgaggaagaggaggaggatgagtaagaaggggtgggcgccaggtaggattgggaaggtggggactgcgaaggggacggctgagcaggaggcaggtagggctgagatgaggtcggggggtagtaagagggtggcggctgaggtgggggcatgtaagactgagatgggggcatataggacccaggcggcacagggggagattcagggggggattccagctccattggaaccaaaccaggaggcccgtctcgttggtggtggagcatctggtgtttgtactgctgctgcttctgatagctgagggccggcccgggtggcgggggcatcggtggcggtggcggctgccagtctccgtagccgccccccggcatcactggcgggggcggcagagggggcggaggaaggtggtggggctgaagcacgcactgcatttgcttctggtgcatctgctgcagctgctggagctgcgccaagtgctgttcgcggaagctcatgaagcccgaggaggagggggccgcgggagtcgtcgagctcgagtacccgggccccggcgaggcctcaggaagcgccactggcggcggcggtgggaccggtggcggcggatagtggctgctcccgccataccggccccaattcgggtacatatcgaaaaagaaggcgcagggctcgtcctggcgccgttactcgtcgcaaccgacctccaggagccgcggcggcgacggcgacagccggaactcgcggcgcctacaggccccggagcgtgtaaacggagcgcgccagtgcgccggcgctcccgagctgggcccgcgaccgggaaggcggggacgcgacttgggcgactacgtctgcgcagtaaccaccgagaggagaacaaaggcgagatagagcggtcctttacttggcgactcgtggttgccatcttcctttgggttcagataatgtaggctccagtagaatgttctcatagaactgaaaaaccatagagtctcacagccgaaagaggtggtagagatcctatcgctccacgggttcatttttgaatgaaaaaaaaaaaaggttccattcacaatagcaacaatcgcaacaacaacaaaaaaacataaagcaactaggaaaaactctaacaagaaagatgtaggacttatatgtagaaagctacagagtcataaagaagcatatccaagtaggatgaaattagacttcaaataatggagaggcttaccatgatcctgggtgaaaagaggaaaaattgtaaagatgtcagtttctcccaaattaaatgaatagacctaactcaattctccccagaaattcaactgggaacaaagctgtgaagaatggaaaggtgttttcaaggcagagtgtaagattacaccaattcctgcagacatatagtgagtaacatctgcaggaattgtagaaggggagaaatggaattttttagactgtctcaacacatataaatcggtgttgcagaatctcagagcaaaagcaaagagagcaaaaaccagatacaaagatggtctaaagacaacctggaagataatcttccaaaagctctcaacgtaataccagacataaactcttactttagcttgagtgaatcactaaaaagcaaagctaatacactgaattcttttgggtgtgtgggggggggcggggggagggagaactgtgagaatattgtgtcagtgcatcacttgagtaacatgcaaataattgacctttcttccatcttagcaacccagatcttcacctctctcaggaggtgaatgtgaatggaaagtggagcagcaaggcatccttcaaaaggaagagcttctgttttcaaatagaaatttagttatgtttcttttaactttttattgaagtataacgaatatacagaaaattacatgtcaaaagacaaaattacaacaaatttagtttaaagatcttaattaacttttacctgctattctagaattgggcaacgtctcattctataaagcagaaacagtgttccaatgagcagaacaatcgggataatttcatagacagaaaagaaacgcagaggcagggcgcgggggctcactcctgtaatcccaacacttttgggaggctgaggcaggcagatcaccaggtcaggagatcaagaccagcctggtcaacatggtgaaaccccatgcctactaaaaatacaaaaagtatccaggcgtggtggtgctcacctgtaatctcagctactcaggaggctgaggcaggagaatcacttgaacccaggaggcagaggttggagtgagctgagatcgtgccactgcactccagcctgggtgacagagcgagactccatctcaaaaaagaaaaaaaagagagaaacagaaaactaaaagtggattgtttgtttcaaagtttcttttcttataaggttaaagcagagaggacttctttatcatgctggctaaaaatggactgtttgcagacttggctattatttctctctctcctggtttattgaatggtcagataaagattttaattttggcatggcaacatcaataaactccattttggtttgttctgttgggcctaatgcccaacttgctataaattttatttaacacatgtcttaagtagacagcatagtaaattttcacaagccaatcacacttgtgaaatcggcacccagatcaggaacccaacccagaaaccctagttagttgtgtttttaatattttgggctgacattttcttttgaaaaatgtataaatttaggccgggcatggtgg

SEQ ID NO: 1241793 - DNA, 4001 bp, Homo sapiens
ttcgctaacattcacaggccctttccactaggtaccgcaggaaggcgaaaaggccaggaattcgctggcaacggcggtgacaggctccgactgacgctcggagcccgcacacgcgagccctacgtgcagccccaagtcccgccccgcagcaaacgacgacttgggcgagcgtgaccgccggggcagggtccagcccggcgctgggtgggcggggagcaaggaggccggagggcgcccacgagtgccaagccccctccttctggaaggtgccaccggggagcagttgggagtccggggaagttgggggcgggcggggcaagcgcccgcggcgccctccagcggccgatggggtaacggcagcgccgggcgggggcgggggcgcgcgtcccggaggcagcaatccctggcccgcgaggccgcggcgcagccccgccaacgacctcccgcgtcccgcccgggccgggggcgcgcagctgccgccacaacgggccggcgggcgcgcccgttgatgcgggcgcggggagcgagggcgtcggggagcgagcgcgccggcccctcccccggccgtctccgccccgcgcggcgcttccccctctcggagaaactacgccattgcggcctagccgggcggcgccggcccctcccccccgcggcctgccgccatcttcgcggcccgccgcccgccgccgccgccgcgcccccgccgccgcacggcccgccatcttttggggccgccatacttgccctggcgaagaagatggcggcgcccatcacacacataaaacatggcttcccttcaaaacaaaaacatcccggggccggggcgcgcggccggcgctcacctgaggaccacatggtgaccgagaactcgccctccagggtcttgatctgcacctgcttctgctcccacttcttgttgcccgggtcggcgccgccgccgcccgccgcgccggccccgccgctgaggtaactcttcttgccgctcttcttgccgccgcccttcttgacgcggccgcctcccgacgacgacgagccgccgccgccgctcttgccggccgccgccacggtgaccagcgtttgttcaatgtagtcgtcgtcgccgccggccggcgcgggcaccgggatgagaatctgatcctcgaagccgtcctcggcgcgcagcccgtccgagtcgtcgccgcccaccacctcctcgcgcgtctgcaccaggatcacctcctggtggtggtgcacctgggtcgggtcgtcggtgaccagcggctgcagagcgatcatgggcgggtggtggtggtggtgatggtggtggtggtggtggccggcgtgcccgtggccgcccccgccgccgtggtcgccaccgccgccgtcctcgtcgtcgtcgtcctcctcctcctcctcgcccaccactgtggtctcgatggtctccaccgggatggtctccacctcgatctcgtgcagctccacgatctcggccggcatctccgagccgtccgtggcgatgtagagggtgtcgcccgaggccatggctgagggctccgccgccacggccgcggcggcctcggctcctcggctgcgggcgggcgggcgaggaggcggccggccgtggggaaggaaggcagagggaggaaggcggcgagcgggcggggggagagggggcgggcggcgggggaaggggcgggcgccgcggcggcggcggggcttccccgcctccctcgcctcggtgcgcccgcgcccgcgctcgctcggccgctgctcgtctcggctccccgcctcgcctcgcctcgccgcaaccgcccgccctggccgcgcctcctcccgccctccgggccggcgctccgcttcccccttcctcctgcgcctccgcctccttccacacaaataccaactcctcaacccgagcccagatctcgccgccgccgccacactctgctcgggcccggcctcgcgagacttccgcgctggcctcagcccgccccgcctcgctgccactcgcccgttcgccctctcgattctcctctcggccaatcgatctgtccgctggcctccgcggccccgcccactcgccgggctcctcccggattggggccgatgggaccgggggcggggcggctcgcacgcgccctggctggcccgcggcgcgtgacgtcagcgcgccgccgccgccgccaccgcctcccgcttcccggtgtcgcgcggctgccgcccttcgcggtgcaacagccacaaaacccgccgcctcgggccggggccgcactcgggaacggggcgtcgccgctacagccgctgccttgggagccggtgagcggtccgcgcggccccgggcaccacgggggcgggagcctgaggagaagggagggaggggccggccgggagcggggttgaggcgggtgggcggcccgggggccgcgcggggagcggctggcgcgtgcggggcggccctgtcgccccaataaagtctgctttgacgagaatcgcctgtgcttcctttttcgcgtcgggaggtgtttgttcttgtcgcctggcttcgggcgagcgatggccgcggggtgagtgtggaggaccgaacggacaaaatcgggcgacgcgggcagcgtccggtatctcgccgcgagcgcccggcggggtgcggggccgagcgcggggtcggcgcgagctcggcggaagcgcccgcggagccccagggccaccgttgggaggatgtccgttattctttagtgacccgcggaaacctgagacgcagccgttgggtgcctgtttccccgtagatcttagaactacagggtcctggcggctttctaaaattttctcctgagcttccccttctttgctctccagtcagccattgtttcccttgcccaccctttccccctatttgtcactttcataggtgctcctttttacgcccaccaggttttgcatttgtctcatttaaaattccaaattttttcagccgtgtcctccattgtacctgcaacagagcctagatttttttttgtggcacggattagcggcaagttaaaccttcctgaatgagttacattgcagcgaagtgtttctgctcttatctgtccttttggtcgacctgacaatttgccttaaagcaaaacaaagatttcctgatttttaaggaaactatgacaaattgaagagttggaaaggtgtgtctttgttgtactcgtttggccgatttaacgcctctgtgaatttgttcaacttaaatattatcaacatttactgttttgtaatagtgttcatgcagttgaggcccatgattttctgaactgtacgcaatacattaatcttaggctcaacttgttaaaacaagtagactatacattctcattaaaaggcaactttataaatcctagtcccttcttattgctaaatcgcattggacttgacttttgagaatattagtgtaaggagtgacaaattagatcgttttctctttgaatctgagctttgaaacctgaataattccccttggagtactgcacccactcagtttggaaaagtcaaatctgttgaattaagtcatctctggctttatagcttataaactctgcataaatatttcatgaatggaaaccagttgtgggagaacttttacatgtcttaatgctttttaaatttcactttccccactctctagtaattgatggggaaatggcactgcaagtagttgatacttccccataaacaccaattgtgagagcaagagaaatgagggaattacccattaagcatcctggtttctgagctgtagatctgtaggtgttcacattcaagtggagaaagcccaaaaggattgaaagctttgaggaaaggtagtaggtcagaaagcactaaaatgctcctgaaggccatcctagtacctgctccagaaaatagctttttaaacttgccccataggaggtgacctgttaggccttaagtttttctagtgggagatattcttgttttctactgtttaacggtggagtatcttatgactagacatgcaa

SEQ ID NO: 1241794 - DNA, 4001 bp, Homo sapiens
ttcagtttcctgtttttgttgttgttgttgtttgtttttttgagacagagtctcgctcttgttgcccaggctggagtgcagtggcgccatttcggctcactgcaacctccgcctcccaggttcaagcgattctcctgcctcagcctcctgagtagctgggattacaggcgcccgccaccacgccaggctaatttttgtacttttagtagagatggggtttcgccatgttggccaggctggtctcgaactcctgacctcgggtgatccacccgcctcggcctcccaaagtgttgggattacaggcgtgagccactgcgcccggcccagtttcctgtttctttaagaggaggaaccccctttctagctcccaaagtcatccagttattattgagactttattagatatccagcaagtgattcaaaagcaaagttttgaggttctgagcaaatgttggccagccatcattcaagcctcatctttttgtactcaattttccccgtttctccacatcatatctatctgcactgacaaaatttcatagaatctaatttctccgtttcaaagaaggctgtgattgctctgtaaattatgagacctgcatccttcaccaaatctgcttcagagacattgatcctacgttgcctcaaaaagcctcggaccactccttgggttcgagtgtcaaagggaacactatttcttgtactgatacataccgtatggaaatacactaacaccaatgaagaatctgcgtgcactgccacactgaaattcgacttaagaacgttatcacacacaaatgtcctatccccagaaaacgtcaaggattttcatcaacctcttcctgattcgcccaatttagaaaatgtcatgtcaacccttcagatcatgtacacgcgttgcttaggtagaaagggagactgggtggggtggctgagctcagaccctgcctacatactttagtagtaacgactcccgatctgcatccaacacatttaccgaacttctagtaagcgcccaccgctgcaagcgaaagcactcccttcccaagaaacagatcttttccacttaaaattcccaaactcagaccttccactttttactgaacaaaaagcgtgtgtgccggcgagagggggtgggaaacagcgtaacaagaatttgcacggatcttacgcctcctccctcggagcgcgcccaagtctgcagcctcgggctccgggacacttcccctcccacccgccgccgagccgcagctgtaagttgagagaagcgggctctaggcacgtcaatcaaccgggttctcccgcctcccgtctacacctcccctcccccctcgaaaaaaataaaggcagagaaagaaagaaaagaaggtaactaatttgggaactagtctccgtaggggcttcgcctccgactcagggaggccgcacgcccgggacctgacgcgccggcaacaagcaggcggcctggcagccgcccgtcaccgggtcctcgcagcgcgtccgccgcgctccggctccccgcacggatcggcgcccctccggccccgcactccgccaggcccgcggcccgtcgccctccggcctgggccaaagttgcgcaaatagccccacaactggcaaatacttaccggccgcaacaggaaccagagctgcggagattttagggagtttaaggcaaatcagccgcgggaaaggcgggcgaaggcgaaggggccgcgagctgcagtggcggcggcgcgcggcgctcggcgctcgggctgggctgcgcggagaggctctggctctgccagggactgtgctgcaacaaaggacttccgctgccgcacagccgcgcctgccgcaccgcactgagccggccccgcttacgcggcgactccgggtctgcccaccagttcgctgcggcgtccgccagccttcccctccctctcgcccgcccacccactctgccgctggctgctaggggcacccgcggtcgcctgtttgttgcaacaagtttctgcgtcgagctccgaggaggctggcgcaacccgcaccgcgggggccgtcgcggcggcggcggcttgaccacccctcttgcccctctcaagggtaggcttgggacctcctcctcctcctgtttgcacagctggatggaactgggctcctcccgactccccagggcaggatgcgaggctgctttcccactccgtccagatgtcagacccctgcccgttgggcccagcagctgggccgtcactcgcggtccgcctcgagtgctccggcaacctcgccctgccccgtcggttcagggtcgcccagtccccgcgcccccccgaccccaccttccgtgggcctgctgcctctggccctgagtcacttcccccgccatgccccacctcgcccagtccgcctctccacccaggctcccgcggctcggcctccctggccccgcgccctcatcccttccccagcgaacacgcgggcgcatccttccccacccccaccttcaccccagaactgagggggtgcctgtgcttttgcacaccctggggaaagtccccgggtcacgcggttgtttgtggggagcctgtgacgctcaggcttgtccctatgcttccgcctacagagtcacaactgcgaactgtggcggcggcactcagagcgcgggccgacccccgcccggccactgaggcgggcgggcgggagggcgcgcacgtacgcacgcacgcacgcacgcacaccccggccctggcgcccctctttcccctgctaccagacacgcggtcacgtggggccatcgcgggctgccggcgcgggaagccgcgcgagaggcggccgaggggtgcgtgagccggcgccactgcttgcagtgcgcggcttgggagcccgcccctcctgcacggaggagtcggcctgccgccgcggcggcatctgggtaagcgacgcggtcctgcccctgtgggctgccccgggctcagtccctcctgccgcgagccacccagggcggcggcctgcagctgcaccagtcgcgggacagatgcaagtagctggggagaggggtgtttttggtccgattgagatgtcaggcagggcacaggaggaaaatacatccgcgagtgagcgctgggccgacaatacccagaaccaccctttgctgctcgtaggagcggctgccggggcctgattcagggtggcacacggggtgccgcgaaggtgcagagccgtcccggccgcgggtccgggtgcgacccccagcaggaaaccccagtaggcctgcggcctccctcgggtagcgccgacccctcttacgagcgggcgactttccagatgctgggaggacgctgcggctactgtttccactcccagcttgtgattacctcgtttctagggcaagaagacatcccccccttttctatcttcaaattatgtttatcttgttctaagcatatccggtttttctttttgaagcttgacccatcttatcaccgtcttctctggcactcagtatttggagtaatcagttgttaccagttgcggaggcagcgcatagcacaacgtagtacctggaacctgacggcacctagcatgtttcaacagttagcgcccgcatcaccccaagggattaaatttggcattctttctcttgagactcaagtcctggcagagctgttgatcctctcacaagattctgtcatgtatgtaaagtacactttggaatcttaaattttagagccgagaggtgccttatagaaaatctgtttcatccctctcgttttacagagaagacaccaggcctgaagagcgtgatgtagctggagctagctacacctcttgatagctaagactccaaggctccagacaccttggtgattgcactctccaccatgccaggaccgcagtgccagtttaccccactcacctgtagagaatgtatccggcggaggtcattatatatacttggcttgattcaggttatggagaagtcaggcatggccactgtgtgggtttgatggtatttctag

SEQ ID NO: 1241795 - DNA, 4001 bp, Homo sapiens
gctccactttgtaaggcatagagggcagctgaaagtcctgcttggcctctctgggcaaccacaggcgccaataaatcagccacaggcgattctctcattcccttcccggctgaaacaggagcaagatataatgcaaaacagcactgattggacttgagagataagcgatctaggcttaaattctactgcgaatgactgtattaccacagcccaggtaatgagcctgtttcctcaggcttgtaacatgaagacagtaccatctcctttttggtaaagacacaaagttcatctacgaaagcagctagtatgatacttggcccactgcaagtactcagtaaacagcggccaacttgagcagaatccatctctactacatgcaaataagacattcaaggtaggactggacaaaaaaggtgttagcaggttacgtgggttcctttctgttttcttcctgaccacaccttgatatttcactgactgccagctctcagaattaatctgttccatgtcatatcccatcagtgttctgttccctattaaggagttgatgtccgataacggattcacgatttacccttaactaaaatatatccagattgttaaagaagactttgatgccttaacataaggaagcaaccaatgctgcaaataatagagaacagcaatgaaactttcaggggtggctggggggtgtaggcttttagttccaaaaatacaccataggcggcctacctcacctagaaataccatcaaacccacacagtggccatgcctgacttctccataacctgaatcaagccaagtatatataatgacctccgccggatacattctctacaggtgagtggggtaaactggcactgcggtcctggcatggtggagagtgcaatcaccaaggtgtctggagccttggagtcttagctatcaagaggtgtagctagctccagctacatcacgctcttcaggcctggtgtcttctctgtaaaacgagagggatgaaacagattttctataaggcacctctcggctctaaaatttaagattccaaagtgtactttacatacatgacagaatcttgtgagaggatcaacagctctgccaggacttgagtctcaagagaaagaatgccaaatttaatcccttggggtgatgcgggcgctaactgttgaaacatgctaggtgccgtcaggttccaggtactacgttgtgctatgcgctgcctccgcaactggtaacaactgattactccaaatactgagtgccagagaagacggtgataagatgggtcaagcttcaaaaagaaaaaccggatatgcttagaacaagataaacataatttgaagatagaaaagggggggatgtcttcttgccctagaaacgaggtaatcacaagctgggagtggaaacagtagccgcagcgtcctcccagcatctggaaagtcgcccgctcgtaagaggggtcggcgctacccgagggaggccgcaggcctactggggtttcctgctgggggtcgcacccggacccgcggccgggacggctctgcaccttcgcggcaccccgtgtgccaccctgaatcaggccccggcagccgctcctacgagcagcaaagggtggttctgggtattgtcggcccagcgctcactcgcggatgtattttcctcctgtgccctgcctgacatctcaatcggaccaaaaacacccctctccccagctacttgcatctgtcccgcgactggtgcagctgcaggccgccgccctgggtggctcgcggcaggagggactgagcccggggcagcccacaggggcaggaccgcgtcgcttacccagatgccgccgcggcggcaggccgactcctccgtgcaggaggggcgggctcccaagccgcgcactgcaagcagtggcgccggctcacgcacccctcggccgcctctcgcgcggcttcccgcgccggcagcccgcgatggccccacgtgaccgcgtgtctggtagcaggggaaagaggggcgccagggccggggtgtgcgtgcgtgcgtgcgtgcgtacgtgcgcgccctcccgcccgcccgcctcagtggccgggcgggggtcggcccgcgctctgagtgccgccgccacagttcgcagttgtgactctgtaggcggaagcatagggacaagcctgagcgtcacaggctccccacaaacaaccgcgtgacccggggactttccccagggtgtgcaaaagcacaggcaccccctcagttctggggtgaaggtgggggtggggaaggatgcgcccgcgtgttcgctggggaagggatgagggcgcggggccagggaggccgagccgcgggagcctgggtggagaggcggactgggcgaggtggggcatggcgggggaagtgactcagggccagaggcagcaggcccacggaaggtggggtcgggggggcgcggggactgggcgaccctgaaccgacggggcagggcgaggttgccggagcactcgaggcggaccgcgagtgacggcccagctgctgggcccaacgggcaggggtctgacatctggacggagtgggaaagcagcctcgcatcctgccctggggagtcgggaggagcccagttccatccagctgtgcaaacaggaggaggaggaggtcccaagcctacccttgagaggggcaagaggggtggtcaagccgccgccgccgcgacggcccccgcggtgcgggttgcgccagcctcctcggagctcgacgcagaaacttgttgcaacaaacaggcgaccgcgggtgcccctagcagccagcggcagagtgggtgggcgggcgagagggaggggaaggctggcggacgccgcagcgaactggtgggcagacccggagtcgccgcgtaagcggggccggctcagtgcggtgcggcaggcgcggctgtgcggcagcggaagtcctttgttgcagcacagtccctggcagagccagagcctctccgcgcagcccagcccgagcgccgagcgccgcgcgccgccgccactgcagctcgcggccccttcgccttcgcccgcctttcccgcggctgatttgccttaaactccctaaaatctccgcagctctggttcctgttgcggccggtaagtatttgccagttgtggggctatttgcgcaactttggcccaggccggagggcgacgggccgcgggcctggcggagtgcggggccggaggggcgccgatccgtgcggggagccggagcgcggcggacgcgctgcgaggacccggtgacgggcggctgccaggccgcctgcttgttgccggcgcgtcaggtcccgggcgtgcggcctccctgagtcggaggcgaagcccctacggagactagttcccaaattagttaccttcttttctttctttctctgcctttatttttttcgaggggggaggggaggtgtagacgggaggcgggagaacccggttgattgacgtgcctagagcccgcttctctcaacttacagctgcggctcggcggcgggtgggaggggaagtgtcccggagcccgaggctgcagacttgggcgcgctccgagggaggaggcgtaagatccgtgcaaattcttgttacgctgtttcccaccccctctcgccggcacacacgctttttgttcagtaaaaagtggaaggtctgagtttgggaattttaagtggaaaagatctgtttcttgggaagggagtgctttcgcttgcagcggtgggcgcttactagaagttcggtaaatgtgttggatgcagatcgggagtcgttactactaaagtatgtaggcagggtctgagctcagccaccccacccagtctccctttctacctaagcaacgcgtgtacatgatctgaagggttgacatgacattttctaaattgggcgaatcaggaagaggttgatgaaaatccttgacgttttctggggataggacatttgtgtgtgataacgttcttaagtcgaatttcagtgtggcagtgcacgcagattcttcat

SEQ ID NO: 1241796 - DNA, 4001 bp, Homo sapiens
ccaggagggtggagccatctggcccaagcagggacctccacctggtcaggcttcacaccccatgctgtgtcccacctgggagggcccatcccttcccttccaccccaccctcaggacccacagggatgcatcacaccagaagggacttgacgaggccacagtgaaacttgcggacgtggcggtagaggtccccggactgcgtgaaacggcgctcacaccaccggcaggcatgcggcttctctcgagtgtgcactacggtgtgccggctcaggttgtgggagtactgaaaacttttgccacactgcacacacgtatagggcttctcacccgagtgtgtccgctcgtgcctcttcagtgtgtatgtgcacgagaaggtcttcccacagagcgggcaggtgggtgccacgccgtcgggtgagagccgggcccgggtgctgtctcgctcacggaagtgggcactgaggtgcagctgcagcacgtgggagctgggaaacagcttgctgcacaacgggcagatgcagaggggcccaccaggccccagctcgtcctcactcgccagtcgccctgcaccaagctccagctcccggctgccctctccgctgaggggcagcggctgcaagcccaccaccaggcccttggctgcaggaacaggaggtggcttcgggggactgtgggggctcctagagctgctgctctcctcctgttcggacagtgagtcccgttcgtccttcaccagtggctgggcccctggctgcctctggctgcagaggggtgtctggaggacgcacggtgggtggacccgctcctgccttgggccagacttcaacgacaggtccagggcctggtctgactcttctgggacctggcagggaggaggcccagatgctcgaggagggagggcagccttgaccccaaacggggggagcttggcctttcgggcagctgggcagaggtccgcggtccagacaggccaggggcacggtggctgagcaggttctgccccaggggcagggttccccgggtccagacttcgatccttctcctggagcctgcccttgcagaccttgacgatgtcatacatgtgcaggtagctggcggctgccaggacgtcctccacaggcaggctgcgcaggtccaggcggccctcgtacatgaagtccagtaggcggccgaaggcgggcgccgtgacgatgtcgccgttgagccgcaccgtgtcgcgactgcccgcgggccggtccctgtagaagagatggaagtagacgctgcacgcggccagcacggcacggtgggccgggaagcgcgcgtcgcccaccagcacggtgcagtcgcataggaagcccagctcgcgctgctgtctcaggcggcccagcagccgtccgccgtgctcagggaactccatgccgccgccgtcatcacctgggcacaaacgggacgcccgtcagcgcgcctggaggcgcccacgaagcgcccttcccggctgcaggcagcgcggaaagagcggcgcgggagtgacgcgcgcaacctcccgtccagagccgccgcgggcacctgccccgagcaggaaaaactcgatcgaaagtaaacagtagcagctccgccgcgggggcgggtcccgggactcaggcgcaggagccggagccgcgcaaacctgcgcgcgtccccgcccgggcgctcctgaacttcactcccgggcggccgcccgctcgcggcgtccccgacgcccgggtggctgcgccgccacccgccccacgcctccgcgccgcctccagctgccgcccggcccaccagatgccgccgccgccggccccatttatggcagcgcggccgcggggagcggggagagggccggcgggcgggcggggcgggcagagccgggagcccacccccagcgctcacctccgccgccccgagctcctctccggtcgccgctcgcgcgcgcgccctccccagggcggccctggcgcgcgtggagctgcgggcagcgcgccccggcggggagggcgcggggacggcgagggcgccgggcggggcgcgctccaacttggctggcccagcgccgcccgccgctcgccccgccccagagagagcgaaactcggggcgggggccggagggggcgggccgagcgacttcccggagcggcggaaccgctgaggtcaccctcgcccccccttccctgtccgccccacccggccgggccccgcgcgcagccagcaggggcgctggggtgtgaggggggtttagggcactgcgcgggggcagggggtctctcgcgatacttggcgctttggcctgggtcccccacctcccaacctttcccggcatggggtccttactgcgccagtctgcaaaaggaacccttccgagggtccgcttgtatcccagcccgcgttgggcagtcacccgagggtaaacccgggaccctggcctcccgccacctcgcagggcgccggccttgggatggcgtaggggttgcgtggattgggggtcgttaattttgcaaagatgacacctccttcttccttgaaagcctctttttgaatttaattcagctgggaccctcttccaaacattcaagcaggatgtcgatcctagagtccagaacggggacttccaccctctccacagaccccagcccagcgtctatgggggacccagcgcagagaggcacggaaaacgggcacctcccagcagacatggtggcacggggggacaaacgccataacagagacagtcggaagccctccagagcccagggtaggcaggaacgtgttcaaagaggaggagactccggacaggggctggcatgggagtgggggtagggaggagtgggggaaagtgttctagggcaaagaagcattgagaagatgtgagggggacgcctggttgtgggagagggaatcgccagagaagtagagagtgtgtttggcggggttagggtccctcccaggcagatggagccttttcccaggggcacaacctgggctgcccttgactgagcaggtttgaaggtactctagaccaccggatcatcttcacaacagtcccattaactagacgctcttattttcatacctttttggtgagagagtttaggtaaggtacccagagccatgtatcaggcagtaagtcactgaaccacgatttgaattcagccggtctcattcttctctgccttggagtccgggaaatggagaatgtagtggaggagtcaccccagtcaaggccaagcagtggggtgggggtggtgctggaagaggggctggatcacaaaggacaggacccggccaggtatgtgtgtgcaggaggagtggagcccacagtgggatctgaagtctgggaaggaaggcctcgttgttatactaaaatatcattccttgtttcaccggatggactgcatctttatttcctaaacctggcaactgcagcttggacccctggaatgacactgcacttacagccactgagactagcttagggacggcagaggcctggctcccactgccgccggccatccaccctaaggaccccttcctgaggaaggtcaactcccctctctccacgcatttaaataatcatctgccttgccccagccaccagcaggaatagctgaattcaagtaagttaagggtgaactcagatgtgactgctcccttcctgccctgcctggatcacagccctgccccggcccctcccaaccttgagcacgaccaaacctttaacctctttgaacctcagtaatcctcatctgcaaaatgggagtcagagtgcatcccggggtcttcgtgaacattaacgacagggcctggcactcagcaagctctcaggctctggaatgttcttccccaaagaacccttcactggtttctcttcatccctgtctctgctgaaagtccactccttagtcagggtggccattcctgcccaccttcgctaagttccctcgcagtcccttctgctgcataccctcctttccagcccattccgggtgtcctgtgattgt

SEQ ID NO: 1241797 - DNA, 4001 bp, Homo sapiens
ttgcttgctaccagcctttcccttttgagcctctggattctataatcagagaactggaatggacctgaattttgttgagaccgtccccaagtttcatcctctctcctgtctctactaaattcttcctcaaactcaaattctggggagaagataggtttgtacatggtgttgcttttattacctttaactctgctcctggggagtataattttctgtagctctccgttttcattttccttggcctgttccttttgcgtctggatccttctgagttcctcctctgtcttcttcagctttcccctcaggagaatctgctttcttcggatttcctcctctaagctctcccctgcagcttctagtcttcggatctgcacccactccgtcctgtcaaagtttgccacggccttctccgcctgcgtggcagcaagaacagtaccaaccacagaaaagttgccctggttcctcacaccaaagttcctagatgaaaactctctcggctcagggggccttgggtagacattatggtccccatcagtgccagcctcacctgtactgcacgacttcctgtggaccatgggtttcaatgggaacgcccggtccactccaactcgtttctttgtaaaggggataaagtcctggttattggctttgggataccaggattgagggcctgacgagtaaaacaaaccatttccttggccctgggaatcactttctggatcttgctggctgattccagtacagtggggataggagtagctccgggcttttgtttgggtgttccatttggggtgagtatagactttatccagaatcaactctttgttgctcaaaagctgcttctggaaattgttcctcaggtgccccttcaaggactgctgggaagagtcaccttgttcgtaagagtcttgcttggctgagtggggccctggagcttccgttgtattatgtgggagcataacgcccacaggcagatgtgacgccaaccgctggagaccagccattcagggcctggactgacgcctacgggagatttaaaccagatacacgggaagagtttgtctgaggttcactctcggctgctaaagcaaactatttctacatttgccctgcccacattcccttaaacttttctggggacagtgttgctggacctgccaaagcttcccttcaaaaaccatttggtgagtgattatgcacaagacactgtgttaggccctgagggtagaaaaacgaaggtgctacaggtgttcctgccacctagctttcctttcctccagcaccagcctctgccacgcacagtatactctatagtaggtggaaagagcacctgactagaaagtcaggttctaggcctgtaacaggacaagcgacttctcccttgctggcccccgtttcttcccctgtaaactgaagggttcccgcagagtccagcctcaccattttacaggtgagaaagctgtggcccagaggtagtgactggcacaaagaactctcagggcttccctcctgctggaaccgtgcttgattccaaagagcacaaaagctgctagggcctggagcaggtgcctggctgtcaaaccctcatcccaggagtccccgtggcgcagactgtaaaagttttgtaacctgagcgttgagggccacctgacctgaccgcggccggttttagatccttaaggctgaagtcacgttttgtcccgaagggtcaactggggcgcccccacttcggactccacctctggggacaagtcctctcgctctcctgcccttcggtcccttaggaggtggaggtgctgatcccatgtctccccgcccttctgcgtacctgaggccctcgggcaccgctcctgctcagggaaaaccccagggcctagtttcccagacctgacctccccatcaaccgacagccgcgcaggcgctctcagctggcttctgttattcccggtgcctggaaaccgaggcactggcgcgccaagctccgcccctcgccgcgaactcctcggggagacgcgcgcaggcgcagtgcaccagcgacccggggcgaccgggggtgggggtgcggtcagcccaaggtcacttgacccagtcagtgtccggccaactctgcagctcggtccagccctgcccttggggagccggggaggggcgggagaggcttttctggagctccttcaaagaagaacttgtacttttctgagaacgacgctcccagaccttggggtgtgcccttgtctggcaaagggcggaggccctggctgtgcctccgcgtgcttccgccgcaggatgccggcgtccgcccgcctggcgggagcggggctgctgctggcctttctccgcgcgctcggctgcgctgggcgggccccaggtatggctgcacgcgcgcgctccttgcttgtcctcgccaaggctttggaacttgctgccaacgtttttgctacgcagtatctttccgtggtagtttttgtggccaatctaattattttgatattataatgttttactcacgtggtaattctagccgtctctacttagggcccaggaatgactcagccaaatgtaatgatgataaagttaactaccagatcgaaaataatcagtataacctggcttcaacagtaaatgatactctatcttgttgacatcaaaagaaagttcatttttcttcttcgcttcagttcatctgtgtaagccgtttggaacaggcagttcgctttttccctgtaactactcaattcatgcacatggaaaataatgtagacagcagtcatcagtgttaatacttcaacatgtcatattacagctgttacccgttacaaggaaattccttggtggaccctccagatcagtcttttttttttttttaattcctcgttttcatccctagttgactctaccgcctctccgtatatgcagctccagacgtttcccactccactcagggtcccgattatcaactcccacagcttccctcagcagaatttaccggctttctttttctctttctctctctctctgtctctctctcttcttcctcctctccctctctcctctgtttctgtctctgtctgtctccctctctcctctctctctctccttccctctcctctatgagaaagaagggcgactttccattgagttccattgagttctcttgaattagtccttttcagtaccctccgggaattgactccatcactttacccctgcatttttgttttgttttgttttctgttttgttggtttttggggttttttaaagttgtttgttttttgttttttgagacggaatctcgccctgttttgttgcccaggctgaagtgcagtggcgcactcttagctcactgccacctctgcctcctgggttcaagtgattctcctgcctcagcctcccgagtagctgagattacaggcgtctgccactacacctggctaattttttgtatttttagtagagacagagtttcaccatgttggccaggctggtcttgaactcctgaccccaggtgatccgcctgtctcagcctcccaaagtgctgggattacaagcatgagccaccgggcctggcctttgtttttgagacagggcctcactctgttgcccaggctgaagtgcagtggcacaatcactgctcactggagcctcaacttccacagctcaagtgatcctcccacctcagcctcccgagtagctgggactacaggtgtgtgccccccacacccagcttacttcttttttttttttctgtagagacagggtctccctttgttacccaggctggtctcaaacccctggagtcaaaagagatcctcccgcctcagtctcacaaagtactgagattatagacgtgagagacggcaccctgtctgcatcttgttaacttcaagttatacctctccataaactctgtctctttggttttaacatatactcaactttcccctgcaaaacaaaccttacttcccttgacctaactttcatattacagtcccattcattt

SEQ ID NO: 1241798 - DNA, 4001 bp, Homo sapiens
gatgttccctgaaagaggtggctagcttagttctcaactaaaatgattttcctcagaacaatcgtatttcagtatacaataaaaatgttttatgagcatttctatttcctcgcactgaatactaagaagataaaaaatattttgtaaaccctggacttcacatcttcatcaatgacattttaagtgtaattggctcaaaaagaaaaaaactacaaggggggagtgatttgaatatgatttcattatggtgttactatgctgacaagttttatcaaccattagttttacacaatccaaacaccaccaccacagtgaaaaataacaaataccatcttagtattaatatgaaaacagttttgacttcagaggcccttggagtctcccacactttgagaaccactgtcattagtggtagctattatttttataggaggcaccagctttgggggcaaaccataaaaccttgctcaagtaggcaaagcctcagtttccttgtttacacagtcaaagatactgccacttaccttccaggattctcgtagggattatcctgagttaatacatatacaatagttaagcacagtacctgacccagagtaaacactcaaattataaaagaataaagagacggaaaaagccttactgtttcagagagagagggaaaacataaagagatcggaaaataaaactcactgaaccattacagaagcaaatgccagaaagcatcaaacattcacatccaacatcagagttctaaaaacaaatgtcaagaggaaagtaacaagaataggaaactttaaacaggcatggtggctcacaccagtaatccccgcactcccagcacctagggaggctaaggtcagataattgcttgagcccaggagttaagaccagcctgggcaacgtagcgagacccgtccctagaatttaaaatgagagagagagagaataggaaaaacataaaataaaattcggtcaaacagagccttaacggaggaaactaaatttcaaaacaccataacagaaggaggtttgggagaaaaaaaacaaggttgcaaaaagatgataaagaagtaaccagggagtataagatttgaagaaggtagaagggagtctctcccaatgtccaaagtacggtgagaaatacgcattcactaaaattctattagctgcaaactctaaattctgtaagactaacaaccaaaaaaacacttaccaacataagctcctaattcttgtaatttccccttaatggcactctgagagaaaaagagcaaacgtgcatgtgagaaaggcggctctaggaaaacaagaccggactctgcagcggctgaggccactttgctggtgcgcgcacctcggatcccccgggcgggggctgggaggagcctcgcctgcaccgccccccaccccgcaccccactccagctccagccccagccccgcggcgcccacctcccgcagcggatccaaagcggcgccgtgcgccgcggtggtggctccagccgggcctgcgcctgtccttccatttcccggcggctacttcagccgcagccacgctccgaggccgcaaatgtccccagggccgaggcggcctggacgaggaggagccgcagcccgccaggagcgtccagcggaggccaggccgcggcgtccacccgggcccacagtccccgttactcctgacaaccgcccgctcgccgagacctggcttcccacccccgaccggcacgggcctcacccggatcttgcggctgatctcggtgccgatctccatggctctgcggcgtgcgggaactcagcactgcgcggcgcttggcttacccggaggctgccgcggactcctaccccgcagccgggacaccaccgcctcctcctccgttccgcccccggccgcgcacacggcgtatccccgccccggccggcactgcgcgccggagtgaacgcgcatgcgcccgtgtccgcgcctgcgcacgccttctacccgcgaaacctgtgctcaggcaaggagggcggcggcgtgcgcgtgcgggtggtcttgcagctccgcctcccgggcacctcggggacctttcgttagtctctctgctggccctccgcttattcattttattctctcttggatggtaagaatgaattaaatgtgtagcagaaagatcttgggctgtgatatgagacgcgagttcaaatccagccctcacttactgtcagtatggtatcggtccaggtatttcaacttttcttacctgtaaaatggagtctgcccattagaggttgcactgcaattacccttgaagggaaaatggactatccagagcaacagagccaatccgtcaactctttgactctgcagtacactggccctcctgggtttggttctgccttccttcttccagggccacccgtggcctctccccgagacgaatcccatcctcctgcttctctgaacaccctccgtgggacaacacttttgttcttaggacttaagttgtcaactctgtgctgataatgaccgaattttccatcagccttgaattctcacacaaaccccactcccaaattctaagtaactactcttattttctcccaactcagcgcttagacagaagtcgccttcatctccccttcctccactcaataggttactactgttgattcccctatttgtatcaatagccgaattctccctatccctgatcacaaaacctgggaaacagaggaagcacagagaggtctcctttctccctcatatccactaattcctgagagtggtctctgttatccattgctgcataacagatgaccacaaatttagcagcttaaaacacaaacgtttatcatctcatggtttccgtgggtcaacctcactgggtcctctgctcagggtctcacaaggctacaatcgtgtcaggcaggctgtattctcatctggaggcttgactgaggaggaatctatgttcaggctcattcaggttgttagcaagaattcatttctggctgagtgcggtggctcatgcctgtaatcccagcagtttgggaggcttaggctggcggatcacttgagaccaggagttcgtgaccagcctgggcaacatggcaaaaacatgtctcttcaaaagtacaaaaaattagctgggcgtggtggcatgcacttctagtctcagctagttgggaagccgagaggggaggattgcttgagcctgggaggcagaggttgcagtgagccaagatcatgccactacagccttgatgagagagtgagaccctgtctcaggaaaaaaaaaaataattcatttccttgtggctttatgagtaaggacccagatttttttctggctatcatctggaagccactctcaagtcctagaggctgcccacagttctttgccaaagggttcactaacatgtctgttcacttacgccagtaaaagccaggcacagtggctcatgcctgtaatttcagctcagtgaagtagaggtgggaggatcacttgagaccagaagtttgagaccagccaagggctttcatttaattaagttaggcccacccaggacctgaccccaaaatcagctgattcacgacctcaattacatctgccaaacctcttatttttgccatgtttattacctaagcaatccacactaggggtcaggagtgggttgtggggacagcagaagcaggagttgtggggctacctagggtctgtcacgtggtcctttaataatctcatataatcctttcttgtgaattcctatggcatctatatggaagctattagtataataatatattctgtgcaatgttatttcgtgtgtgtgtgtgtgtcttccctaacaaaattataaactctctgtagggctttatatttctccaacctttcaggatgctggacacatagtaagcactcattaaatattaatagggtaaaagaaattaaagacctaatttacaaaagcattcctcaaggataaatccagtgatcatacactcattcagcattg

SEQ ID NO: 1241799 - DNA, 4001 bp, Homo sapiens
aacatggtgaaaccctgtctctactaaaaatacaaaaaattagctgggtgtagtggcagatgcctgtaatcccagctactcgggaggctgaggcaaaagaatcgcttgaacccgggaggcagagcttgcagtgagccaagatcacgccactgcactccagcctgggcaacgagtgaaattccatctcaaaaaaaataataataataacaaattttttttaaatcaccatttatttaatcagaaattttttaagtactgggaagctgtgaaattcatggaggcaggctcagattttccaaaattctaattttcatttgaaagctcacatgtgattggcaacaaagactatggattcttttctttgctcactttcaagtaaatatctgccaaatatcctagtgtatgtaaccagtttgtcagtactttgaagttaaaaatgatgttccctgaaagaggtggctagcttagttctcaactaaaatgattttcctcagaacaatcgtatttcagtatacaataaaaatgttttatgagcatttctatttcctcgcactgaatactaagaagataaaaaatattttgtaaaccctggacttcacatcttcatcaatgacattttaagtgtaattggctcaaaaagaaaaaaactacaaggggggagtgatttgaatatgatttcattatggtgttactatgctgacaagttttatcaaccattagttttacacaatccaaacaccaccaccacagtgaaaaataacaaataccatcttagtattaatatgaaaacagttttgacttcagaggcccttggagtctcccacactttgagaaccactgtcattagtggtagctattatttttataggaggcaccagctttgggggcaaaccataaaaccttgctcaagtaggcaaagcctcagtttccttgtttacacagtcaaagatactgccacttaccttccaggattctcgtagggattatcctgagttaatacatatacaatagttaagcacagtacctgacccagagtaaacactcaaattataaaagaataaagagacggaaaaagccttactgtttcagagagagagggaaaacataaagagatcggaaaataaaactcactgaaccattacagaagcaaatgccagaaagcatcaaacattcacatccaacatcagagttctaaaaacaaatgtcaagaggaaagtaacaagaataggaaactttaaacaggcatggtggctcacaccagtaatccccgcactcccagcacctagggaggctaaggtcagataattgcttgagcccaggagttaagaccagcctgggcaacgtagcgagacccgtccctagaatttaaaatgagagagagagagaataggaaaaacataaaataaaattcggtcaaacagagccttaacggaggaaactaaatttcaaaacaccataacagaaggaggtttgggagaaaaaaaacaaggttgcaaaaagatgataaagaagtaaccagggagtataagatttgaagaaggtagaagggagtctctcccaatgtccaaagtacggtgagaaatacgcattcactaaaattctattagctgcaaactctaaattctgtaagactaacaaccaaaaaaacacttaccaacataagctcctaattcttgtaatttccccttaatggcactctgagagaaaaagagcaaacgtgcatgtgagaaaggcggctctaggaaaacaagaccggactctgcagcggctgaggccactttgctggtgcgcgcacctcggatcccccgggcgggggctgggaggagcctcgcctgcaccgccccccaccccgcaccccactccagctccagccccagccccgcggcgcccacctcccgcagcggatccaaagcggcgccgtgcgccgcggtggtggctccagccgggcctgcgcctgtccttccatttcccggcggctacttcagccgcagccacgctccgaggccgcaaatgtccccagggccgaggcggcctggacgaggaggagccgcagcccgccaggagcgtccagcggaggccaggccgcggcgtccacccgggcccacagtccccgttactcctgacaaccgcccgctcgccgagacctggcttcccacccccgaccggcacgggcctcacccggatcttgcggctgatctcggtgccgatctccatggctctgcggcgtgcgggaactcagcactgcgcggcgcttggcttacccggaggctgccgcggactcctaccccgcagccgggacaccaccgcctcctcctccgttccgcccccggccgcgcacacggcgtatccccgccccggccggcactgcgcgccggagtgaacgcgcatgcgcccgtgtccgcgcctgcgcacgccttctacccgcgaaacctgtgctcaggcaaggagggcggcggcgtgcgcgtgcgggtggtcttgcagctccgcctcccgggcacctcggggacctttcgttagtctctctgctggccctccgcttattcattttattctctcttggatggtaagaatgaattaaatgtgtagcagaaagatcttgggctgtgatatgagacgcgagttcaaatccagccctcacttactgtcagtatggtatcggtccaggtatttcaacttttcttacctgtaaaatggagtctgcccattagaggttgcactgcaattacccttgaagggaaaatggactatccagagcaacagagccaatccgtcaactctttgactctgcagtacactggccctcctgggtttggttctgccttccttcttccagggccacccgtggcctctccccgagacgaatcccatcctcctgcttctctgaacaccctccgtgggacaacacttttgttcttaggacttaagttgtcaactctgtgctgataatgaccgaattttccatcagccttgaattctcacacaaaccccactcccaaattctaagtaactactcttattttctcccaactcagcgcttagacagaagtcgccttcatctccccttcctccactcaataggttactactgttgattcccctatttgtatcaatagccgaattctccctatccctgatcacaaaacctgggaaacagaggaagcacagagaggtctcctttctccctcatatccactaattcctgagagtggtctctgttatccattgctgcataacagatgaccacaaatttagcagcttaaaacacaaacgtttatcatctcatggtttccgtgggtcaacctcactgggtcctctgctcagggtctcacaaggctacaatcgtgtcaggcaggctgtattctcatctggaggcttgactgaggaggaatctatgttcaggctcattcaggttgttagcaagaattcatttctggctgagtgcggtggctcatgcctgtaatcccagcagtttgggaggcttaggctggcggatcacttgagaccaggagttcgtgaccagcctgggcaacatggcaaaaacatgtctcttcaaaagtacaaaaaattagctgggcgtggtggcatgcacttctagtctcagctagttgggaagccgagaggggaggattgcttgagcctgggaggcagaggttgcagtgagccaagatcatgccactacagccttgatgagagagtgagaccctgtctcaggaaaaaaaaaaataattcatttccttgtggctttatgagtaaggacccagatttttttctggctatcatctggaagccactctcaagtcctagaggctgcccacagttctttgccaaagggttcactaacatgtctgttcacttacgccagtaaaagccaggcacagtggctcatgcctgtaatttcagctcagtgaagtagaggtgggaggatcacttgagaccagaagtttgagaccagccaagggctttcatttaattaagttaggcccacccaggacctgacccca

SEQ ID NO: 1241800 - DNA, 4001 bp, Homo sapiens
ctgcacaataagcatggcaagcacctccctccatcacctgagctcttaccatcacgactcactcatgacctttgaagataatcgaaatagcaaaacaaaacactctcatcatctaaacaagagttcctaaaagacaaactctgggcttcgatgcatgcaaagaaaacaataagacactcagctctacaatccacaccctatgttagcaaagcatgataataattctttgcctcttccacaagaaaagatgttcaactacttatttcttctaaaataggctcctaacattaattcctattaggttcactattcctaacaataatatgcccagcagtctgactgcacaaaatagggacaaagaactgatttttttccatcctcgatttgatgttaagctccttgaggatgggagaatgtcacacttttctgtagcccccacagcgcttagcagacatcaggcactcacttgctcattataaggtactgcactacagtgtacaaagggatgtaactgatagggttgcaaatactgaaatcttactaagatgcccacatgctgattttgggtatatccattacaggtggcttcacaaggacaggctttgcttactcagtgcaaagatgttaagtgggccatctcccaccaagcaccacatttcattaaaaggtgtttttaaattttaaaacctatactcgatttgaaattgtatcagttagtttcctttaaaacataagttatatgaaattttactggtgcgtcccaaaaaagtcaattccttccagaattattaccataaaaaaacacacattctgaggaactgtaacgaagatgacacttaggtcaagttgcattcctgtgggaagcttggaaaactgaggtgaaaagttacaggaagaatgctctttccatccaaatactgcaacaggtctccttcacatcaacagtacatgatgaaagaatgagacattttaaaataatttcacaagacacatgaaagaccacacttccacatttcaagttttgcttcattgctctaggttcatctgtcttttcaaaacatcgttttagagagctccattaaagaggatggaattctgatcaattctagattgctaagctaaatcaagcagaatccaaatttgtcattaaaggtccatgaaaaattcaagttctctgtaacttgctccctccacatcagagctacagtcaacatacgtggaaagatacagatcaaaggatgggtacctagaacatatcatatattaagagtttacctttctcaacgtttctaaggaagccgattatttttacatcagtagttcttgactgtgattcagtatcttcttcttgatcttcaaactgtctgttgcattcatatgttgttgaatattcattcattttaacctccaaagatgaaatttttgcttcattcttggacactctaacatttagatcaaaaagatttgcttccactgtcaaaatagctgctttcattcctttaatttcattgatatcagctgatattttccttaaaaggtgggaaatattgtctagctcattcagtgaacaagaggagcttgttatggaacctaagtccactggctccggtggaagaaaaattggtagaggtggtgatggaaactttgaagacattctcataaaggtgacaggaacctcaaagacattttcataaaattctctcccttaaaatctgataattttttcttcacagctcattaagttatttcatcgaaagtaaaagcagtgatcaaggctgttaccttaagacgtattaagagcaaataacatcttaaaacctgtaattcaaaagatggggttgtacatttctagagtcagaattcaaaactaaatgtgaaaaagctaaacgtaccagaccaattgctcttcgctacaactaagaagccctaatacgtagggccctacatcctctaagtaccatctgtatagctcctcttccagtaaaccctattattacatacaaaataatcctggtttctgattggctgaaaacagacatgtgtcacacaaagaattttctattatttacttcatatgatgagagcactgaagcgctactttataggttaagcaatataacattaagtgctttacatctaaatatgatatgaattaaatgtacttttcccttttcatcatctaaaccataacatttttaagcttcagatttctgatttgttttgagttgtatttccccttgaaattagtatataacattattgagagtgacaaatcctctggagggaaagggcggagaaagtaactggacccgtgatccacacaaacttctttcaagatacatgtggtaatgacagaattcaacttcactaatatagtatcgtgtaaacttaaggatggggaaataagaactcagccttggcttaatactagaccattattagacaggtgtttcttaaatattctctcccattttgttgtcttttttttttttgatagtatcttttgaaacacaaaaatactaaattttgatgaagtccgagttatcttttttcctttggttgcttgtgcttttggtgtcatatttaagaaatcattctggaatccaagacatatctatttttttccctaagagttttgaagtttaggtttttgatccattttgagttatttttgtttatgacataagataaggttccaacttcattcttttcatgtggatattcagttgtcccagcatcacctgtggaaaaacctattcttttgccaataaactgtcttaacaccgctgccaaaaattgatgggttgtgaaagtatgcatttatttctggattctcaattccggtccacgggtctgtatggtcatccttatgccagtaccacacagtcttcattactctagctttgtagtaagttttgaaatcaagcaacataaccttgccaacgttactctttttcaatagttttggctattctcagtccctttttatttccatatgaattttaggatcagcctgccgatttctacaaaaaaaagcaatttggggtttaaacagggattgagttgaatccatagatcaacttggggactactgccatcttaagaatagtaaagacatctaggctgggcgtggtgactcatgcctgtaatcccagcattttgggaggccaaggtgggtggattatgaggtcaggagttcgagaccagcctgaccaatgtggcgaaatcccgtctctgctaaaaatacaaaaatcagccaggtgtggtggcgcacgcctgttatcccagctactcaggaggctgaggcaggagaatcgcttgaacccgggaggcagagactgaataagcagagatcgtgccactgcactccagcctaggcgacagagggagactccatctcaaaaaaaaaaaaaaagaatagtaaagacttccaatccattaacacagaaaatcttgtaaggtccttaatttgacaaaggacgtttttactttggtttactccccaagcaaacaaataagatatgcaacatacaaggatgcaagttggtagatgctgctcactatagtctcttaaaagaagaatcctggcctggcacagaggcccacacctgtcattccagcactttgggaggccaaggcaggtggatcacttgaggtcaggagttcaagaccagcctggccaacatggcaaaaccctgtctccactaaaaatacaaaaattagccaggcgtggtggcatatgcctgtaattccagctactcgggaggctgaggcatgagaatcacctgaacctgggaaggcagaggctgcggtgagtgagactgcgccactgcactgcagcctgggtgacagagtgagaatctgtctcaaaaaaaaaaaaaaaaaaaaaaaaaaaggaatccttataaagaatggtagtctttggtttcccaaatagatgtcacagtaacagaataaagaaaatgctaagtgctggaatttgtaaaataaaaatctttatt

SEQ ID NO: 1241801 - DNA, 4001 bp, Homo sapiens
gcgtccagggggcgccctcgcccgctcctccgtgccgcgcgtctggggcactgcacgcgactccacgcccccaaccccctgtcccgcggatttcccctccccagttccctaaccccggatcaggcaggccagagacccgagcccgcagcggcctcgggtctaggccccacctgggggtgagtgttgcctggggttttgagcgagctcggcgccttggcgcggcagagtctggcacaggagggagggactcgtttgcagtctttaggagttgtgagggtggggggcaccgggggataggactcctcccctctgtggatgtggaaacaagcccaggtttgggatttctggttcagacctccctaggaggagaaagggaaggatttggggtcgggggcaggagaatcagcggcacttgacctgctggaaatcctgcttcacactcccctttctccgtccctgcgtccccacccacacacacatcttgggcagcactcagggacctcaccaggttacccaaggctctttggaggtatgtgtgcgtgagggaccacgatgtgtgtgtgtgtgtccttgtctgtgactctgtacgtgtaatctgtgtgcgcttgagtatctgtatttgtgtatgtatatatctgcgtgtacagacacgcagcctctgctatctagctttaaaaaaatcaattgaaacaatcgatacactcacactcgctctcgggcaccgggtgaggtgggggcgcaaccagaatacctgtgtcagcgggtcctggccagcacatctctccaacgctggctgcccgggctatttctttgcgaagagcgttttcatttgaggcgaaattaaaatccccccttcgcgcccgcctcccgccctcctgctgagagaaacccaaacaaccctcatggcgccgaaatcctttccatgccgacaagcccgccctgggcgcacgagtggatgcttggccagcctttcctgggatcgaccccgccgccgtgctcagccctcaccacgtccccatcccaccccacgcctcacagccggggttcctggccagcttcggaagccaccgagaaataggattccgtgcgcccgagagaacttttccaggggctaaggaatcggccagccggaggcgcgagaaaagttctgggaaggcggttgcacctaggatgggtggatgccacggggcctccgtccaggctgtcccgtccgcacgggtcgactggtcaccttggaatcccctttgcaggtcccagcgccccccgggaacccgcagcctccgcggagagcgtgggcctctccctaccgctggggcgcagcgcagtgcacgcctgagggtggtcgccgggggctgggcacgcccccagtcctgcgccgccgggggctgcggcggtgctgcccaccccagagagccctcggcctggggctccggcgaagcaagtgccttcccggcgccggtcgccaggggggcgcgggagcagccagatgcgccgcagcgctgggaaggcggcgaaggacaggggctaggggagtgaggggcgctcggcaggcagcctcagccctggccctgcgcgggagaagggacagcagagaccgcccgtggggccccggggtgtagggagctgtccgttcagccctggcgcccgcctcgcccgcggcagagggcggcacagccggagccttggaaagaccggcagcgccggcagccgcgggcttctcggccactgcctcccggacgcacgggaagccgccccccgcgccgccgccgccgcactgccgccgtcgcagaggggtgaggaaatcaactcaccgagctctggtcgccgacaagaggagccccggacgccggctctcgccctgcccgaggctgcaaagttgtggactcggcccggctggctcgcagcctgcgcttcgcttcgggaactgggcaagtagcggggatgtggggaggagggagcgggcagctgctggcttcccacttgggcgccagcgagtaagggccaggaagcggcggggatggcagctgggcaccccccagccccgccacccctccctccgctcctgggggcggtgctctggccgccagtctcagcatcgtggacttgccccctcctcccctctcgattccccttgagcgggctggggcgccctgcctggtttcagcgcccgttccagctgggagattgggattcagccctgatgtggattctccagccatcatcctgcccttccctctcggctaggtcccacgaccttccctgctctccactcggactgaaggaaccctgggggcttgagaggtcagcttgccagggcaacacccatgaagatcagcgtcatctcctcggaagggctgtgtacagagggttgggagttgggactctggagcctgtctacctgggtttgaatattcaccattcactactgtgagatctcagattccagtttcttcgtctgtaaattccagtgtgatcttagattccagtttcctcatctgtgaaatagagatatgagggttaaatgacaatctatgtaaaacccttaaacagggcctgcccagggcaagcactgcttgattagatcataattagacactacttatcgggcccctactaggtagcaggcattgtgctaagcctttagcataagatgcttccttaatcctctcagcctgatctgtgaagctggctgagccccattctggagatgaggaggttgaagctcagagaagctaagtctcatgtctaaggtcatacagccattaagtgacagagcctggacttgaacctggttctagcattaatgctcctgcactcagcctctacacagcccagcatcaccctgggacccacgggcagctctgatttgagagaaggaaagacaatgggagtttatccagacacagagcttgaacttggagcttcttctttgagcctcacccccaccttcttatttctatttccttccccttccagggctccgctattctaaggtgggtactgtgatgcgccaagagggtagtgacaccaatgtgtatcaaacagtggggggtggggggagcagagccttaaaaacatcaaacactgcaggaatattggtgccatcaccatcctcaatttcctgggtgtcgcagctcacctacctgccctgttcctctcctctcggtgatggcatacttaataaataaacatttattgctttctcaactggctgattaaaacaagagcaatcccttgaaatgagggccatatgctgatcagctcagcctctattcttgaataaccacacactgtttcctctgtaatttatcagcatacatcaaaataaaaaagaggccaggaaaccttttcacattctaaaaggatctgacatgtaagtgaaagaacagtatatgccacatggtggccgtgagcagctggtagccttgtgagttccagtggccacaggacagacatggggaggcacacatggcccttttcccttcagagcagctttgtctcataatcgtggccgtctgggccccttttcacaagctctgtctgcctctcacatgggcttggcagggagggaggctggctggggtgcttgggtttgggtatactgactgaagatctccattccccaaataccttgtgagtcgggtggtatttctaattttattttgcatatgggtgtgaggtgggaaggtgtgtgtctgaatctgtgtgtatgaggaaagggaaagagagaaagaagctaagcgaacgtgggaagatgttagtgggggaagggagtattcagtcaggaaaaggagatctggtcgtggaaacacaaatggacaaggacgattatttatttagaaatatcgtttatcaacagaaaaggacattacagcttcagatctaaagctagtggttcctcagctccccttaaggaatggagtgaagggaagcacggcaaatgtcattttgtttttctaaaacttatgcttatccctgacaaaatcaatagggaggcaaaa

SEQ ID NO: 1241802 - DNA, 4001 bp, Homo sapiens
tggggggcaaccaggcagggtggagcttagagtcctagggaatgtccccttacaaaatcaaagttgacagttaactgacataatggcactgactgatggaggggttatatgcccctggaagctcattaaatttatttcttggcctgtttatgtgccttcacaaaccataccccacacctctcccagccctttgcttgctggtactttctgctgctggggttaaaatgctggataagaggaaaagggataaaagaaactagaaacttagggtgatcaagaagaaaaggtaggaagagggcagattatgggaacaaaggtggaaactcagagctcatgggaaacagatggaaaaaaggggtgaagcaaaatggggaaataaaaaatatacaatgatacagtgggggaagggagtaaaattaagtcagcagggaagaggttttgttgtgcgaagctcctggaaaggcagatgacacgcatgagaccagaaggtgaggttctgatgagggagacaggcacatggcaaaggggacagtcaacaatgctaggaagttccaaagcttctctggtgatggtggaagaggaggctgtcctggccatgctgaaggcactagaggctttggcgaagacacatttgctccatcatcccactcctccaggccctgactgtgaccaccacaatcatgactgataagcaaattccaaagtagcctgaaaaggccagagatatccagacagactctgaaggagagggcatggaatcctagaccgacagaacaggcagccaaggcgtgacacatagtgatagagacacacaaggagaggatcactcagatgggaagggtcacaagtggagacagtgacatacagatccagagatggatgggatggaagagacaagatgaagaacagcaaaaccaaaagtcagggacacatggacagagatcagcggggctacaggcacagcgaggaagcgtggtcctgtgcttgaaaatgatagggctgctcagaggggcagacgagcggatgggggtggtaggatgggcgtgcaggacagacacgcttcaccttgaatgggcttatggcctcccctcacctactcaacactttcaaaaaaaggaatggaaagcccaacttcagccaaaaacgaacgaagactgagagtatccacgtcccctcccactccacgccccagcgcgctagcccatccatcagcccgccggccgcggttctcccatcccacagccggcggggggccgccgagacccaggaccctccaggctgacagctctgagccctcacactcaccgggcctccccttccccccgggatccccgctccctgcccaactcggcgcggtccgtctaggctttccatacccttcgtctgtccggcgggcctctgcctttcccgttcccgtttctccctccacccccgcatctctcttcccccatcctcgcgcacgccctcttcctcccacacccctgtctgctatctcccagggctctcggtctgtctgtccgtccgtccttgtcccctcccccagccccttcccgtccctctccgtcccctccagcggcagtctccaagcgcctcctctcccgtctcgagcttccaaagagcaaggaagggaagaagagagagagggagaggagaaaaaaaccaacccagcagcatcggaaatcgatgcacttacacctcagctggaagcagggacgggagtcgaaccgcggccaccgagcagcgcgaggcggggaggggagggggcggctcttggaagggacttctccgatgtgttgattcctcttttttcccctcctcctccctccctccagcgctcgctccggggcgtcagggacggagacggaaaaaaataaataaataaattcacggcggtgagggaagtgaaggaaaataatcaatgctatttggctgcggctgaagtgtttccccggcttcgtgagggggtttccattgattcaccctgggcactcgctcgctccctgcctcctcctcctcctcctccttctcctcctcgccctcctcctcctcctcctcctcgccctcactcctccgcctcattcactggctggagtctaggcgtcccacacaatggaataatcaatacccaggcgcccggggctgccccactgagcaggtgcagcgacccgcccgccgcggcgcatgccgggagttgtagtctgttcgcgcccgcccgcctgcctcgcgggacccagggccgggggcaggccggccagcccaccaggtcgcctccaggttcaagccggtgcctgcaaagagggcaggcccctttaaactcttttccgtctcctctcctcttcatcctgtggcctgcagaaaccatacatgtgttttgttgttttgttttaaatcagcttcagaacaagccctgagccgcccaaggcctccttttttcattctcttcttcctgccttattattccgcctcccccatctccccccgcgaaattgggtactagaaccttctctaccgcagcaattactctttagtctctgagagcttctgcctcctccacacggttacatagtcccctgagctgggttgggggaggttcgggctcctcctcatcttcagtttatcgcttattaagtgctcctgaattttttttttttttttttttctggagacggagtctcactcagtcgcccaggttggagtgcagtggtgcgatctcggctcactgcaacctccaccaccgggttcaagcgattctcctacctcagcctcctaagtagctgggattacaggcatgcatcaacacacccagctaatttttgtatttttagtagagacggggtttcaccacgttggtcaagctggtctcgaactcctgaccttgtgatccgcctgcctcggcctcccaaagtgctgggattacaggtgtgaaccaccaccgcgcccagcccgtttttttgtttgtttgtttttttcttgagacagagtcactctgtcgcccaggctgcagtgcagtggcatgatcccggctcactgcaaccttcacctcccaggttcaagtgattctcctgcctcagcctcccaagtagctgggattgtaggtgcccaccaccatgccctgctaattttgtatttttagtagagacgggggtttcaccatcttagccaggctggtctcgaactcctgacctcaggtgatccaccggcctcagcctcccaaagtcctgggattataggggtgatccacctcacccggccgctcctgtattctaataataatttttaagatttcttgaatgcacagggacagttccaagcacttttacatacattgtttactcctctcaatacctcaagcatgaggtagatgctattatagtctcatttattgaggaaactaaggcacaaacaagtgaattaacaggcccaaggtccaatggccaataagtaagtgacagtgccaggactcaaaaacctccatggtctggctccagggcccatactaactgctatagcctacttctcttaaacaacacaacaaaaccctgaagttcacatgacaaaaaggagagataaatgaacattttgagtttatactatgtgacagtttatgactgaatcctcacaggtaactgtgaggcaggccacattttctcaatgaaaaagcagaggctggccgggcatggtggctcactcctgtaatcccagcactttgggaggctgaggtgggtagatcacctgaggtcaggagttcgagaccagcctgaccaacatggtgaaaccctgtctctactaaaaatacaaaattagctgggcgtggtggtgggcacctgtaatcccagctactcgggaggctgaggcagaagaatcgcttgaacccggggggcagaggttgcggtgagccaagatcacaccattgcactccagcctgggcaacaagagtgaaactccgtctcaaaaccaaaaacaggccgggcgtggtggctcacacctgtaatcccagcact

SEQ ID NO: 1241803 - DNA, 4001 bp, Homo sapiens
acccgacgtgttaagagaaggcaaaacacttcagcaattaaaaagtagcccagcagcttcaccctttcaaattgggagggggaggttggaaagaaatttaacaacatccatagacttttgctatgtacatttaaaccgcagtcctggaacattccgagtttaaaacttgctttttcaacactggctgacaagcaacatgttttaaggagccccccattaaatccttactcgcgggactctcgagttcaagccagcattttgtcgccacctccccccccaaccccgcccgcaatcgatgagccgcaatgcctcggcaacacaggtaagcgggtcaacctgaatgcctctttcaccccaaagtttgctgcacgatcggctatcgcgggaagaagcccaacggagctagggcggactcaagccccactgcaaacttgttctgcaacatctttttgaatcacaacttggcctttcttcctcgcatatccccagctccccccaaagagtggaggaaaacattgtcccgagactcacttccccgagggacctcccactcccaaccccacgggtgggtaatgccgctggacagacctagggcgcagactgggaacccgatcagaccagcaaacctgggatccagcagcacgttacgtaaaacaggatcgcccaaaacttgtcccaatcccagccctccccccgaagcccccgggctgccctgccaggcaaacttcgcccctcaaaaccctggcctccagattcacatgtaatccccgccagcaactgttgaaactcaaagggtgggaaggacggggccaaattccttcaaacttgggagaaatgccggaggagaaaagaatcatctcgctgcaccactttccccattgccttccaagacccaaacttttgggggttctttcttaaggcaaaagaaaaagactttttgaaaagcaaatgctccgcccccctttaccttgcataaaacttcgctcaagtcgaagatggtggcagacacgagggtggtggtcatcctgtgcgttcgcgcgagccaggggcgaggatctggtgtgtcgcgaaggtcccggtgcggggaaggcgcagcctctcctgtctggagtcccacacgccagttcccggcgcccctcgcctttctgactccgggctggggcgcgcaaagcccaatttataaagttcagatttggtgggccggggggaggaggagctttaaacttatttaaatgaggaagaggaggaaaaagaagttgattgacactggagttgaatcagccatgcggtcaggcggggagggggggcagggggaggagaagaaactttcaaaaggaagaagggggaggggagacgagaaaagaaggcggaaaaaaaaaaccccactgtgagccgcgcacaacttttttttttttttctttaagaggaaaagtttcaagtcggctgacttccctacccggcgcttcaggcgccccctctccggggccgcgcgggcgcagagcgggaggggcgcgccccctcctttgtcagcctcagagcgcggctgtgacgtcactcattccactccctccggggttcttgttgtcatgttgttgttttttgttgggcaggaaggcgggctcgactttctctttttgccagcgggagctgaagcccgtccttagcgcccgggccgcggtttccatcttgagctggcggtctccttgaaacttccccaagtgtctgcacaacttaccttttcccgacttctcttcgacactcggctcccttcggcaaaccgggcaggccgaggacattagaaatttgggacgcacagaatgttcaagcctaggattttatgttgctgttttttttccagcggggcgtagggtggggcgcgctgctggggggactagggaaactttttccccaggaggacatggtctggcgggggcgagcgcggcacaatttagtgcgccgcacgcgtcgacactcgcgctcgctttgcagccggcgctctccgggtgtgggcgggtggggggcgccgcaaaaaaagaccacaacccgggacgattgtttgttttaccaggcctaggcgtgccgtttcttttcacgcatccaatctttaaactttttagtcaagaaaaccctaatccttcctgaatgccccttcctcccagaaaaagcccaccgagcaactcactactttccacgcgcgctccgaattctgggcggcgccacaaccctccctcctcctccatcctccccacacacacctcaagactctagaacaatgaaaaaaggttactttggtaagaatgaaggtaaagaggtggagggaggcggcacttttaacttattgttgcttctctctcgcccccaccggagtggaacatatggcttgtcacgctgcgccgttttggcgggaggtggagagggggacatgggagccacgaaaccgaagggcccgcaatggagcatgactcccttgaaaatgataaaatatatactgttaggtttggatgccgcccacccaaataaaaagttaacgagtcccccacccgccccctgcgccttggcccgactgctggcgtgatgacccaggcggaagtcgcagggctgcgcttctttccgatttccacgcgggctccgccgcccccctcggccctcgcacgtttcttcccagcactcgaggccgccgagtctgttatgaaacccggtgctgcggagtggctaagattgagttccattgcgatgtaattaggtcaccccattatgagcacgtttctttggaaaggacggggcgggccgaagagagcgcattctcaccacccccaacacacacttttttttaaaactgcatttcttatttattcgtaaacatctgggcaaacccagcgaaaccttccaaatcacaattgtttgagaaaccggctgtttttcaactttgtgaaacccaacttttgctgcagccacgaacctacgtgatcccagcggggtcggctttcatttgtctcctctgcccgaaatggatggcccccactttaactcggctgctgcccctcgcttgttctgctgctgccctccagccgtctgttgcttccctcccccgctcccatttttcagcttttcttgaaatctggcaagcgccagaaagggaaataacttccatccaccttaatttaaatcattcaagtgtaggtttctttcttagagggatgtttgctcgttcctttcccaagtgggtgttggggcggtgggggagagatttcgtgcagtttcttggtgatgaggtaatgagttccagatttcaggacagagcagagtgcgcgttgaaaccacaaggttagtctgagttctgatgtgaagctatttcggttttttattcccccggcctccacccattcccgctcccccaccccccaccccccccaaaaaagaggccggctggtctttaactcccgagggttcgcgaagctcagctggggggaccggaggaggggctggaaaaaagcaaaggggaaggggactgggagcgggcggggcccccttcccggcccagggcctgtccccgcggggcaccggctatgcccctgcttcgggcggcgccgctttccctccaaggctgcgggaccggccaggagcaccatcaggcgccccagaatggctacaaagtggatttttccaaagaaagctgattcctcgaatttcctcggcttttccaactcccggaggccctcccctccccctctccccgggggcgcgggctccgcaaggctgcgactggcctagcccgctcgctcccgagttgtttaccggccccgccgaccaagggtttgttccagctcccagagcctgtctctataattaaactcttttttaaattgtcgggttgaaacgtcatttcggggactttccaagggtgagggagccgagaggagggagcgagtcccttaacccttcgctgacccggcgtccccgccgcggtgagggcccgagggcgggagccgacccgccctcgc

SEQ ID NO: 1241804 - DNA, 4001 bp, Homo sapiens
tttaacttattgttgcttctctctcgcccccaccggagtggaacatatggcttgtcacgctgcgccgttttggcgggaggtggagagggggacatgggagccacgaaaccgaagggcccgcaatggagcatgactcccttgaaaatgataaaatatatactgttaggtttggatgccgcccacccaaataaaaagttaacgagtcccccacccgccccctgcgccttggcccgactgctggcgtgatgacccaggcggaagtcgcagggctgcgcttctttccgatttccacgcgggctccgccgcccccctcggccctcgcacgtttcttcccagcactcgaggccgccgagtctgttatgaaacccggtgctgcggagtggctaagattgagttccattgcgatgtaattaggtcaccccattatgagcacgtttctttggaaaggacggggcgggccgaagagagcgcattctcaccacccccaacacacacttttttttaaaactgcatttcttatttattcgtaaacatctgggcaaacccagcgaaaccttccaaatcacaattgtttgagaaaccggctgtttttcaactttgtgaaacccaacttttgctgcagccacgaacctacgtgatcccagcggggtcggctttcatttgtctcctctgcccgaaatggatggcccccactttaactcggctgctgcccctcgcttgttctgctgctgccctccagccgtctgttgcttccctcccccgctcccatttttcagcttttcttgaaatctggcaagcgccagaaagggaaataacttccatccaccttaatttaaatcattcaagtgtaggtttctttcttagagggatgtttgctcgttcctttcccaagtgggtgttggggcggtgggggagagatttcgtgcagtttcttggtgatgaggtaatgagttccagatttcaggacagagcagagtgcgcgttgaaaccacaaggttagtctgagttctgatgtgaagctatttcggttttttattcccccggcctccacccattcccgctcccccaccccccaccccccccaaaaaagaggccggctggtctttaactcccgagggttcgcgaagctcagctggggggaccggaggaggggctggaaaaaagcaaaggggaaggggactgggagcgggcggggcccccttcccggcccagggcctgtccccgcggggcaccggctatgcccctgcttcgggcggcgccgctttccctccaaggctgcgggaccggccaggagcaccatcaggcgccccagaatggctacaaagtggatttttccaaagaaagctgattcctcgaatttcctcggcttttccaactcccggaggccctcccctccccctctccccgggggcgcgggctccgcaaggctgcgactggcctagcccgctcgctcccgagttgtttaccggccccgccgaccaagggtttgttccagctcccagagcctgtctctataattaaactcttttttaaattgtcgggttgaaacgtcatttcggggactttccaagggtgagggagccgagaggagggagcgagtcccttaacccttcgctgacccggcgtccccgccgcggtgagggcccgagggcgggagccgacccgccctcgcccagacgtggtcgacaggtgcccaggggtggcgggagggcggccctacggtgcaggaaggccgaggcgaggcgtgcgtggccgtcccccgccaacttcgcggtgcattccgccctcccgctccttacccgcgcagtccccaggctggccgccgcctcacctgcactgccgcttccgaccgggaggcggtgggccggctcctctgtcccaggcccgacttccgggccctccccattcgcctggagcgcgtcccttcgtggggaggggcggcccaggtattttagcttggaggtggtggtggggtgggatgttcggttttgtgcaagggggaaagtgaaagtcttcggagtgaaggaggcgctgcgggtgtacgtattcatcggccaatctggaccccaggcgcacctcaaggcagatgacagtgtgcagcactgggccgcaggaccccagaaggttaggcctagtcacaggcgtcagcagggtaccccctcctgagagccctgcagtgttgcacttcctctcaggcttcaggtcatttgcaaaatcccccaaattcttcaggttgaaagagagagagacacctggagtccccttgtttaaagtttggaatgctgattccctggcccagatggggccggggaatctgcatttttggtaaatttccatctcacgacccaaatactaatgtttgagaatcagtgagccagtatattgaagttaggcaatcctggatccaaatcttggccattttctagctatgtgacttttcaagtcactgaccaaggcctcaatttcttcatctctgaaataggaatcatgataactgcctacatttggcccataaagtgcctagagtcatgtctcgctgcaaccgtctatatgtcatgctgttgtatgtaaactaagccatttggcaacccttattacaccacaaaacaaattccggggctattcacttggcaaaggattattcagtgtagacttccattaaatggtcaactgacaacttataagtttgatctgtgtcactctctagcctccacccccagccctggataagacaggccctgaggcctggaaatggggagaggccctgggcttggagcctgggggagagtaaagtggttcagggtagggtgatggggatctgttgcccatctgaaaaatacctgattattgacacaagtatttttgaaaacaactacatcactggggccctgtggtagtctgtacaagccagactatcttatctctcaaagccctcaagcccctcagaaagcttagtgtgtattactgagctgtcaatattctcctgaacaaggcagaggcctcaggagagggcactttagggtctacggtaaatgcggcactgcagggtgtctggaatctttgggtttgggagcaggccgcctcctgctaggactactgagaatccaatcccaggtccagcattgccctggggggtctgattgcccgggtctctgcaagatgttccaactgtcagtgaagttatcaggccagcccacagctacacctctccacccaccctaacctaggccccacctagagcagtctggcgtaatctgactctcttattccagcttgggtttttctcactccccatgcacttctcccaccctccagggcactccgtgtgctctagtcctttttagatgagaatgagccatcttcctcctactccggggcctttgcacatgcaaatgcttctgtgtgaatcaaccttcctttagcccaagtaaattctaaatcattttttagaacccaactcaagcctcacttcctcagggaaaacattcttgatgctttcctttgtcacaaaacagtgtccctcctctctcttaggctctcatggaatgttcatttccttcaaagtagttatttcagtttgtgagtatacattcattcctgtaactttttttttttactttcaatttaacatacagtaaaattgatctttatttggcatacagttctatgaattttaacttatgaattgattcatgtaaccaccaccataatcaggtaacagaacagttccattacccctcaaaaactccctcatactatccctttgcattcatactttctccatctctagtccctgacatccactgatctgttctctatcattgcaattttgtctttcccagaatgtcatacaaatggaatcatattgtatgtttgatttcacgcagtatatgcctttgatatttaaccatgttgttgcatgtatcaatagttcattcctttttattgataaatagtatttcactgtgtgcttatacaatagtttatccattttcctgttg

SEQ ID NO: 1241805 - DNA, 4001 bp, Homo sapiens
cgctagccacaatgcccagctaatttttgtatttttagtagagacggggtttcaccatgttggccaggctggtcttgaactcttgaccccaggtgatctgcccgccttggcctcccaaagtgctgggattacaggcgtgagtcaccgcacctggccagaaatctcattttctatcttaacacttacactggcttgttgtatagccaggcgcagtggctcacacctgtaattccatcactttgggaggccgaggtgggcagatcacttgaggtcaggagttcgagactaccctgtccaacatggtgaaatcccatctctactaaaaatacaaatattagctgggcatggtggcaggcacgtgtaatccaagctactagggaggctgaggcaggagaatcacttgaacccaggaggcggaggttgcagtgagccaagatcttgccactgcactccagcctggaagacagggcaagactccctcaaaaaaaaaaaaaaaaaaaaaaatctcaaaattgtggctaaagctcctcctcttgacaacaaacgccacctctaggcccaaggcatttaagagactttgctgctctatttcccagactggaattttctgttcattcagatattaaattcagaatctaaatcactaagtgagtagtccttggaaggacagccctctgcacccccacatgcatcccacaattgggaggagtggagaggccttcacaaagctaatgaaaatgtaataataaactttagatctatcaaatacctgggccgacctggttagccttgtaactggattgtttcaactctagctagatgtatattaaagactcaaaacttagaaacaatagtaacaatttcatctttaaaaacaatttttttacactgtaattcttctgtcccttctttcactaactgaaaaaaaaaaaaaaaaggagcaacaggagacaattcctctactttgacccatggcaaagccaggcctgcagtgaatcaaaacaaataatttttctctttgtcacttaaaaactaacttaaaaataacttcaaaatacgaaaaaagataactggggcaagaaaggggcttttgtcactttgacaattatattcctaattccccctagccttgacccgcattccaaggccccgacaaggtgtaaagccctgcctttctgatagtcactcctcccctacagtaatcaatctatcaaccttattttcagataaacaaggaaggcgaagggagtgactaggggatcttatttactacaatctaacctcagacatgcccagccagctcccaaaacagaaacaaaaatcaaacttgtcacaattgagaaaaatataaaatcaaccttcaaaagtacacctcacgcccggccatgtcaaccaaacattttgcccactcgggcccccacctcgacacctctccccagccgggggttcctcacccttccttccacccggacaccaccgccacaacccgaggggcaggagcggagcctaagaacaaagaaggtcccccaaaatcccccccacgccggcaaaacccggagccgaatccattgtttataccaccccacccccacccccgccgcacccgcccccccttcctcccgagggcagcctgagccccaggacgatcactcgccccgcgctgggccgtgccctccccgccctgccctgcccgccgcggcccggggatcccaccactgagaagctcggccgcagcaaggcggcgtcggggggccgcagggcgccagtgggggcagaggctattcctcaggacaccggcagatccatcctcatctccatctccgccaccctcctccttcgttgcctcccgggcttcctcctctcctgttgtcagttgggatcagctgatcggagtgaacttctcccagctcggactaacaggaaggcgtgagcggtgcagcccagaaagggaggagcgagagagggaggatcccggcgccagcaagggcgtagtgcgcactgcctcctgggagatgtagctcctcgaggcgcgctctcgcccctcatcccggaaaggaagactctgaatgactacaactcccagtactgaagaggctgctcttgcgaggaggcggtggggacaggctacggaggatttcgggacttggagtttttgcattgagtgtggtgtccgcaggtttcagcacgttcttttgggttgtaactggggaaggcatggtgctacattagagaactgatgtaataatgtctagtataagtgggaaatggtgagtcaattaatttggattcaagtaacctcttgcacaccattccctcagaaacgtgtgagcacagacagtctccaccttcccaatttcacttcgcaaaaactaaggaaaagaccagaaaaagtgataagaggatataggtactcttgggaagtttttgttgtttttccccccttggcaaaggacaaaattacaacgaatttagttttaagatctcagttggctttattgcgactctaggatcaggcaacacttcattccagaaagtggagtgaatgttctgatgagctgagcaggagaggttggctttgtagacagagaaaagcttgaggaagcaaaagcaaagaacaaagagcatattggtttctttctttctctttcttgtcattcttttctttcctctttcttctctttttttcagtcttctcatgggaccttgacatattggtcacttctaagctactttccttggaaggtgaggacagagagacagaacaatagaaaaataactgattagttgacatcagttacttcaggctacttcttttgtgtaaggattacaacagagggagcttcattatcatgcaacattaaaacaagcctgtttgggaaactggctgtccttatccctctttcctgatttctctgaaggtcagataacaacttagcttgggtttggtaacaacttagtttggatttggtgaggtgaaactttagcatgggtgactccatttttattttagccaggtctattggggcctggtgcaggagtttagtccaaaacaaaggcctcctatcatttttacttaacacccttcaagggtattctccaagccaaccatgaattttttttcctacctattatttttctgatctttccttctatagtttcagaacttctcaggctgggcgcggtagcgcatgcctgtaatcccagcactttgggaggtcgaggtggacggatcacctgaggtcgggcgttcgagaccagcctgaccaacatggagaaactccatctctactaacagatacaaaattagccgggcgtgatgatgcatgcctgtaatcccagctactcggtaggctgaggcaggagaattgcttgaacctgggaggcagaggttgcagtaagccgagatcacgccatggcactccagcctgggcaacaagagggaaactctgtctcaaaaaaaaaaaaaaaaaaaagctattatactttcagaacttctcaatttgaaattatctttgagggccaggcacggtggctcatgcctgtaatcccagcactttgggaggccaaggagagcggatcatgagctcaggagttcaagaccagcatggccaacatagtgaaacctcatctctactaaaaatacaaaacattagctgggtgtggtggtgtgcacctgtaatcccagctactcgggaggctgaggcaggagaatcacatgaacccgggaggcagaggttgcagtgagccaagatcgcaccattgcactccagcctgggcaacagtgcaagactctgtctcaaacaagaaaaaaaaaaaaagaaagaaattttctttgcgttagatgggctaaattttcagataagttttcaggctacagtgcaggctaatggttaacatttatcaggcttttttttctttttttatggccttatatttgtttagtgctttcactttttgtttgtttcttgaaacaacattgaaagaaagcctgagtctgtgtt

SEQ ID NO: 1241806 - DNA, 4001 bp, Homo sapiens
cagcaccaactccccttcacaaaccaaccttgccctcctcctctcctggccctgcccttgccctaggcttctttcatcccatccccagaggtcctctcaaatttaaggctaactactccctaactggccaaattatcaataactctccaggctgtttctcaaagatatgtacagaacactctgaagacacctgatgggaaaaggcagcttttttattgagacagagtctcactcagtgacccaggctggagtgcagtggcatgttcacagctcactgcagcatcaccctcctaagcccaagcaatcctcttccctcagcctcccaagtagctgggatcacaggcaaatgccaccatgccccaataatttttgtttgtttgtttttgttttgttattgagacagtctcgctccgtcacccaggttggagtgcagtggcatgatcttggctcactgcaacctctgcctcctggttcaagcgattctcctgcaccagcctcccaagtagctgggattacgggcccctaccacaatgtatggataatttttttttttttagtagagacagggtttcaccatgttggtcaggctggtctcgaactcctgacctcaagtgatccacccaactcagcctcccaaggtgctggggttacaggcgtgagccaccgcacctggccaagatgctgaagtatctaatgagatgatacagaaagaaaaaaagaggagacacagctaaggaatatagaagccactacagaaggtatagagaacaccaaagaatagcaattattatttaaaaaaaaaaaaagaatagcaaattattttttattattttcattttttaaaatgagacagggtcttactatgttgcccaggctggtctcctggactcaagccattctcctgcctcagccttccaaactgctgggattataggcgtgagccactgtgcccagccaagaatagcaatttttagccgcagagtttttcttttaaacaggtaactgaaaggctagcctaagtattggttttcctaaggacaaatgatataaatctggcatgagtgcaacagctgggttgaattcacagaggatgccaactcccagtaaatgggaaattaggatccaatacagcgtaaggttcttactgtttcaacccaagtgacctggttcacttctctgaaagttcttcagagaaatgggggcatttgtaagtatctcaaggcttggtgtgaaacaatctgcagcctgatttgccacagtacatatgccatcattccctgccctagacaaatgaactgttggcttatgttgtccaaggtaacaggtaaccacttatgacataagaaagagactccaggcaagccagccttcagatgctggccactgacactcttgcatatgaggtaagaacaagcatctcactcgttcacaagtcacagcctgactaatgaatcagaccttgacaagtttcaggaggctttacaagaatcaagagtgtgggaaaataacagtaactgttaaaaaaaaaaaaaaaaaatccaacgttagcatgttttagatgcaagagtagggagaaactcctcttttagaatctaatcagcttttccttttttttttttttttgagacagagtctcgctctatcacccaggctgggtgcagtggcgtgatcttggctcactgcaatctccgcctcccaagtagctgggactacaggcgcgtgccaccatgcccagctgattttttgtatttttaatagagacagggtttcaccatgttggccaggctggtctcaaactcctgacctcaagtgatccacctgcctcagcctgcaaaaatgttgggattacaggcgtgagccactgcgcccggccctgatttttctttacataccacctgatccatatacttattagcaggttcaaaaattccaaacctcacatcattccacagtttcttgggttctcctcctcctgagatcccaaagctagaagagaaaggcagggaagggcccacctaccccaagaaagcttgggaaagcatttgaggcaagtctggaaaaggttgcctggagaccagatgatcttgaactttagttgccttgacaacagtgtggctctttctattgtatctatagggctggccccagtcatcaagggctagcaatgaatttcctgactcaaaagggacacacttctgtcatcagtgacatcacaccccaacaaaacataactttataaatacttcataaatgcttcccgatgtgacagaattggaacgtcaagagtttctacatttagagctcagaggttaaagaaggtacataaaggctgggcacagtggatcactcctggtaatcccatcactttgggaggccaaggcagacagatacctcaagctcaggagttcaagaccagcctgggcaacaggcaaaaaccctgtctctacaaaaaatacaaaaattagccaggtgtggtggcgtgtgcctgttagtcctagctacttgagaggctgcggtgggatgatggcttgggcccaggaggcagaggttgcaatgagtctagatggtgcctaggggacacagagccagaccctgtcttaaaaaaaaaaattaagacaaaattacataaaacctatacaaattcaactatgaaatggttctcccaactattcagaactgtaagtacagacaaccatagttaactcaatattcaattccagtattgaatattaattcctctattcgatagagacctgagcatttatttcctgcaagcaggtttatctgctcagtgcaggtatgcgctgcttgtaggtatctgggctgttgctattgtggaccctgagcaaaggagtcaagaaatgggacataagccagctagaaaaaaaggggcctggggcctgcacaacagtgtggctgaatgacatcaaaagtgatcctgtcagcaggaggaatagagaaaccactcccaggtatgtatgggcaagccactagggcagaaaacagctgcatagctctctctctgtctctctctcacacacacacatatgtgcatgcatgtgtgcacaccaaaaactgttcttctcattcatcacatttccaaatccacatttcccggtcaataataaacacaaaaagtagtactttgacttcctttgaatccaacagagtactgcatcaatcaggtggaacttcaaaaataagatagggctaacaacatttttttttttttttttgagacagagtcttgctctgtcacccaggctagagtgtagtggcacaatctgagctcactgcaacctccgtctccggggttcaagggattctcctgattcagcctcccgggtagctgggattacaggcacacaccatcacggctggctaatttttgtatttttcacagagatggggttttgccgtgttggccaggctggtctcgaactcgtgacctcaggtgatctgcctgcttcagcctcccaaagtgctgggattacaggcgtgagccactgcacctggcctaataactttttttttaaatatactaatggcatttaaaataggcatttcgggcctggcacagtggctcacacctgtaatcccaacattttgggaggcggaggtgggcgggtcacctgaggtcaggagttccaggccagcctggccaacatggtgaaaccccgtctctactaaaaatacaaaaattagctaggcatggtggtgtgtgcccgtaatccaggctacttgggaggctgaggcatgagaatcacttgaacctgggagtcagaggtttcagtgagccaagtttgcatcactgtactccagcctgagtgacagagcaagactctgtctcaaaaaaaaaaaaaaaaagtgaaaataaaccaaatcatagaataatataaatggtatgatctcatttatgaaggatatatatacatacacgcacatgcacttttacagcatttgcaatttcttcttttttttttttttttttttgagacagt

SEQ ID NO: 1241807 - DNA, 4001 bp, Homo sapiens
aatcatccaaacatggtggggggctctggaggggtatcctgccaccacgccagcgtgggaatgaatcttctcttccacgaggggtgccaccttgactcaagtgtttcaactccactcagtcggaagtcaccgcgggactgccacacagtgcctcagcagaggccacaaagaaaggcagggaaaaatgctaaacaattcagctgataccagaagggctctggaagagagaatgaaggaggggaacacagtggttcactataaaacagaaccgtaagatcagtgcatgtgtacagcagggagaaagaaattgtgctttggtggaaacctctgcctcatcttggccacactttctcacgtgctccttacggttcatacagacgtagagtatttctgtgctattaagagttcgttacaccataaatacaattttcacgtgtcaacttaaaagtaaattttaaaaaagatgaaggaggatgattggcggaaagtgtctaaaaagactcctcatggtggcgatactggggagaggtgggcagcactggtctcaactctccaggacacgctcagtgaccggtgatggctccgtacactgtagatgccagagacacttccccagagtcactcgaattccgtcctgtccccgaggctctgtggccgctcaccccccaccaggcctccaaccaagcttcaatgaacccagtcaattagtgctactttgacttcttgaacctagttccaacgtctgcttagttctatcactgagggaattaaacgaatctgtaacacgtgttaagtatgaaagtcatattacaaaaattctttttctcccccaattttttttttatcgtggtaaaatccacagaacagaaactggacacacctgttagcgcacagccagtgggattaaatgcactcggggccttcccagttggccaaggggctggtgtgaggcaaaggcacctccgatcaggtcacagggaaccccacgggaggcccagcggatggcctggctcagggaccccacgcccacgccccaatgtctgcaggagtggcctgggcaactcctgccgtgtctgggcccatgggaaacgggtgcaaatctgcggtctccttcaaactgtccagtgggcgactgcgacctcgcttccgaggtggagggtggtatagacgaagggaaacggggggcagcctggcccgcagactgggtcctggccctccttccgagcaggaggtggcttcggaaccggccacccgcccgcggcaccgacgcctcccccggttcccgggagggacccctgcggggccgccagctccagcgcttccgcggacagcacgcgccctccccaccgagcctgcgaggaaggcgctccgccttccactttctcgggagcgagccccagctctcgggacgcagtccacacgcgctagcccagcacgaaccggcctcgggcagggccgcacccacccccgggaccagcccgcgccccgcaccccgcctcccggcgcccgccctggacaggtgcctcctgccctcccgggacccccgcaccgggacaccgcgcgcctcccgccctccccgcgggcgtaggagcctgaggcggcggcccggggacgcggccaacctgggagagagcgggggcgggggccggctggggaaggggccgcccggaggcggaggggtcgtcgcgggagcctggaagcccgcggggccgggccggggcggcggggcgggtcggaggcgctggccggggcgacggccacccacctccttgtccgggacccactgcggctcctccaggccgaacgggcttccgaaggcgcggtgttcgggcaccatgcgcaggccgctcggggagcgcaccagcttcttggcgtcgcggcgcgcggacacctcggaggacatgacgccgcctcagcctctcggccagcggccccgcacccggcccctcgcccagcccggggcaccgcccgccccgccccggtccgcgcgcggctgacagcgccggcgtccaatcgccaagcccgccacggagcgcggactaatcggagcttgaactccgccccatcgctgccctctccaatccgtgtaagggcaccgcccctgcaaccctgaggtcgatcaccaatcggcggcgagggctggcccgggtacgctccgcccctctcagggagattgagactttggattggttagttagtcagtcacgttagcgccgcttcgtctctgattggtgtagcccactcagggtgctaggcgcctattggaggagaaggccgagaggagcaggacggcgggaagaggagtgcggaacccgcgggaggtgaggcccgccgagccgggctgcgagccgggctgcgagccgggcggcagcggggtcggaggtcgtgggcggcagcgggcgtgaggggtgaggcagggtcaaggggcgggggcggccgcgggtctccattgcccgagcctgtgggagcaggcgggcctggggctgcagcactcaccccgggagccccgccgcagctcgggtagcgttcaggcacctcgccggggccgggccgcgtgcgttcggagcggggaaggcggtctccggggcccccggtgcgcgcggggaggcgtccgctcaggggaggccgaggtgggcccgcggctgcgcccccggccttcgatgccttcgctcgtccgcctgggaccgcgctggcttcgcatcgaagtgggagaggtctgaacagttattttaatactttgatttggaaagaaaatcctttaggccgggcgcggtggctcacgcctgtaatccgagcactttgggaggccgaggcgggcggatcacgaggtcaggagttcaagaccagcctggccaacatggtgaaaccccgtctctactaaaaatacaaaaattagctgggtgtggtggcacgtgcctgtaatcccagctgcttgggaggctgaggcaggagaattgtttgaaccaggacccgggaggcggaggttgcagtgagccgagatcacattactgcactccagcctgggctacagaaaaagactccatctcagaaagcacacaaaaaaaagaagaaaatgtttgttcatcctgcctttaattccttattacaaggcgtgaatttttattgttttttttgagacagtctggctctgtcatccggggtggagtgcagtggcgtcttcacagctaggcacaacctcgacctcccaggctctcaagtagctgggaccgcaagcgccactacactggccagctatttttctttttttttttttttttcggtagagagtaggtcttgctgtgttgcccaggctggtcttgaactcctgggctcaggcgaccttggccgccttggcctcccacggtgctgggatgacaggcatcagcagtgttgaagcctgtgaggtggggtccctgtggctgactctgccctctcctggggccattggcagtgcaggggtccttgtgtgtggaggaaataaggagatgatcaaagtatgattccacgaatcacacggtttattgtcaaagaagatttgttctcgggttcacagtgctcagaggggaggagaggggaggaggtgaagacacctggcagggaagcagggcctccatggatggggtgcattcacggcagggaggtgagtggcagaacggccagggtccggttgctctgctgggatggagcgggcccctggagagtgagatctggtgagagttcgaggtttgccttggtagcagtggagagcgtgagagcgggagctctctgagaagctgggaccgaggtccagctcccaggccagcagcgtatagcttgcctcaaagcatctgcacaaccttcaagctgatgtctgtttttgcagtccagcagtcagggtcagtaactcacataagggagtgtctgacaaggtttaagtggcattcccaaggttgcggagttcactcaagtcctcacatatgtggtctgataagacatcacactcttgcaggggggtcaggtca

SEQ ID NO: 1241808 - DNA, 4001 bp, Homo sapiens
aagccttaatctcacctccacctccttatcttagtttaaaataaaataatattcgagaaaaccataatagctaatactatctgaagcatatttttaatacagaaagtgaatcagacagtcttaaaaaaggaacttcatacaaatttatttttaactatatgctaaaaacaggactttaggaattcataagcctttctttgaagttaggaatttagacggtaactggctagatctcaaattaaaggagaaaaagaaaaggaagggatcacttaagtttctccatcgtatatgtgctaatacaatatgtaaacagtatagcataacagtcaaaggaaggaaaacccaaggaaagacttaaaacggtacatttgactcctacatcaccagtggttactagcatcaccaggaggaacttcattgaaaatcaaggatggagaactgtggttgccagggaacaaggaggggttgttgtataaatacaaagaggtagcaccaaggagtgagggaattcttttgtggtaatggaacagttctgatccttattacagtgggattacatgaatctatatatggataaaactgcataaaactacaaatgaaaaaatgaaggcagattaagaaaatgctgaaaaccaaataaactctgtagtgtcatttaaagtaatgtgccaatgtcaatttcatggttttgatattgtactacagctgtatgagacgtcgcaattggggcagactgggaaaaggatacgctggactccattatttttgcagcttcttgtgagactgcaattatttcgaaataaaaagttttaagtaaagcgacaacaatattttcaatctcataagcaagaagagagcagggtttgcttttttggaggcaaagaaaatagttttcaatgcagttccaccatctatattaacgaggataaacaagaaatggcagtttcaggcacactttggcagccaggcttacattcagttgcagatgataatcaaaagccaatattgactaagtaatggatgtatactatagaggtaaaatttcagagcacgtgaaatacactgtgcctctgcttattcttcagagggtagttgagtgggggcacattgaccaatgcccaaatattgaaccacatgtctctcaccctgggaccgtctggtaggaaaagagatcccttacctcagcagatttggacacaccaccaatgcctgaagtatgtcttctaccctctttgggatatccccttgtccctcctgtagctgaggtacacatgcctgtgccagctcccattctcccctccgcaggcattcgcagaaaaatccaaaaagctgcttctgcgaagcagcttcctcttttccaaatggatgattcattttcccagcacagagtgcagggagatacaaagaaatgagttatgccgaacacattctcaatgttctcattcgcggagtacctcctagaaacaacacaacgccagtgagaagaaacagaaggcactgtattaagacaaagcagcaactactggtccgcctgggaaaggcgggacttgcttgcctaagtatcgttttcagtttaatttcccacgttactttttgaaaacactttcttcaaggggtggatcccatctcttcacgcggattcctatatttaataatattaatagtcatatttgctccgggcgcagacccataactctacgtccgtattccctactgaacgttatgcccagtcttgactccaaatccccaggtggtcgcctcctcaagaatgagaaattcagcaggaacctccctagtttgagccctctgttaaggcagaggattgacgaccaggagacgaatctgtgtcataagtggaaagcagtgtgggggtgggccgcagggacgctctctgcgggggtcgtggagaggggcccctccctctcaggggtgtcttacactcacctgctcccggcgcccaaagcaatagagctctcagcgcagccatgtttgagccgagtcaggtgacagaacccactccgaacagcggtggtgggggtggtgacaaagactgaaagccccactcctattggctcaaggcagggaagatgaaaattaagtgccatatttgtttgagtcacgtgacgccacctctccgggagtagggaaagctagaaagctcggaaagaggaaatcagctacctggctgcggaccatctccctcaattgtgacagctccggcgctcaatactttcagttctgcattcggccgagcaggtggcaggaagaactgtgaccctggatttttttttttcttccactctcttatctccttaacatgtgaagtcaacatttattgaacgccaaccagtgatggtgttttgccaggcgcgggggatacccggagctaggagaactgggttctcctccattattattctatctactgggctcttttgttccggaactctgcggtctgaatttccatattcttctgcttcactccattcatttatttgcacatttaccctacaactgttaattgaacggtgtgctaggctttattttatttttttagagacagagtctctctgtcgctggagtgcggtggtgtgatctcggctcatggcagcctcgaacttcctggatcaagtaatccttaagcctcagccttcctgtagtagctgggactagaggcgcgcgccactacaccgggcttaggccctattctctaagttgagtaaatggaggtccttcttctcaagggagatgcaggccaaaaattaggagacggtgggctaaattataagacagaagtatgcataagagatcagagagcaaagaatgagcaaaggctttttcgcaaacacaataatctgaaaccaagtcttttgttttgagacagagtctcgctctgtctcccaggctggagtgcaatggcgcgatctcggctcgctgcaacctccgtctcccgggtttaagcgattctcctgcctcagcctcactgtgtagctgggataagcgattcttctgcctcagcctcactgagtagctgggatttacaggcgcgcgccaccacacccggctaatttttgtatttttaatagagacaggggttcaccatgttggccaggctggtctcgaactcctgacctcaggcaatccgcccacctcggcctcccaaagttctgggattacgggcgtgagccaccgttcccagcctgaaaccaactcttgaagtaacggcttactaggtttgctcaccacagctgccttacaccaagccttttgtttggtttccctggtgtgctttaatcacagactctcagctttcctcactatgtgtgtttcaggtttagtaatttcattcagcatttcccaaactatttaatcaccaaagggtggtgaaaagagcaagttaaaacaaacaaaacgttttcttccaaaaactcttctgtgattggtggattgtcctcgattcctgagaaaagtaacatggctttctggcccattaaggttttttttttttttgaggcaatgtctggctcctctcacctcagcctcccaagtagctgggatcacaggtgcctgccaccatgtctggctaatttttgtatgtttagtagaggcggggtttcgccatgttggccaggctggtttcgaaatcctgagctcaagtgatctgcctgcctcagcattccgaagtgaaaccgcctttgcaaaattataactgaggaaattatgacagtgaaagaaatcagacctaaccgactctatcttgcttctaaccgttaagctgtccttgttcattcctgggcgtaggctgaactaactttggggaggaattcagttcatggtttgactctgaaacaaaattgataacagccctttccgaaaagacccacttcttgcctggggaccagtctgcctttgcaggactaacaaattagctacaagtttagaaattacagtttagaggtcatgcagcctctggctccaagagtctgaacctccccaaattg

SEQ ID NO: 1241809 - DNA, 4001 bp, Homo sapiens
tgattaccactgcactagatggggttaaaaggaaagggagcttctagggcggtctacgttcaaaagactaccttgatcacacagacacaccagtagttcacttttatggtctcctctccatggccctctgaacctcactgctcagatagctcctcctaacccgctccactctgcagctcaccagcctttttagactgagatcttggtaaagcctccttccctctgtcctcactctcctgagttagggacatggaacctcagccatggacttcaaaggtacagcaggaggcgagaggaaggcacacctgctcacctgctgccatcccaccatggggaatcttatcccagaggcatgtcctaacgcaaccccgattttgattttgaaagttctggaagacctgggtttgggaaagaggggcatgtagccagccctaagtccctttaagtggagctgaccctagaaaagtcagtcttagcacccacgtgagcctcggtcctcagactgggaggtaggggcgatcaagggagcctctgggaaaatccccctcccagaaatagattgctaagtagggtaggacctgctatcctgccggagaggtttttccagcagcaccccagacccctccccaggaagataagccagaaggatgatggggggcagggttgggagatagggaggccaaggctcagctacccccggccaggagaacaaaagctgagttacagccgcctccgctgctgccgcgggccgagctctttgtgacactttgtttgggacgcaaagagggaagcaccccccatcctttcccctcccccgccaccccgtgcttccagagagtttgggctccttccccctcccccaccagccctacctgggccgggggttggggggtgcacatccactcaggctcgcggctctgccgcccctcacccccaggtccctcgcgccctgccttcgggcccctacaaagacacccgccacctcccccgccacatcccccccgttggcccttccctttggtgtctgctcccccagctcttccacctggccccccctcccttggggccccccagctctccaggcttccgaggccgccacccccaccccgcccccccaggagctctgggcgaagtttgcttggggccgagccggcgcccctcccccgcccccgccccctgcacctgctccgagccgggcgcgctgagcgggccccccctccgggaggggggagggggccgggggcgggggccgggtggcggacgggggggcccgggagtcgggggagcggctactcacgagccccgggcgggcggcggcggagcgggcggcggcggcggcggcggcggcgggcggcgggccggcggcgcgggcgtcagcgttacgtggggccgggggagatgcgccgggccccggcccccccgcccccggcccggcccccgccccctccccggtcccccgcccccggccctggcccgcattgtgtgcggcgggaggcggcccggccattagcatgcggggggcggcgcggcggggctgggagccgcgcgggagccgggctctggctccggggacagggagctggggaccccgggagccgcgagaggcggccgccaggggcggggtgcgggcggtttggagacggggggcgctgtcggagggagggaggaagggagggagcgggggtggggcgcacagaggattccaacaggagactggaagagattttgaaaggtcatctcgtccttcccccagcctccaagcagcactgcccctccctccctaaacccggacataccagggaaggagttggctctgccgctctttctgccccaacatgcacagactcgggaagttcttcctggggttttatctcaaagcctctcccttacaatttctgtctctcttttgggggaggaggaggggcgattatagagatagttaatgtcggccgtataagaaacattattaaagttactcttcggtcctttccgttcttgataaacaattcctgcgccttcctctcgaattctattttccattcctcaagtcactttaatggctcttcaatacaacaaatatttactgagtgcttactaagtgccaggcactgggctcagcgctgtgagggatgagaaagaagtggtaccttccttccaggcgattgtagtctagactacaaactggtaagtagtatactcagatttagtcaatatttactgaatgcctgttcacctatctaatagtatataatctttccaataaccctctataattaaattagcccccatttacaagtaagaaaaatgaggcttcaggaagtctgtttccccagtggcctgcaggctcggggatcctcagtgcaagcccaacatctcacatcgccaccaaataaaatcaatgcacgtgggaattgaggaggagtagacacacagcagttttctggatctctttaaaacgtgactcccactccccgggaaagaaaagagtagatacaatgacccgccgatgttggcacagcactgatggggcaggagtggcttacaaaagatcacttgcctcccaggaccctgcctccctcctcgtactaacttctagagtcttctggcgcagtctcctcttatcgtcaacaacaagaaataataatagtgatgatgatcatagccactaacattgagcacttgtgtaccaggtactgggctaagctctcttccatgctgaaagcaaccccttgagactggtattattaacttccttttatagataagggaacagagagattaagcaacttgccaagggcacctaggtagatctgggatttgttttgatctatagagtatatttgggcccagctggttctgcttccgactgtagaaatgtgtccccagcttccttctgaataacacttttagtgtatgggcatcagacttatcggtgtgacctcatcagcaccactaatagttattaaacacccaccctgaatcaacaactcttcacagtcatattgttagcccccttttatcagtgaataaactgaggtgcgaataggtagaaaaacatatctatcaggacagacacagtggcccacacctgtaatcccagcagtttgggaggccaagcagggaggatggcttgagcccaggagtttgagaccagcttaggcaacattgtgagacgaccctgtctctacaaaaaatttaaaaattagccaggcatggtggcatgtgcctgtgatcccagctacttgggagactgaggcaggatgattatttgtgcccagaaggtgttggctacagtgagccatgatcatgccactgcactccagcctgggtgacagtgagcccctgtctcaataatataataataataataataataatgtatccaagatcacacagatggagaagcagcagagctaagattccagctcaggtctgtctggctatgaggcaccttctctctcaaaaatattaattgttgcaatagcatccttcccaagactcactatttgaggaccatgagatagatagatagatagatagataatgtccagttgcaggttatcattgaatcaaaaacaatccccaccataaacagggtcccccccatccattgagtcagtgttcagttcagagtaaaaccttcaagaaagaaggaagggagactgtccagaaagtgagaggcaagaaagcccctggaattcaaccttacctggtctgggggcaaagctgcaagtagtaatgacaggggaccaatccagacagaaagtaggatctctagggaagggcacataatttgaggaggaagccaaagaaaggagtaagatcatatggaaatgagggggaattgaggtccagagtgatagtgtccatggggatgaggtaagtgaaaccagaaaaggaacccaggatgggcagaaatgagggtaatgagaaatgggaacagagtgaggtcgggctagacatcttgtggagtgaactgaggccggtatctacccagggcc

SEQ ID NO: 1241810 - DNA, 4001 bp, Homo sapiens
gccctattcttgctgagccagaggaaaccaggatgctgcaggagccagagtctgcactatcaagagctgcaggaggtatgggggcagggaagaaagcacgaatagctagctgccaactaatttttccactgcctatcctggtcagtggcacttaagggaaaataatggggcaggagagaaaagaagaggtcctagaatgaaactgattggctttctctggctttgaacatttctcccctaatggtgggtaagaggaaactgggaatccaaatgattgaggttaaaagagtgggaaagcattaggaagctgcctaaatattggcaggactatgggaaacaggatagaaaattgggcaggaggaagcagttgtttctgtctggggtttctcctttctcacctctacaatttgctcacacctgtctctggttttcagggcttctctgagttggaagaggttcctggtttggagaatggtcccacggtggccagcacaggagcaaatgagagggtgggacagcgggaacagacacgtgctgctctccttccaccctgagagaatgctctccagacattcctgcatcccaccccaccaaactcagaagcttgctgggatccttcgagtccaataggaagtccgggagtgccttcagttttcactcaaagcaggcccttttttcgttccttccctgttaggggaagatacacctggacgagaatatatcctcacctcaccaccctgaaaagctgctttctcccttgcatccatatcctctcttcctgtcacctccccatacagcttcacatttgcctcatcgcacttttcttttctgtccacctttcataatcccatccactccaaatcccggaccctgcacacgccaactccctgaatccaattcaggagtgccccagttcccctttcgatccatctcctttctactgtagcggagactacaagtcccaggatgccccgctagcccgtgaccggctaggaaataaagagccttctctccgcggtaggggcgctgttggatgtgctgagtgacgcgaggcggggaagtcggggcctagcctggcgctttctcggacgcgaccactggccccgcgttcggggaggagccgggcgggcggtcctgcactggcgtgccgctcccccagccactgcaatagagagctggatctgggtccccagccctgcgctggcagcttcagagactggcgagggctcggagctgacgcttggcagagctggggcttcccagatgctgtcgccgcaccccctcgcaggagggcccaggtccgaagtcctgagacttggagcgcgcgcgagaaaggggttggagatgatgagtcagaagcgcggggcctttctcgtcccctcccctagggcctgggcgctgaagatggacaggctcgctgggcaggcgggtagatagggcaggcagagggagggaccctgcgacccgcgtctctccctaacgctttcccgcctcttgcgagcacgccggtgtaacgagcctgcgctgccgccaccctttatctccaacgcgggagcgggactgcgcaggcttggcctctgggctgacccgccgacctttgatctcggctgcggtcgggttgctgaagttctggctgcgttcacccccaccgtttacgacctttgcaagtgtgcaaagataacaggctcgcttgggcttgggaaaagcccgggagaactgggagtcccactagcagcagcagctgggcagcttgctggccgctagaaactagaaattgaccacagctggagtaccaagagaactcaccccaaattcacatagtgcccgggatggctgttcgcctcacactcatttttgttcccacttgagaaggcttctttccctagagaatgctgcttctcccggcctagccagggccaggcaccagtgaggatagagcgcagcctggctgccttgccttgacattgcagtggcgtccgctgcagctcttttctgtttgtgacaccttggaagagtggtaataatcttcctatgacaaggttaagtgtgagtactagtgggtggggacagttctgggatcaggctctggaatggagaaaagatctaggccttctgcatttcttcctctcccccagtctaattgccagaataatggagagctcatgtctgcagggccgatgaaacaatatttttcttgaaagtcagaaggtggtggtagatgaggaagctgagggaagaaaattaacaatttgttctgttttccaggttttagtgatgtgatcagattagatattgcattctagttccagagaagcttgatgaccatggaaattaacctctatcagtcagattaagctaggctctgctgtggtaaatgccaaatcacagtggcttaagaccacaaaggtttatttctcatactacgtgtccaaagtaggctggcaagggattctgttcattgcaaatgtttcctcccaagctcatggagcgccaccattttgagatcctaccctgtccctatgaaggttaaggttacccgccccgcgccccccgcctcagaatgtgaagtaagcatgaagaattgttcatggactcttaaatgctgccctgaagtgatacattcatgtcacttccacccattcaatggccaaagcaagtcatatagccacacccaacttaaggaaggccagaagggcaatgcctgcaaggagaggggaagcagaaatacttcattaaaagaaacatagttgggcgggctcggtggttcaggcctgtaatcccagcactttgggagaccaagacgggtggatcacctgaggtcaggagttcgagaccagcttgaccaacatggtggccgtgtctattaaaaatgcaaaaattaggccggcatggtggtgggtgcccgtaatcccagctactcgggagtttgaggcaggagaattgcttgaacccaggaggcagaggttgcagtgagccaagatcgcaccactgcactccagcctgggagacaaagcgagactctgtctcaaaaagaaaaaaagaaatggaattaataatttgtgatgatttttgaacagcttagcagttgaaatttatctgttccagcagttatgcccatacctacttctttggtttggtttcatgaacccctaagttcttactagaaatttttcctcaaaaaaataataggactgggactcaggaaacctagattctaattttgttgcttgggcaagtcaaacctctctgaactacattttgtgcacttggaggttatggtaatatttattctgtctaccttactggagtatcaaggctaaaataaaatcacacaaggaaaagtactttaaaactataaaccacttcaggggttaaaaataaattgcctgtagaggtaagaagtagtttaaatgataatttcttaaaactcaagagccagttcagctatagttcttcaatcatcagtctgcattagataaacatagtaggaattcaggttttggatatatgttacagttcatgtagaccttgcaaagtccaagagtcttcgattaaatattaaattcttaaaacctttctgataaaacctttttcatcatatccctctagggcattggttctcagagaaaggtcatttcgttccccagaggatattttgcaaggtctggagacatatttgttagtcacaactgaggagtgggggaggagggaatatgtaacaatggaaggcgcagtagatgagaagtcagatttgggatttagttccagtgctgctaatgccgctttcctgtgcattatcctctgccagctgcaagcaaagactattggagacttgtcctgtgttcctcattattccccctccacactgcctattgccacagtcccgggctgctccatgacagcgttctgctttgctgcagtgattcccagcaaccactgtatctgcctctttcttcatcagtttggcagcctctgtggaggtcactcattttacttgaatg

SEQ ID NO: 1241811 - DNA, 4001 bp, Homo sapiens
tctataaggatgcggggccagggatagatatcagaaacctttcaaaagcagtaggccaattatccttacatgctggggcagctggtagggaagtgggtgtggaccactaaaccttactcagtagagaaggatggaatggttggtgaaaagacttagaaacaacaaggacaggtacatagaagtatttgctaaatggaccacaaagactgtccctcaagtcttgtgattcaaaagtttttagggtcaaagtgtaaggagcaagggttcaggacttctggggtccagttgtaactgcctctggtcacctctaacacgatggttttccctcttgagaatcctagacctcccaaatctgctaacaattatgattaccactgcactagatggggttaaaaggaaagggagcttctagggcggtctacgttcaaaagactaccttgatcacacagacacaccagtagttcacttttatggtctcctctccatggccctctgaacctcactgctcagatagctcctcctaacccgctccactctgcagctcaccagcctttttagactgagatcttggtaaagcctccttccctctgtcctcactctcctgagttagggacatggaacctcagccatggacttcaaaggtacagcaggaggcgagaggaaggcacacctgctcacctgctgccatcccaccatggggaatcttatcccagaggcatgtcctaacgcaaccccgattttgattttgaaagttctggaagacctgggtttgggaaagaggggcatgtagccagccctaagtccctttaagtggagctgaccctagaaaagtcagtcttagcacccacgtgagcctcggtcctcagactgggaggtaggggcgatcaagggagcctctgggaaaatccccctcccagaaatagattgctaagtagggtaggacctgctatcctgccggagaggtttttccagcagcaccccagacccctccccaggaagataagccagaaggatgatggggggcagggttgggagatagggaggccaaggctcagctacccccggccaggagaacaaaagctgagttacagccgcctccgctgctgccgcgggccgagctctttgtgacactttgtttgggacgcaaagagggaagcaccccccatcctttcccctcccccgccaccccgtgcttccagagagtttgggctccttccccctcccccaccagccctacctgggccgggggttggggggtgcacatccactcaggctcgcggctctgccgcccctcacccccaggtccctcgcgccctgccttcgggcccctacaaagacacccgccacctcccccgccacatcccccccgttggcccttccctttggtgtctgctcccccagctcttccacctggccccccctcccttggggccccccagctctccaggcttccgaggccgccacccccaccccgcccccccaggagctctgggcgaagtttgcttggggccgagccggcgcccctcccccgcccccgccccctgcacctgctccgagccgggcgcgctgagcgggccccccctccgggaggggggagggggccgggggcgggggccgggtggcggacgggggggcccgggagtcgggggagcggctactcacgagccccgggcgggcggcggcggagcgggcggcggcggcggcggcggcggcgggcggcgggccggcggcgcgggcgtcagcgttacgtggggccgggggagatgcgccgggccccggcccccccgcccccggcccggcccccgccccctccccggtcccccgcccccggccctggcccgcattgtgtgcggcgggaggcggcccggccattagcatgcggggggcggcgcggcggggctgggagccgcgcgggagccgggctctggctccggggacagggagctggggaccccgggagccgcgagaggcggccgccaggggcggggtgcgggcggtttggagacggggggcgctgtcggagggagggaggaagggagggagcgggggtggggcgcacagaggattccaacaggagactggaagagattttgaaaggtcatctcgtccttcccccagcctccaagcagcactgcccctccctccctaaacccggacataccagggaaggagttggctctgccgctctttctgccccaacatgcacagactcgggaagttcttcctggggttttatctcaaagcctctcccttacaatttctgtctctcttttgggggaggaggaggggcgattatagagatagttaatgtcggccgtataagaaacattattaaagttactcttcggtcctttccgttcttgataaacaattcctgcgccttcctctcgaattctattttccattcctcaagtcactttaatggctcttcaatacaacaaatatttactgagtgcttactaagtgccaggcactgggctcagcgctgtgagggatgagaaagaagtggtaccttccttccaggcgattgtagtctagactacaaactggtaagtagtatactcagatttagtcaatatttactgaatgcctgttcacctatctaatagtatataatctttccaataaccctctataattaaattagcccccatttacaagtaagaaaaatgaggcttcaggaagtctgtttccccagtggcctgcaggctcggggatcctcagtgcaagcccaacatctcacatcgccaccaaataaaatcaatgcacgtgggaattgaggaggagtagacacacagcagttttctggatctctttaaaacgtgactcccactccccgggaaagaaaagagtagatacaatgacccgccgatgttggcacagcactgatggggcaggagtggcttacaaaagatcacttgcctcccaggaccctgcctccctcctcgtactaacttctagagtcttctggcgcagtctcctcttatcgtcaacaacaagaaataataatagtgatgatgatcatagccactaacattgagcacttgtgtaccaggtactgggctaagctctcttccatgctgaaagcaaccccttgagactggtattattaacttccttttatagataagggaacagagagattaagcaacttgccaagggcacctaggtagatctgggatttgttttgatctatagagtatatttgggcccagctggttctgcttccgactgtagaaatgtgtccccagcttccttctgaataacacttttagtgtatgggcatcagacttatcggtgtgacctcatcagcaccactaatagttattaaacacccaccctgaatcaacaactcttcacagtcatattgttagcccccttttatcagtgaataaactgaggtgcgaataggtagaaaaacatatctatcaggacagacacagtggcccacacctgtaatcccagcagtttgggaggccaagcagggaggatggcttgagcccaggagtttgagaccagcttaggcaacattgtgagacgaccctgtctctacaaaaaatttaaaaattagccaggcatggtggcatgtgcctgtgatcccagctacttgggagactgaggcaggatgattatttgtgcccagaaggtgttggctacagtgagccatgatcatgccactgcactccagcctgggtgacagtgagcccctgtctcaataatataataataataataataataatgtatccaagatcacacagatggagaagcagcagagctaagattccagctcaggtctgtctggctatgaggcaccttctctctcaaaaatattaattgttgcaatagcatccttcccaagactcactatttgaggaccatgagatagatagatagatagatagataatgtccagttgcaggttatcattgaatcaaaaacaatccccaccataaacagggtcccccccatccattgagtcagtgttcagttcagagtaa

SEQ ID NO: 1241812 - DNA, 4001 bp, Homo sapiens
atactattgactcatttaaagagtacaattaaaatatctttagttcattcagagttgtacaagcagaaccacgatcaattttacaatatttcatcacctcacaaggaaaccctgtgcccattaacggtcacttcccacttctaatgtgtttactatgagcttaaagggcttccatacaagcttcccagtaagcaactggtaggtactaaatatttgtataatgaatgaatgacactacaaatgatacctacatttttctctagtcatctcttctgaactccaaaccttcatttctaactgcttgctaggtatctccacatgtatatccaacagcatctcaaacctaacaatgtccaaaatccagattattatcttccttaccaaacctgttcttcttgtattacctatttcaatgatcgcccaatcttcctcccactcagctgcaaattctaggtctttaaatctctctcattctccatttttaaataattcccgtgattctctgttcccagaatgttctctgttccctactgtaatgccctgtttaggtctctcagtaactttctactatactattaaaacaggcctctaactggtcaccccgcgtttaaaattcctctttccaatacatcctttatgcagccattcaagttatctttccaaaacaaagaaatgcttatgtcacttctactcaaagttcagtgcctcggaaaaattgtcatagccctaaaggtaaaccccttcgtttacagaaaaactccccagagctagagattcagcaacttgccaaaaattagacatctacttagatgcaaaacgtaaaaaactagaacttaaaacttctgactgctactttagttgtcttttactctgcaccacactaagaaaaaaccaagtgcaatttctcactccctaacaaaatgcccgactttatttccaaatgttttttatttattgcaaatatgctgcgttgaccttcgttccaacctaagtactaattcttaagtcccaagttaataatatttaacttccaaatggtgcctaaatgcatttctgagcctcatgatcaagtgggataaactttaataaattggattatcttgagaaacttcagaaaataaattcgacacgaaatgtatgaaggccgtaaacaatccacacactcctgccccccgaactgacaggcaaaggagaaacgggcgacccagcccagccgagtaggcagctgtcccttttccaaacccagaaagtaagtggtatgaaaggagagggtagctctggactgaaacattcagggcaaggcctcctggcatcctctaccccacaccacaaaggcctcagaaataaggccccaaggtccgtaggcaggccccggctgcgggtgcagtccaagagcccccgccccggggactcgctgactctggctttctcaggacagtctgttcctatatccctacccccaaaaccaagcaaaggagcaagaacatcgcccctaaaaacccgcgaggggaagggccaaagccgcagggcttcagactggccgctcccgggcccgccagatccaggagggatgcccaaggagggcggtttcctctctcggggcgaactcggccccaggccccaagtagccggtactggcccccgccctctcgggtactacctaaccgaggaggggtggccaggcccacctcggagctcaccttccagttccgggaagccggccggccgtcagtcggtcccgaattccgtccacacacagcgtcttccggctcccgccggaagcagctcgagcgcgggacaggaagtttggctgaccccccacgcacacacccactcgctcgcctcagtgtcgtgtggctgccgcactgctcgggacccagacgtcaagggtgctggcggggcctccccaggcccgcgacgcagggctccgccccggacaggaggagccgcagccgccccgctcccactcactcactcactctcggccttcgggactcctatgtccgcgaagcccgaaaaaacaggtcagctaattcgttgacgtcactgccaccccgcagtagcggagggagtagtttttcccatcagcggaggcgttgcaatggaggcaaacgcgaaagaaaagatcactgcttaaacatttatcaaaggtctccatggagaggaccttcgaagtttcaccgcccgagaaaggaacttgcagaatcaagttttgcattatatacgggacggggtatgcagtgagtctgggttccgtgttgtaattaggatgtaaagagctcttggatgtcccgactgcgggcttgaacacttgacttccaagctggatgccaccttgttaaagctttgtgagtttgactgacttcttgaaattacttattttaaaatatttgcgtgcggaagaatgagagactcaaccgtgggaattaaaggagttctctttaaaaaggcattttcaaggttaaagataagccttgatgacaggtttgggtacacaaattactaatggtgatttaaaataaaggagaaacatttcagaggaagataattccactttagaaaagcagagtaggccggactccgtggctcacgcctttaatcccagcactttgggaggctaaggtgggcggatcacgaggtcaggagatcgagaccatcctgggtaacgccgtgaaaacccgtctctactaaaaacacaaaaattagccgggcgtggtggcacgcgcctgtaatcctagctactcgggaggctgaggcaggagaatcgcttgaacccgggaggcggaggttgcagtgagccgagatcgtgccgctgcacgccgggcgactgagcaagactccatctcaaaaaagaaaagaaaagaaaaaagcagagtataagatgcaatccagagttgaggatatttacttggaggtaaaggtccagtgctcaagaaagaggtcagaaatacagatggagatttgggagttagcaacatacagagaaaagtgaaaccccctcaggcgatgaaatggtccaggaaaagtaacaaaaaagggccactcacgaaaactggggaggctgattaccaacacagtttgaatctacttattacaaatgttgcatacaaaagtatattggcagtgtgtagacaatcataagccaaaacattcagaaacaataatcttcagttttactgttctgcgagggttgagtacaattaataaaacaaacttttgaggtacatcagtagttcctgaacattcatgtttacaaacatttgttaatttgcccagtcctgtcattttctgaaactgtctttgttgtcaatctgtttttgttttttgagatggaatttcactcttgtcgcccaggctggagtgcaatggtgcaagctcagctcacggcaacctccccctcccaggttcaaatgattctccagcctcagcctcctgagtagctgggattacaggcgtgtgccaccacgcccagctaatttttgtatttttagagagatggggtttcaccgtgttggccaggctggtcttgaactcctgacctcaagtgatctgcccgcctctgcctcccaaagtgctaggattacaggcttgagacatcaggcccggctgtcaatctttttaatcacctacaagtgatgtttacatctgtttgccctctcaatctttacaacttgacagtatgtgcctgctaacctaaaataaacatatgcttttctcaatatatatggagtttttaggctatacagtaaattatttggcaaatacaaagagatgatcctctggagtaaatcttgtcaacttaaccaacctaagttatttatcttcccatactaatcccaacccaaaaccgctggtctcctatcccaaaaactgttacacaagctccgaaacccccaatcctgcccccagtccctatgtacacatcataccattaagtctcttttcagtctacaatgtgaaaaaaaggccatctcaattctatttttacaccaagtttcagt

SEQ ID NO: 1241813 - DNA, 4001 bp, Homo sapiens
agtactgtgcccacccctaaacatttggatttatacatctgggaggggaccacagtttgaattgttaacgagagtgtttcccaaatttttgccttgtcaccgtagcttctctctacccacccacccagattgggtgcaccttgaagggagagatgatatattacacaatcggtgcccagcacaggccctgcccagaacacaacgcacgctcagggcatgaatgatggatggatgaatatgaataaacgaatgagtgaacgaatgaatgaacccaccctctctctatccatccagctccactgccccatcttcctcagcctgatcgcctctccttcttacggttgaggctctgtgcgccctccgaatcttgtagctgcaggtgtgtacacatgtcccagctcctttccccagggagagcaggaggtccactggtccacaaacccttcttaagcacctggtgggtgaaccgctgtttccgccctggggggtatacagtctaggtgccgacccccaaggaggaaacttcccaagggggaaggaggaaactggcatttgcagcacagtatgatgagcgccgaagccggtaaagtaaggctggcggcctgggtggcgtcagagaaggttctggaagatcaccaccatcctcatcaatactcacattgcattcacgatgatcccttccgtgttattttttaatggtgaattttatattatgggtatcttaccacaatttttttttttttttgagacaagatctcactctgtcacccaggctggagtgcagtggcacaatctcagctcaccgcaacctccatcgcctgggttcatgcggttctcctgcctcagcctcttgagtagctgggattacaggcgtccgccaccatgcctggctaatttttgtatttttagtagagacggggtttcatcatgttggtaaggctggtcttgaaaccctgaccttaggtgatccgcccgcctcggccttcccaagtgctgagattacaggtgtgagccaccacacccgaccagatttcaggaattcacatgccttctgctcaaaataattttcatgccaccgtggcatattctaaaccccttcaagctcaggaaacttgagggcagcaacctccaccgattcctccatgctgtgtccctgcatctaacaacgtgcctggcacgactattaaaagatgtgacatccatcctgtgtacagatgtctattttaagtgtcagctgccccaggctctcctaactttgcttataatagcagcagcgccatcggctggcatttattgagaacttttactacaccctgggcacataccaaggtctgtagatgttgagctgcttcttatttaggtcagaactagtagctgtttccactgtagaattttcaaaaacaggtggagcccttgccggatcctgacataaaatggcatcaaccttatacaaccggcttttgttcagctgagcacacctgaccaccctagaaacgaaccgagtgagaaattcatccacttgctctggcttcaaaatgtagaaccaagaggaagaaatgtgaagcctaagatgtctccgaaaagaaaagaggggggacaaaaagcaagagaaggtttccagaggcttccacaacctgaatgcctcactaaaaacatggcagtcatctagtggctggtcactgtctccagcgggttggggtttgtgtctcaccgttttgctcccagcctaggaatggtgctgggcatgcagtagctctccatatgcatctgtggaatgcattcattccagacctggattttcacctccaagacttccccgcaagtgggcccagggaacactaggcggtgatatctgcgagcacctgtcttcactgggcggttcctccaggccagacgcagcctcaggaaacgtggggggtgggggcgtgggatgtgcatcggttggatgtccagagtgtcctttaaaacgacaaaagtaaaaggcctaaccaatggcattctaaaacagacccttcaggtggcggcgcggggactcggggtgaggagccaccgccccagcgcgctctgagttcctcccgctctccccagcaggtagccttggataacctctgggccagtccaaaagattccgcagttctctcctgcctgcacgccggttacagtatcagaaaggaacattgcggggaccaaaaaaaaaaaaaaaaagttagcctggcccgtacggggatcgaacccgcgaccttggcgttattagcaccacgctctaaccaactgagctaaccggccgcctgacgttgggcccccacgggagcgcctaagagggctccaagcccgcgcccgccccctagcgactccctgccgggccggcgccgctggctgcattccgcttcgccacagccgcgacttccgacctcttcacagtcatccccattggcccgatgcagaaactaagacttaggggacttcaaggagaagggaggcgactccctacagcgaaggcggctttttttcacaggaaaaatgcaaattgcacatgggaggcttagctccgcagtgagaaggttttcaaacatgccaactcagtgttgtttttatctccgagaatcctgcagcgtggaaacttcgtgtaacagaggcctttagcatggttaaatcaagcttggaaaatacagaaaaccggacaaaagaaccaccgaattccctatcgcccaataaacaagggccgctggggtcttggcttccttcctgctggttttttttcctacagtacacgtgtatttatacacacacacacacacacacacacacacggaatccaaagccttgtatgaagcagtcttttttttgagacggaatctccctctgtcgcccaggctggagtgcagtggcgagatttcggctcaatgaagcagtctattttttatctttctttttgcatttaatattctagaataagcatatccctaaacaattgcaaatgtcactttaaatgatttctcagtgtttcattgagtggacaaaccaccatggctttctccttttttttttttttttttttttagtgtctgtaaaaatgttttcattttgctctctctcttgttaactgagcacataaataaatcacatggtacaggcagaagggttgaaacagccactgagtaggcaacgatggtacccacccctaaaagcgtaggatctgtatgcaaaaaaagagagagagaaagaaaaggctgggaagacaaaccaccaccgtgtccaccacccagcctgcatgtcccagaggcctactgttctcctacagggcctgactatggtgtgctgcgtggccctcccactccaggagcaccagcttttttttttttgagacagagtctcgctctgtcacccaggctggagtccagtggtgcaatctcagctcactgcaacctctgcttcctgggttcaagcgattctcctgcctcagcctcccaagtagctgggactacaggcacgcgccttgtccggttactttgtgtgtgtgtgtgtgtgtgtgtgtgtgtgtgtgtgtgtgtgtgtgtatttttagtagagatggggtttcaccatgttggccaggctggtctcgagctcctgacctcaagtgatccgcctgcctcggcctcccagagtgctaggattacaggcgtgagccaccgcatcgggccagctttttaacattatacattctgctctgattactccactaaactgcttggactgaggtatcgtcagggttctatgtcacaagcagcagaaaccgagtctagctgattcgaaaagattttatgtaaaggatgttaggtaggtcaccctccacgagtaaggctagaggaccaggtttagaaaaacggacactcagtgaagacatactcattcagcccggcagtgccctggcccccaatcagctgtgagtcaaagaaacctaatccccatcctgatggagctctccgcataacaaggaaggcggatattatagggaacgg

SEQ ID NO: 1241814 - DNA, 4001 bp, Homo sapiens
cctgcaaaatgccggtacaaaaacactgctgaaaactgagcggccccgcacagcgccgggcgcagagcagaggctttgcagatagctgcccccagatggcaccttgcagccttctgacccagaccaaagtccaaaaaggttgacttacccaaggtcacacctctagatagtgatagtgtggcatctggacagaatcacactggtcttcctaaaccttagcaagacaactctccagtcttgatgattaactggatacaaccctaagcagctaacatcagtcaaaaaaactcaacgagtgaaggttcctgattctattccctaacccgtttcttctagtggaaaaagctgtcttcttttggcaattttggggtgagactaattttgtttacaaccccagcgctgaaatggggtggaattttacagatgccgtgtaggccctctggcttcaggcgctatgcttcaccctccggagttgggcgaccgtcttctagttatcacccccctagcaaccaaaaggtgtgtggcccaggaaataaacccactgggaaaggatgttttgtagtatacagagtgctttcacatattccaaacattgtgtatcaggcactgtgctgggtactgcggttacaaatcagtcactatcacccaggatgttaagtcctgcagcgaactagtgtattgtgcttgactttgttccaagcctgggccttggcaccttacaactgaaaagctaagttggttccttttaattcatttatgtttcagctccagtgtctggcctacgggaccacccactctaaagcagcccccgtcaatcccagaacctgccttatgttcgttcttcagcaagtgtgttcaaggcttcacctcctgcacatagtggggagtgctgggaacacggtctctaagtgctccacaaaggctgaaccagcggtgaaaggcctgtaagaagagctagggagcacgcaaaagcccccagcagggctgtgaaggcagagaaggcacgagggcgttccaggcacagggcccagcgtgagcaaccgctcctagagtgaggctcctggggtgaaaatgccagggtggtgacaggtgggggccgaacgccgtccctaagaagctcagcctggggacgccctgagtcttaacccgggcggatactggcctccccggacaagcagctaccccgccgcggggcgtcggcccccttcgggcctcagtttccccacgtccctcccgacgcctcacctggggcgggagcaggcgcggcaggcgcgggggctcggtgccccggccccgctgcagggcggcctgttgggccgcgtcccgcagccgccgcgccgcgtcccgcagcacgaaggggggcggcggcggcggcggctgcgccttcgtcacctgctccaggacctgccgcagctgctcggggcccagcggggccacacgtgcgacgctgccgctctggcccggaggagccgggccgccgccgccgccgccatcctcgctgccgcccccagcctccggctccgcatccgccatggcggccgaggcggggactcgaacccgggtcgctgagcgacggcgtctccaatgtacgtcacctaggagaggggcgggctacgagtgcctcgcaggccaagacacctaggaaggcgaccgtgtctggccgggaaagtcgtggagtgccccgccccagccgacaaccgccgcggctcttagggctgatcagcagagcggaccccccttattttccttattgcctgtcacggatgtgtttaagactcaccttctctgggagctgtcccggatctcccagggggaggtcttcggggtttcagagcccctggcccaaaagttaccacaatatccaagtgttctgacgtcatcatgcatccgaatcagcggaggatgctgtctggagatgcagagtactgtgcccacccctaaacatttggatttatacatctgggaggggaccacagtttgaattgttaacgagagtgtttcccaaatttttgccttgtcaccgtagcttctctctacccacccacccagattgggtgcaccttgaagggagagatgatatattacacaatcggtgcccagcacaggccctgcccagaacacaacgcacgctcagggcatgaatgatggatggatgaatatgaataaacgaatgagtgaacgaatgaatgaacccaccctctctctatccatccagctccactgccccatcttcctcagcctgatcgcctctccttcttacggttgaggctctgtgcgccctccgaatcttgtagctgcaggtgtgtacacatgtcccagctcctttccccagggagagcaggaggtccactggtccacaaacccttcttaagcacctggtgggtgaaccgctgtttccgccctggggggtatacagtctaggtgccgacccccaaggaggaaacttcccaagggggaaggaggaaactggcatttgcagcacagtatgatgagcgccgaagccggtaaagtaaggctggcggcctgggtggcgtcagagaaggttctggaagatcaccaccatcctcatcaatactcacattgcattcacgatgatcccttccgtgttattttttaatggtgaattttatattatgggtatcttaccacaatttttttttttttttgagacaagatctcactctgtcacccaggctggagtgcagtggcacaatctcagctcaccgcaacctccatcgcctgggttcatgcggttctcctgcctcagcctcttgagtagctgggattacaggcgtccgccaccatgcctggctaatttttgtatttttagtagagacggggtttcatcatgttggtaaggctggtcttgaaaccctgaccttaggtgatccgcccgcctcggccttcccaagtgctgagattacaggtgtgagccaccacacccgaccagatttcaggaattcacatgccttctgctcaaaataattttcatgccaccgtggcatattctaaaccccttcaagctcaggaaacttgagggcagcaacctccaccgattcctccatgctgtgtccctgcatctaacaacgtgcctggcacgactattaaaagatgtgacatccatcctgtgtacagatgtctattttaagtgtcagctgccccaggctctcctaactttgcttataatagcagcagcgccatcggctggcatttattgagaacttttactacaccctgggcacataccaaggtctgtagatgttgagctgcttcttatttaggtcagaactagtagctgtttccactgtagaattttcaaaaacaggtggagcccttgccggatcctgacataaaatggcatcaaccttatacaaccggcttttgttcagctgagcacacctgaccaccctagaaacgaaccgagtgagaaattcatccacttgctctggcttcaaaatgtagaaccaagaggaagaaatgtgaagcctaagatgtctccgaaaagaaaagaggggggacaaaaagcaagagaaggtttccagaggcttccacaacctgaatgcctcactaaaaacatggcagtcatctagtggctggtcactgtctccagcgggttggggtttgtgtctcaccgttttgctcccagcctaggaatggtgctgggcatgcagtagctctccatatgcatctgtggaatgcattcattccagacctggattttcacctccaagacttccccgcaagtgggcccagggaacactaggcggtgatatctgcgagcacctgtcttcactgggcggttcctccaggccagacgcagcctcaggaaacgtggggggtgggggcgtgggatgtgcatcggttggatgtccagagtgtcctttaaaacgacaaaagtaaaaggcctaaccaatggcattctaaaacagacccttcaggtggcggcgcggggactcggggtgaggagccaccgccccagcgcgctctgagttcctcccgct

SEQ ID NO: 1241815 - DNA, 4001 bp, Homo sapiens
caggaacaatctccctttctctaaatacattcagttctttttcactatctttagctttctggccttgactagaagttatctgggtcttgtttcatctcctgttagttcataaactactgaggggcaaagtacgcatccggtttgcctttgtggcctccatgacacagctggggctgaaagagtattaaaagaatgtgctgcaaaggtatattattgcaggtagaatttatatcgtctccattagattagctacaaaatacaatcccatcatgctgcctaagctcgaataagtttgcttttgctttacgaaaaatatgtcatttttggattccaaacccaaaaagctgtggccatattcagcagggtatggtgaggagtacaggggctagggagagcagccacacctgagggaccttgggcaaagccacgcaacctccctgagcttgtttcccacctgcaaaatgccggtacaaaaacactgctgaaaactgagcggccccgcacagcgccgggcgcagagcagaggctttgcagatagctgcccccagatggcaccttgcagccttctgacccagaccaaagtccaaaaaggttgacttacccaaggtcacacctctagatagtgatagtgtggcatctggacagaatcacactggtcttcctaaaccttagcaagacaactctccagtcttgatgattaactggatacaaccctaagcagctaacatcagtcaaaaaaactcaacgagtgaaggttcctgattctattccctaacccgtttcttctagtggaaaaagctgtcttcttttggcaattttggggtgagactaattttgtttacaaccccagcgctgaaatggggtggaattttacagatgccgtgtaggccctctggcttcaggcgctatgcttcaccctccggagttgggcgaccgtcttctagttatcacccccctagcaaccaaaaggtgtgtggcccaggaaataaacccactgggaaaggatgttttgtagtatacagagtgctttcacatattccaaacattgtgtatcaggcactgtgctgggtactgcggttacaaatcagtcactatcacccaggatgttaagtcctgcagcgaactagtgtattgtgcttgactttgttccaagcctgggccttggcaccttacaactgaaaagctaagttggttccttttaattcatttatgtttcagctccagtgtctggcctacgggaccacccactctaaagcagcccccgtcaatcccagaacctgccttatgttcgttcttcagcaagtgtgttcaaggcttcacctcctgcacatagtggggagtgctgggaacacggtctctaagtgctccacaaaggctgaaccagcggtgaaaggcctgtaagaagagctagggagcacgcaaaagcccccagcagggctgtgaaggcagagaaggcacgagggcgttccaggcacagggcccagcgtgagcaaccgctcctagagtgaggctcctggggtgaaaatgccagggtggtgacaggtgggggccgaacgccgtccctaagaagctcagcctggggacgccctgagtcttaacccgggcggatactggcctccccggacaagcagctaccccgccgcggggcgtcggcccccttcgggcctcagtttccccacgtccctcccgacgcctcacctggggcgggagcaggcgcggcaggcgcgggggctcggtgccccggccccgctgcagggcggcctgttgggccgcgtcccgcagccgccgcgccgcgtcccgcagcacgaaggggggcggcggcggcggcggctgcgccttcgtcacctgctccaggacctgccgcagctgctcggggcccagcggggccacacgtgcgacgctgccgctctggcccggaggagccgggccgccgccgccgccgccatcctcgctgccgcccccagcctccggctccgcatccgccatggcggccgaggcggggactcgaacccgggtcgctgagcgacggcgtctccaatgtacgtcacctaggagaggggcgggctacgagtgcctcgcaggccaagacacctaggaaggcgaccgtgtctggccgggaaagtcgtggagtgccccgccccagccgacaaccgccgcggctcttagggctgatcagcagagcggaccccccttattttccttattgcctgtcacggatgtgtttaagactcaccttctctgggagctgtcccggatctcccagggggaggtcttcggggtttcagagcccctggcccaaaagttaccacaatatccaagtgttctgacgtcatcatgcatccgaatcagcggaggatgctgtctggagatgcagagtactgtgcccacccctaaacatttggatttatacatctgggaggggaccacagtttgaattgttaacgagagtgtttcccaaatttttgccttgtcaccgtagcttctctctacccacccacccagattgggtgcaccttgaagggagagatgatatattacacaatcggtgcccagcacaggccctgcccagaacacaacgcacgctcagggcatgaatgatggatggatgaatatgaataaacgaatgagtgaacgaatgaatgaacccaccctctctctatccatccagctccactgccccatcttcctcagcctgatcgcctctccttcttacggttgaggctctgtgcgccctccgaatcttgtagctgcaggtgtgtacacatgtcccagctcctttccccagggagagcaggaggtccactggtccacaaacccttcttaagcacctggtgggtgaaccgctgtttccgccctggggggtatacagtctaggtgccgacccccaaggaggaaacttcccaagggggaaggaggaaactggcatttgcagcacagtatgatgagcgccgaagccggtaaagtaaggctggcggcctgggtggcgtcagagaaggttctggaagatcaccaccatcctcatcaatactcacattgcattcacgatgatcccttccgtgttattttttaatggtgaattttatattatgggtatcttaccacaatttttttttttttttgagacaagatctcactctgtcacccaggctggagtgcagtggcacaatctcagctcaccgcaacctccatcgcctgggttcatgcggttctcctgcctcagcctcttgagtagctgggattacaggcgtccgccaccatgcctggctaatttttgtatttttagtagagacggggtttcatcatgttggtaaggctggtcttgaaaccctgaccttaggtgatccgcccgcctcggccttcccaagtgctgagattacaggtgtgagccaccacacccgaccagatttcaggaattcacatgccttctgctcaaaataattttcatgccaccgtggcatattctaaaccccttcaagctcaggaaacttgagggcagcaacctccaccgattcctccatgctgtgtccctgcatctaacaacgtgcctggcacgactattaaaagatgtgacatccatcctgtgtacagatgtctattttaagtgtcagctgccccaggctctcctaactttgcttataatagcagcagcgccatcggctggcatttattgagaacttttactacaccctgggcacataccaaggtctgtagatgttgagctgcttcttatttaggtcagaactagtagctgtttccactgtagaattttcaaaaacaggtggagcccttgccggatcctgacataaaatggcatcaaccttatacaaccggcttttgttcagctgagcacacctgaccaccctagaaacgaaccgagtgagaaattcatccacttgctctggcttcaaaatgtagaaccaagaggaagaaatgtgaagcctaagatgtctccgaaaagaaaagaggggggacaaaaagcaagagaaggtttccagaggctt

SEQ ID NO: 1241816 - DNA, 4001 bp, Homo sapiens
cagatcacttgagcccgggagttccagaccagcctgggcaacatggccaaaccccgtatgacgggggggggggggggcaattagccgggcgtggtggcacacacctgtagtcccagatacttgggaggctgaggtagggggatggcttgagcccaggaggcagaggttgcagtgagccgagataacgccactgcactacagcctgggcagcagagtgagaccctatctcaaaacaaaaataaaaaaaaggagagaaaagagaaagtgaagggtagccaggcacagtggctcacgcctgtaatctcagcacttagggcggccaagacaggaggatcacttgaaaccacgagttggagaccagcctgagcaacatagcaagactctggctctacaaaaaataaaaaaattagccagggttcgtggtgtgagcctgcagtcccagttgctcgggagactgaggcaggaggatcgcttgagcccaggagttcgaggctgaagtgagctatgatcgcatcactgcactccagcccgggcgacagagcaagttcccgtctctttaaaaaaaaaaaaagaaaagaaggaaggaatgtaggtaggttaggtgacttgctcgagatcatacagctaagtcactgctctgattctaagccatacacttaaaacagaagtcttgagttacctataattcaacttcacagagccctttagtagagttggcttattatccagtcccatgttctctcttttaagagttagtaagtctgacagccattatgagggtctacaagcaaaagcactagcccaatcatacccaaaaactcatgttggcggagagcccatgcctcagatgaaaggcgtgaataactagagtggagcggacaaagctaacaagtcttataatgtacacattaagaagcagaataaacttcagagtaaatacgcagaataaacttcagaattcagagtaaacactctctcccggagcagcaaggataacaacatcacgatatcaacaattccagcaccttacactcctgtaacctagcgcaatttccggagagccttcaggttcatctcaacggatcctcgcaaaaacctgtggcctgggctgagcagagcgggaaatcagtctcactttacacaggaagccgaaaggaacgccgaagaaggccgagtgggcagaaaagcacgagattaagagataggggcagccacctggggagactgggcgcctccactgactggaggaagaacgcagggcccgctgcggggacaaggcccagagaggccgtggtgctgggtccgtcgcccgctgaggctcaggggccttggaggtcggcccaggcgcctatctactcacgttggaccagctggtctcctgagaagacggaggagcagctggtgactaacgcacagggtacgccagcagccatagctgcgctcgcgagccggttccgtcaggcagccgcttccgccttgggctgcaccacggccgccggcgcgagggggagacaggccggagagggcgttctcggaatgaccaggctggcctgaccccgcccctagacccccttccgctcccagcgtggaacaggccaggtcgcgcgcggtgttgccatggggacgagcggctccggctgaaggtttccgtgcttggaaaccgcgcctccgcggaggtagccgttccctgacctagccatggcacagaacactgaaaaccacgaccctgtcggatccatcttaatccaggtgggaaacgggcttcccccggccctgccctgcccagccgcgccacttccgagcgaggtcccgcgcgccgattcaccgacgctcacccatttggtgcgccgcccctagactccctccaactcgcgagaggctcccaaaaatgcccacccagaccttcccccacggcccagcacactcccggtgacttaccctgtaggttacgccccagaagcaggactttctgcctctgggaaaactctaaaaccgttcacccggaacctttacttcagaaaaattaacctcacgctgaggcatcatttttaaatgttatattctgaaaaatttgaacccatgacgtcgggagtggaggagagacaaatcggacactctaggaggtgataagaaatttggagacaaattgaaatatgtgaattgcttttcttaaacaccccagttttttagatctaaatgttcctcattggagaacacacagaaaaatcaagataacttggaatgaaaaaatgtgacatttaaaaacttagtgaaagacctttttaatttgagaggggaaatgtcaagaaagtcttgtccaatacagctcaatttgtaatagttgcactcagatgtttctgaaatgatcatggcattttgttttcacatttatgtgaggtaactttaagatatttccacatatatcatcggttttaactatcacatatataatagctgcatttgactaagtcttgaagtcatttgtctaaggtcactctgtcaggactgtcactcagttggtctgaagtgggtcttactcgtcaaagggatctaatttttctggcagaattttgatctcttacctcccatctaggagagacttccctaaatgtaccttttcccaaatacaagcccctgaactcaccaatttcatagacttccccattaagaatcatacctaatcttacctgatcttttctcaccctcactttcaccatcacgcagcaatgagtttagccaaactgcgaagtctgagggaacggtccacaaaaaactgccctaacttcaacactcactacctgcaagttcaggggtccccagaaccacctcacttcagaccagctgggtacaaacttaggggccccatcaccaccctcacattcaatgattcactagaactattcgcagagctcagggaagtgctgtgctcacatctccaattttattatagtgaaggcatacaaattaatcagccaaggaaagagatgaataggacagagtccaggaggggtacaaacatagagcttttggtcatcttatccctgtggagtcattgacgtcattacctgcattacttcctcccagccatgatatgtgacaatatgcatagaatattgcaactagagaagcttatctgaggctttgatgtccagagtttttactggggctcaatctcacactgcccttgtggttgaccattaatctccagcccctcctgaatacttttagtttcccgctgctccagaggtctgagctgatacagcgtggatcaaaacacccattataaatcatgttgatagactgtctggtggccaaagcccacagacaaagacacttctatcaggcaggacatcccaggcgcctagagatcacctcccagtagccaggagcgaagactggacccctctttgggtaaggttaattctttgctgcacatacccactctttttatagattccaaataattagaacaataatggagactcttacctaggatacaacattatagtaatagataactgttgacactgacttgtgagatgggtcagaagagctaatagtcatatccatgttgatctgcacccctacttatttaaaaggattcctgtggacatatcaagtaaagggctgtgtagaggaagagagcctacctgttaaccagattattaagactgattcctgtatagtataaaattctattctctacatgtagaatatgtatagtgaggaaatttggaagactttccctactttctcagtgaatcctgagaatgtgtgagtatgtagcaccacccaactgtgccaacgtggattccacttctatttggggctatgatttatttccctcagacaggctaccaataattagtgtgtctagtggaaagcacttgatagggagtcagaatactgagatctgaccatgactttgacagtctcacaagtagtgactttgagttaggcactcatctctctggacctcactttcctcttccataggacat

SEQ ID NO: 1241817 - DNA, 4001 bp, Homo sapiens
ttagaccagttagtaaccacttagttaaatgctataattaagcttttaccctagcaaggaactttctaagtgatcacaaatgataactaagtcatataatatctgcactgaagggacatcttacctaattctgtcatttgacaggtgtagcaaagaaattataattatacaatgctttacagtttacaaagtgtgttcaaaatgtcacatcatctgtccttcaaatactcctgaaataggctcatatgccccattttaaggatcaggaaattgagggttacagagatagtaatgtgccttaataataatgtctatgatttatcaaatgtttactatgtgccagactcggggataagcacaatcttgcgaaaattatccctattttatagatagaaggtgaaggggccgggcgcggtggtgactcacacctgtaatcccagcactttgggtggcaaaggcaggcagatcacttgagcccgggagttccagaccagcctgggcaacatggccaaaccccgtatgacgggggggggggggggcaattagccgggcgtggtggcacacacctgtagtcccagatacttgggaggctgaggtagggggatggcttgagcccaggaggcagaggttgcagtgagccgagataacgccactgcactacagcctgggcagcagagtgagaccctatctcaaaacaaaaataaaaaaaaggagagaaaagagaaagtgaagggtagccaggcacagtggctcacgcctgtaatctcagcacttagggcggccaagacaggaggatcacttgaaaccacgagttggagaccagcctgagcaacatagcaagactctggctctacaaaaaataaaaaaattagccagggttcgtggtgtgagcctgcagtcccagttgctcgggagactgaggcaggaggatcgcttgagcccaggagttcgaggctgaagtgagctatgatcgcatcactgcactccagcccgggcgacagagcaagttcccgtctctttaaaaaaaaaaaaagaaaagaaggaaggaatgtaggtaggttaggtgacttgctcgagatcatacagctaagtcactgctctgattctaagccatacacttaaaacagaagtcttgagttacctataattcaacttcacagagccctttagtagagttggcttattatccagtcccatgttctctcttttaagagttagtaagtctgacagccattatgagggtctacaagcaaaagcactagcccaatcatacccaaaaactcatgttggcggagagcccatgcctcagatgaaaggcgtgaataactagagtggagcggacaaagctaacaagtcttataatgtacacattaagaagcagaataaacttcagagtaaatacgcagaataaacttcagaattcagagtaaacactctctcccggagcagcaaggataacaacatcacgatatcaacaattccagcaccttacactcctgtaacctagcgcaatttccggagagccttcaggttcatctcaacggatcctcgcaaaaacctgtggcctgggctgagcagagcgggaaatcagtctcactttacacaggaagccgaaaggaacgccgaagaaggccgagtgggcagaaaagcacgagattaagagataggggcagccacctggggagactgggcgcctccactgactggaggaagaacgcagggcccgctgcggggacaaggcccagagaggccgtggtgctgggtccgtcgcccgctgaggctcaggggccttggaggtcggcccaggcgcctatctactcacgttggaccagctggtctcctgagaagacggaggagcagctggtgactaacgcacagggtacgccagcagccatagctgcgctcgcgagccggttccgtcaggcagccgcttccgccttgggctgcaccacggccgccggcgcgagggggagacaggccggagagggcgttctcggaatgaccaggctggcctgaccccgcccctagacccccttccgctcccagcgtggaacaggccaggtcgcgcgcggtgttgccatggggacgagcggctccggctgaaggtttccgtgcttggaaaccgcgcctccgcggaggtagccgttccctgacctagccatggcacagaacactgaaaaccacgaccctgtcggatccatcttaatccaggtgggaaacgggcttcccccggccctgccctgcccagccgcgccacttccgagcgaggtcccgcgcgccgattcaccgacgctcacccatttggtgcgccgcccctagactccctccaactcgcgagaggctcccaaaaatgcccacccagaccttcccccacggcccagcacactcccggtgacttaccctgtaggttacgccccagaagcaggactttctgcctctgggaaaactctaaaaccgttcacccggaacctttacttcagaaaaattaacctcacgctgaggcatcatttttaaatgttatattctgaaaaatttgaacccatgacgtcgggagtggaggagagacaaatcggacactctaggaggtgataagaaatttggagacaaattgaaatatgtgaattgcttttcttaaacaccccagttttttagatctaaatgttcctcattggagaacacacagaaaaatcaagataacttggaatgaaaaaatgtgacatttaaaaacttagtgaaagacctttttaatttgagaggggaaatgtcaagaaagtcttgtccaatacagctcaatttgtaatagttgcactcagatgtttctgaaatgatcatggcattttgttttcacatttatgtgaggtaactttaagatatttccacatatatcatcggttttaactatcacatatataatagctgcatttgactaagtcttgaagtcatttgtctaaggtcactctgtcaggactgtcactcagttggtctgaagtgggtcttactcgtcaaagggatctaatttttctggcagaattttgatctcttacctcccatctaggagagacttccctaaatgtaccttttcccaaatacaagcccctgaactcaccaatttcatagacttccccattaagaatcatacctaatcttacctgatcttttctcaccctcactttcaccatcacgcagcaatgagtttagccaaactgcgaagtctgagggaacggtccacaaaaaactgccctaacttcaacactcactacctgcaagttcaggggtccccagaaccacctcacttcagaccagctgggtacaaacttaggggccccatcaccaccctcacattcaatgattcactagaactattcgcagagctcagggaagtgctgtgctcacatctccaattttattatagtgaaggcatacaaattaatcagccaaggaaagagatgaataggacagagtccaggaggggtacaaacatagagcttttggtcatcttatccctgtggagtcattgacgtcattacctgcattacttcctcccagccatgatatgtgacaatatgcatagaatattgcaactagagaagcttatctgaggctttgatgtccagagtttttactggggctcaatctcacactgcccttgtggttgaccattaatctccagcccctcctgaatacttttagtttcccgctgctccagaggtctgagctgatacagcgtggatcaaaacacccattataaatcatgttgatagactgtctggtggccaaagcccacagacaaagacacttctatcaggcaggacatcccaggcgcctagagatcacctcccagtagccaggagcgaagactggacccctctttgggtaaggttaattctttgctgcacatacccactctttttatagattccaaataattagaacaataatggagactcttacctaggatacaacattatagtaatagataactgttgacactgacttgtgag

SEQ ID NO: 1241818 - DNA, 4001 bp, Homo sapiens
ctgacccaatgcatctgcatatgatacattctcatctgcctaagccactttcgaaaagctataatcccaatgagggcatccccttcaggacttcaggagggcataaacatgcaacatagagcaaatattaagtacttccctgttggacaagccattttcccagacaggcaaggagtcacttaggaacatatgcgtgagtacgaatgaaaaaaaaaaatcattaacgttggtgatgtgcataagcaaacaggttttagataaaaactatagaagggtccatggcgacaataatgcccggtgtacttcctctggggactctttcatctgaagaaatcaaatctcatcatagacatggcctcaggttattttcaccatcactgctatgaggcaggtcggaaaggtcacagatacccaaactggagcacaaacaggtaacctgacctgcacatgtataagacttttgtctaatagtgaataaaagtcaggtttttggtttgcttgttataaaacaaccaggtctaacccctaaaccatgcccccagtttgtgcctggctcacagatggcccaccctaaacacttttcagtccttctgtgaatgctaatttaaggtcagagatttcccagcccctgcaagtttcaaacttatcctggactgttatggaggccgtgtggaaggtgccaggcccacagctaccagctaacttcctgccccacagtgccactactttgccccaccaggaggcaaactccccgctccacctgacgctccagctgtttccaaggttgcccagacattgtcctgcccgcactttacaaccagaaagtcttttagaggccatcctgtctcgcccactgactttacagggaaggaaactgagtctagaaacccatgtgccttgcccaaggtcacttcagctcgtacaaacgaaactcgaaccaagttgtttctttctgcccggtacttaagcacccacactctgccactcgcggtgaccggagccacaaaagacccagccggtgggccggcgacacacaggcgagccaaagcaggcaaaattctctgagtccgagctctccaggaacctgaaggctggcgcggtttttggagagggtgggagcaagccagggtgggacaagaaaagcgaatttacggcggccaaggggctctccgctggccctcagccccggaggaggggcccctctcctggcaggccgccccaggggccccaagagacccccaccccgcctccccacagctggaagtcaggcctggcgaccccggcaggctcaccgggtgcgcagcgcctgccacgcggcgtcgatgtcggcgtagaggttcttctcggagggcttgcccgagctgacgccgtatcccgagtagtcgtaggagaagatgttgcagttgatgcgggagccgaggccaatgtagaagctgcacatctggcccaggtccacggcgttgccgtgcgagaagagcagcgtgtagcggctggagggcgcgcagcgcacgaacatgcagccgagccggttgtcccgggccgtgcgcgagaagaagacctcgacggcgtccagctcgcgctgcgagtactgccagtcggcgcgctcgctgaggtgcaggctgcacgcaccgggccccgcgcccgcgccctcctcgggctgctgcggtgccggctgggccgcggcggcggcggcggtagcctgggccggggccggggcggacgcgccggcgccgcgctgctccggcgccagcaccgtgtaggtgggctcgggcggcaggaaggccagcttggcggcgatgcggctcgggcagggcgggcagcagaagagccagcacagctcacccagcgagaagccgttcatcctggggcctggctcgggcatcgggacggcctggtgcccgccgccggcccggctggctggctggctggctggcccgggaggacggaggacggacgcgcggcgagggagctggcaggcgagcgcggagggcggctgcagcccgcccgcccggcggcaggaggaggcggaggcggaggagggcaggaggcggggccggcccggcgggcgcggcgctcggagcccgggcgggtcagcggcggccccggaacccaggcgaggcgcgggcggcccgggcccgcgcgcggcacacaaagccggcggcggcgtccatggccggctcgtgcgcgccgccccccgctcccgttcccgctcccgcacgcccgccgccgccgccgccgccgccgccacttccgggttaccgcgcggcggcgccgccgctgggacgcggcgcagagccgggcatcggggcggggcgctgcgggcaagggcgcgggcaccttccccggcctgggaagcaccttctcgacctgcggccgacgggggcttccaggcggctccggggcccggagaagctgggtgccggggctgggggctctgcgcccggacagctgggccgatctgcagaggggaccctggagggggtgcatgtgtcccggggtggaccgctcccctcccctccccctgggattccctcccccaaatccaggtttctcccgtggatggaggttcttgggagtctactgaaaaggaaactaaggggtggacaagagttggaatgtgcccgaaatatttggctctcgtgtgtgctgctttctgaactggctcagtaccaaaagttctcagcaccgtaaggggtaccggggttgtgggatagggtggtcatcagtgtgtttcttattaggagaggctgtttctgtataggtagcaacagcgtttcctttctaagggcatggttttacccttagtacatttctgtatctataaaagtcagctgttagaacaggagggtactgtatttagcaacaaaccatgttgaggttgtcatttctaatcccacgtgtggcagattttccggtagtaagtatatactaggtatcgtttacagtgtttgtgtctctagagttgttttgggtccaggatttttcagtggtcttagtcatgaacgattcttatactgctttaaatctactgtaatcttggcagccacctttacatgatttttcaaatataactctcggtgccttgaaactgtgctctggtgccagtttccacagagccttctatacttcctttttcccgcctgatttggcagctgaagaattccctttcaggaactgacaggagatacccttcctggactgccagcagggcagctagagactgggaggttggcacaatccctacgctgggtctgttgttttaactcacagatgtcctgagaattttacctttcgttgtgactttccacaggacgaatattttgagcaccgtcatctaaatgaattgccgatactgatttcattaaccttcaggacctcgcttttaattttttcttttttaagagacagggtcttactgtattgtccaggctggactcccaactcctgggctcaaatgaccctccggcctgcctcccaagtagctaggactaccggcacatgccaccttgcccagctaggacctgggttttaaaaggccatttcttcactaaaacaattttacttgtttttgaactattcaaacttgatttttaaaaacctggtaacaaagcctgtccagattgcatatttgaagtctgttttgaaggttttcacacttggtgaaactcttcacataaagcccaattctagctttgcaggtttgcatttccttttttttttttttttttttaaaaaaagaatttttctgcgaaaatcctttaaaaagaaaaaaaagctttatacagctgggcacagtgactcacgcctgtaatcccaccactttgggaggctgaggagggtggatcacttcaagtcagaagttcaagaccagcctggccaacataatgaaactccgtctctactgaaaatacaaaaattagccggccatggtggcgtgcacctacaatcccggctactcaggaggctgaggcacgagaatcacttgaagctaggaggcagag

SEQ ID NO: 1241819 - DNA, 4001 bp, Homo sapiens
tggactcccctagaacttaaaacactgagaatgggcaaactaagcttggagtgaaataagtcatgcactggctagatctaaatacagtcaagagatcaacccttagtcatgggcctgtgatgaccaaccagccctgtgaccaccccaggcctcagtttcctcacctgtgcattgaggagactgaatgagagtccacctaattagacttagatagagatgagctctatctaaggtgccttcagctctaaaatgtcacagtccgtgctgactaccagctgtatatggactgctttctgactagatgttcaaagattaattcatcctaaaacacacagcaaggtgtgttaagattctttctctgcctcctgacctttagattattatgttctctctattccggcaaatgacagagggtagtgaaggatttctcttttggactctgcttaatgtggctgtaaggaaacggccttcgaaaagctctgggcacagatcttgttgactctgccaaacctgcagtctctccaggtccctctgtggagcctgttcttggaacatgcctttggatttggttactggaatgcaggtgaaactgacaaactggaggtccagcaaccaaaaaagagagattgggaagattaagagagcggtccatggtagttcaaatacaaggagtttcacagtggctaaataaacctctatctttttgtataatccagtctctttgctaacacccactcttgagagctgaaacctcaaaattcattatgggtgaattcaacagccacttggaacctaatggacccccagaagtactcttctcaagctaggcatcaaaggccacttagagtgcatttgtgggtagagaaggcccttacagatgggtcatgcagtcctcccttgggagtcctaagcatccgacacaggtggctgtcatcaggccactgcttggacatcgccaaggtcgaggcgctagctgcccggcctggcaggcagcctcctgcgctgctggacagctctagctgtgggaaaagctcacgaagggcctagaacagtgccggtcgcggggccgaactcggtaaatgtgcttccaagtgggtcaaaagctgcctttctagaacttaaacccactggtcctgcgtgagcccctggagccccgaaacacagaggcctctcgggtatctcgggctgtaatcaggcccctcggccctctccttccaggtgcggatcccggaccttcttcgccgagcctgaaccggcagacccctccccaggcccctgaagacccaggagtgagcaccaatgggggaaaggccgcggtcggggttgtccccaacctcggttcctcgggcagaaggggacaaagggcctcaggaaggcgtatcccccgccgcgatctgggctgtccccaccactgggcaagccagcccctgggacccccacggcgccagatgacaggccccccaggatcccctcaggctgcggcgtgatgggccgagctacgccggggacctcggggctcggagattcggttcgacgggtccggggtgcgatccccgctccgcggagctcgctcggccgtggctttacctgcgtgtgattgactacaggtgctcagctcgcccccagtctggttcctgcagctccccggctgccagcggcgctcatggatatacagccggaacccctggccagtgcagctcccgccgctaccggccccgcccaagtaactgccgccacgcccctgacgaccgcttctgccacgcccctaaccacggaaaccgcttgttcattgggcagttcagccgcttctccacttgccccgcgcgctcattgcgtctaggaggggatccattgatcagcgaagctgttcctcagagtggaggcgggattcttaggggagagctcctcagcaattggttacatttgacggctttagtccagggacccagacgctactggataaggccagcccggagtgggcggggaaaggggaggagggctagaaggtgggtcgtgtttgatgtcgatgggggcggggtgaagagacgggtaattgtgaccgcaaactgctttagagggctgggtaaggtcagctgtcgactgggctcagaggaatgaggtcggctggtagctcagctgctggtagctcagctggggctcttatgggtccaggccgactgactgactcacgtgtactcaaatttcgcaggggtgaaatttgaggtcatatcccgggagagaggaagaagggtcgtgagtcaccgaacccgaaggagaggaaaagatgtggaggcagcggtctatggcctcttccagctccggacgggggatggggacgctctgggcaatacgggcctcagttattgtcccactgtcctttcaacccttaaccaacccagttggaggccgcctggaagaatgtagccttggaactagggcctggaattggggctcctaccggttgtgtgggcttgggcaagtcacttaaccttcccgcatgctcccttcacttggcaactgagggtaacaatagtagttgatgagaagattaaataaactctgataaatgccaacagtggctggcactcaacaggcattcaatcaaggctgattcttcccccatcacccactcacctcatccggctgggaaactaggcccatttctaaaattctatgagcctgaaactgcttttgcaatggcatgtcgtgtaccaagaatagaacacttgagcgacttgaaatgcaacccctgtagggcagacaaggccaccctaccaaggccccatagggctcggagagagggagcaggggatgaaatgagaggagcgatttagtcagagaagggaagtggcatttgttaccatgtaaatttttcccaacatatttcaggttgtgacaaggaacagtgggctggctcaagttttatggagcgtaaccaaataacatcctttgaaggctgatcagcaccggaccagaaatcattgcatgagctctatctgtcagagacccctgaaacccattccccattctgaaggtgtagacatcacagagtgtggacagaaatagcttctcaggcctgaatgtagccccagaccctttgtgtctgtctttgaaagaactcacagccatggtacatcagagtgaaggagaagaaagaatcctttgccattgctctatttttcattcagttgtcatgttaccttgaaaaaaaaaggtttcatctcagtgtttatatattcctctgtattctctttcatcttggaaaagaaaaacccaggcttcagtagcaaagtctcttagtgatgaaccccatcgtcctgactctgagttaaaacagtttggacttccaaaaaagagctttagattatcactagataagtatataaggtaatgcatatgttaactagcttggtgtagctatcccacaatgtatacatgtatcaaaacatggaccggtacagtggctcacgcctgtaatccaacattttgggaagctgaggcggagcccaggagtctgagaccaacctgggcaacatagtgagaccccgtctctacaaaaaatttaaaatttagcctgatgtggtggtgcatgcctgtagtcccagctagtggggaggctgaggcaggagggttgtttgagcccaggaagttgaggctgcagtgagctgtgatcgcaccactgcactccagcctgggccacagagtgagaccttgtttgacaaataaacataataacatgataaacataaataagtaaagcatgttgtacatcataaatatatacaaattttgtcaattaaaaattaataataatttaaaaaataggctgggcacagtggctcaagcctgtaatcccagcactttgggaggccaaggcaggaggatcacctgaggtcagcagttccagaccagcctggccatcatggtgaaaccccatctctactaaaaatacaaaattagctgggcatggtggcacacacctgtaatcccagctactcagg

SEQ ID NO: 1241820 - DNA, 4001 bp, Homo sapiens
cctttggacaattccttcttctgaaactttttatactggggagatctactattctgcaatctttctttcaggttagaacctctcctccccactgccgctcaatgcttcctcccccaacgagcttcagggttttcttccccattgcctttccatttcctgcagtttctccctggagcctgtgattgacaagccaacactcctaaaccgtatcttcatagtgcctccaaacccaccttgcccagggtgcatgagcaacctgattgctccttgtccatggcaacccaggacaagaaagagagataaggattagaacccaagaattctggactcttaaatcaggacgagggaccgactatggcctcagaaaacctggattctagttctgcccttgaccctaagtcacagttcaaccttcagaaattcattgcacctttctgggtccacttgccctcctcttcagacgaggtgggtgaattttcaaggtccagagtcccctctaaactgtcagacacccacccactgcagcacccaggaccccaaaacaccgtgctaacccaattcagctttgtattttcctcctggcagccagccccacagaaccagaatttacacatcagtcaacatgctggaactccagcttcttcatggtgaaaccctagtaggatcctgtcagaacccagctcatgactgaaaggaggataatgatggaaaagtttgggttggatcctgtctcacaaccagagacaagcccccacccccgcagcttgctctgcccagagtgtggttcagttgacatactgacagcctccaacccagccccagggttggaaagggctcctgctccaccagcattggcttcgtttgaagaggaacccacagacggaaaaaccgctcgtggtcgtgtgtcctcaactcccctcccctttcttccttgagaaatgccccttcttggttggacacccgtgtgttcagggcactgctctcctctcccctgctggcagttcagtagctctgtcccaggttctgccactctcccctgggcagactcttcaggcactctggtccctggagtaagccaagtggccaaggatggactatctagcctcggcttaggacccgctgtgtccctgacatagtgtccatatgatttcatttattcttccagaccccgcgaaggccttttccctctcagctgacagacggcaggccaaggctcaggaaggtgaagcacaccttccagctcaaaagtagcacctcggggatttgaacccacattcccttgactctgaagctgctactctgtcaaccatgggtctttccagaccctaggatttaaaatcacctaggtgtttggagaaaaggctcccttgttccttcatcctggcggactaggagacaagtgcccctcctcacgtgttcctttgccccattcactgagtctgcaacagccaaaaagtttgctcaactccaccgcggacgcagccggtggatgtgctgcgcccccggcacacatagctctagggcggagaccaaggcagtgcagcccccagccccggggcgtgcagtctcagtcccgttcctggctcgccgggcgccctgggagagcctcgctctggagggaaggagacagttaccttgaagagttggactcccttctccaagaacttcagtcccacacacctggcgaggcagctgggggctcctggggccgggaggcccgggtctcgctgcgtagcgagggagacgctctgcgcgggcgctgcgcacccctcctcctgccggcgtcctgtccgcaggtcccctcgggctgtggccgcagcggcaactgctgggttgcggagtcctggctggctgagggaatggacactgaaaggtgcccggagaccctggcacccgcgtcagacgccggccggcgagggtgctgagagagagagaccttgagcagcgctgcgcgcgtcctcagctctgcgagccccctctggagcggcggggaggtaggtgggcgggcgggcgggcatggcgcgctgtgacacatacatagggacgggcgggggaggggagggcccgtgaggggtgggggcgggagggggcgagcgcaaagggaaaccccacccccagggaccgaggggcggccgacagggggaggggaaggcagaggcgtctggagcgcgctggaccctggctccggaccggcgcgccgatggggaagccggcctgcgctcagggcgggagaggagcgctccccggggcggcgcggacccggcagctccggggctggcgggaggaaggcggcgcgagaagggctggagggcccgcatctgcattgcggtcggcagctccgcagtcggaggggcccaggagggctgcaccctcagagaatccccaagtgcccggactctgaggccgccgcggcgggacagggctcccgggcgcccggcggggttctgcagctgaggctggccacgacgcgatctaaggagggtgcagcccgctactgtcggccacgatttggaacgaccctcaccgaggagctggctgaaagtttttttgggggtggcgtacaccgggatggcaggggatggtggagagggggaggtaaggcgtcagcggggaggctcacggggagctgcgagtctctgggtcttcaaattccccgggagagaccaaggacatctcatatgaagcaggaattctccagtgtctctacagtactctttaataccgttttcaggaaaaggagaaaaagaactagcagcttttgaatccctcctatgagcccgttgtgtaacatacattaacatttcatttaatttttccaaagagcccaacaaggtaaatatggcaacttcccacctgcccctaaccaaagatgtgaaaactgaggctcagaaagtggtggagatccctcttgaaggtgggactgagttcgagtcccaggtcttgtgctctctgctacacaggctgctggttgagccacagcaccttcggaggactcaagctggctggtgaccttcagagttcttgtggaggaagctggtggtgcttcacaccaggatgtggtggccacagtcaggatggtggtggaagcttcctgaccctctcattgggcaagaagaggaagaagtggaatctttcgggactccccactacagagataatagaccacactttaatcagttccttgatgaaaaggaactgaagtgcctcggtttccccagggcgactccactggaattatgtggttattttactggccatctctgcctgggggcgggactggccctggcccagcacatgctctgtgagccgcctgtctctcccctgtccagggcagtgaagccccgtcggagggagcatagtgcccactctatccacccacctctcagagcaatggctaaagtgttccagtggttggccattcttgatttcaccctttttctacctgagcgtattgagtcaggtctgtaagtcttgaagcatttaggacacagacaaaatgctggtgaccgaagccccttagggggtgatagtggcttctctcacagataaagaaatgagatgaggccgggcgcagtggctcacgcctgtaatcccagcactttgggaggccgaggcgggcggatcacgaggtcaggagatggagaccatcctggctaacacggtgaaaccccatctctactaaaaatacaaaaaaattagccgggcgtggcggcgggcgcctgtagtcccagctactcaggaggctgaggcaggagaatggcgtgaacccgggaggcggagcttgcagtgagctgagacggcgccactgcactccaggctgggcgacagagcaagactccgtctcaaaaaaaaaaaaagagatgaaatcttaatagttactggcctcaatgcctggaacagggagaaatgaccctctgggaaaaaaacagtccctgaaattccaacgaggtcatggattctcatgcctgtgtttacctgatgccttgtgggagaacaaattg

SEQ ID NO: 1241821 - DNA, 4001 bp, Homo sapiens
gacttttgctctcgtggcccaggctggagtgcagtggcacgatcttgactcactgcaatttccacctcccgggttcaagcaattctcctgcctcagcctcctgagtagctgggattacaggcacgtaccaccacctggctgtttgtatttttagtagagacagagtttcatcacattgggcaggctggtctcagaactcctgaccttgggtgatccacccgactcagcctcccaaagtgctgggattacaggcatgagccatcatgcatggcctctggacatatttcgatgtgctcctctgagcatctcgcctggccttcctgctctctgagcccacagaccccagggaggaggggaggtgccaggacaccggggcccagaggagatcctgaatctgcccttgggtgaggaagtcagtccagctttcttccaggggcccttgaccctctgtgcacctgacctatgcccagggaggggcttgccctcatgctcttggaggctttgcagggaagagtccctgcttctggaagaacaggagtccactttggattagcagggttctctggagacccagggcagggcccagatgccagccctcggaggggcctctgcatctctgaggcgcattaacatctgttcccatttccctctatcttccttccccataaccttccatcaggacaggggctgtagtcttggtagctcagacactggcaattcctccccattactacagaggacttggaccctggtatttagcccctgtcctccccagttctatgcttccgccacccagacctctcccatccccaaacttcctgtcttgctttgttaggtcgttctctctgcccactgctcttggctccactctgaccgtcaaggtccatctcaggcgccccagttagaaacctccttctctctgccccttcgcctgcgcccctcctggacacaaatcacagatgttggggtcctggagttccgtgtgtgtgcgtgtgcgcgtgcgcctgccttcttcctgccttctggccagggcatcccagggctgggactgagtctcatcttctcaggatcccctactccctggatggacagggcctgggccagggtgggcattggtgaatgcctgatacgttgaatccacttcctctaaatcacagattactggaatatatacagtggaagggctttagggaaacctcagccactgcactcatattcagacagggaagctacagcccacggagggcaaaggcacttgccaaggtcacgcagcaaactggagcgggaacctctgggtccccaccaaaacttatctgtctttgacccccgcaggcaaaagtcccccttgaggagacagggaaacattcttgactgaaaaattcctcctccatccaactgagatccaactggtctccaactgcagccccagctcatacccctgggatgtgcctcattctttgatgagcctttcttagccatgctaagtagccctccaaatgaccagttcttccatcttacggatcgcccagatccttcccttcatttcccaggtgaagaaactgaggctcagagagagaagcagcttgcccaagttcacacagcagagcaaagtctagaactcggcccacaggtgcagtgtgcagaaacccaaccaatgacttacctggttttcaatttttcttgggtggtcctcacaatcatgtcctgccggctctcctgtggggtctctctgctgtccagcatgctggggtccccgtgtgggcagccgtatccagctccagaattgcgtggcatctgcctcgggcttccactgaagacagctcagtcacccactgagagaggctagccttgagtgagcagtgggggtgggcatggggcaggggaggcggcaactagagtgacccaaagaggctcatttcctctctatttttagaagctcaaaaaaaattgctcctcagtgaagtttctcagaattaaaactttccttttctttgtggttttgtttctctcaagatgaggagaatttcaatgaagccagtgttctttttgatgcaaatccgctccgcttctcccaggaggtctggccaatgggctcagggcttctgggcccccagaaaacctcctcactggctttaaaaggtcatagtggttctcagcacaaatccagacccagatcctgaagtggctgctacccctggctgcatacactctgcaaccttgacttgcggtctgccgaatgctgccctgggagggatctcacccactcagtccccctcccccaggtcctgcatggaggctggagacccaaggagggagcccaccccgggggaaggaaggagacatttccaacactgagaccacgccacatggtctatagaagcagttgcactgaagacatgatagaggcaaccgaggaatgtgactttccagggacacatgaatagaagcctggatctgtcccttcttctaaaggaaagaagcatgttaaggggggcgggggggtttcaggcagccataaagagatgggaaattcacacaggacaaggcctttttctgaataccaaaagtctcccctctaagaccatgtattcattccccagggctgctgtaacaaagttccacaaactggatagcttcaaacaacagaaatgtattctcccacggctctggaggccagaagttggaaatgaagatgtgcgcagggccacactccctctgggggctgtgggcagactctttctttgcttctctcccagctgctgggggtcactggccatcctgggtgttccttggcttgcatgtgcatctctccagcctctgcctctgtcctcacgtggctgtctttcctctgtgtctatgccttagtacattttctgttgctatcactgaatacctcagactgggtaattcataacgaaaataggtcgggtgcggaggctcatgcctttaatcccagcactttgggaagccaaggtgggaggattgcttgagcgtaggagttcaagaccatcctgggcaacatagtaagactttgtctcttcaaaaaataaaacagaattagctgggtgccacgccgtggtgtgcacctgtggtcccagccacttgggaggctgaggtgggatgatcactcaagcctgggaggttgagactgtagtgagccatgattgcaccactgcactccagcctgggcaaccagagtgagaccctgcctcaaaaataaaacaaacaaacaaatttaaaaaaacaccaaaacacacacacacacacacacacacacacacacacacaaagaaattgatttcttaaagctctagaggctggaagtccaatattaaggtgccagcatctggtgagggctttcttgctacatcataacgtggagggcatcacatggtgagagggcaagagcgtggtgccagctcaggtctttcttctcttataaagtttccagtttcaacatgggaccccgccctgatgaccttgcctaaccctaattacctcccaagggctcaacttccaatcaacatatgaattttgaggttaagtttccaacatatgaaatttgttgggaattttcccaccatagcagtctatgttcctattttctcttcttacatggacaccagtcattggagtagggccttccctgatgccaaagaacctcatcttaactatatctgcagagaccctattttcaaacaagatcacattctgaggctctgggtagacatgaatttgctgggggacgcaattaaaatccatatacattgtgtacaggaggtgttagtggggatacctatgagatgtccccaagaagaaataggtccagttgggccacaggtgatgctgtctggtgaaggcaggtgactgagaaaaagctgggctgccttctaacaaactcagggcacaggccacaggcccccaaatgctgccttcctaatgctgttgaaggtacactgagcaggtcgtctggggtctagctgcaaggcctgaatctccca

SEQ ID NO: 1241822 - DNA, 4001 bp, Homo sapiens
aaaatcaatcttctaccttctccccactcccccaaagatgtataattctattgttgagaatataactcaggagagaatgaagctattccactgaagaagcagagcctcacctcaccttaaaaatatcatatgccttcattaagttattaagctcatcacccatgtcaactggaatatagatgactgcattttggaatgactgaattaatgacacattgtatttctcctaagaaaaagattttgacattcaagtgaacacataatgatgggctgatatgccatcctcactccaacagtgaaattcagcctgtccagagctgttctggagtcattcaccagctctgaggactaagctctcctgcttggcagcctgtctggccaggcatgtgacaaacccagagagcatggcatgtcttttaacaaacgaggtggtatgtcactatcaccatggcacttgctgcctctgtcacgcctggcttctaaaaatgcaacagccaggaaggagatagattgattacacctttggggaaccctgtaaactggctgtgaacatgagagaggaatgtggatttggtcctggttggttgggagaggtgatattgttagaagttttaaacaggactgaaaagagaggacaaggaagaaaatgaagtgtataaggcagagaagacactaaagactaaaagtccaaaaggccattagtggagagaagcaggtggctttcacaccagggagtgggacccttttagaggcgtgccactcaggtgtacattcctcagtatgttggggttttgtggagtattgcttgccttggcttggatttgaagtcaatcagccttctcttaatttggcctaaagagttcatcgaacaagagggtcaggtgagagccatttcctagatcgctggactgaaggggtcccgagtgggacggggggctcggcgggaagtttacctggtgccgcgggcggcccacgatggacgggaagacagcgcggggcgcgtcatcgcccgcaaagccggccttcaccagcccagagccgttgtcgcacaccagggcggtggtctcctcgtcgtcacacatcttggcacagcttcagggggttctgcaggttgaggaggggagggcggaccacgcttagctgcctgtgcagctggccttctccgcacccagaggacaggacagagcagaagggggttgtggggactggacagggggttgggcggggaacactcctgccacctcccttcccctcgaatcataaaagggagggaagaagccgcggaggagactggggacagagaagggcagaggaatccacccaggctccctggccaggagttccagctagggtgccaggtgcaaggagggacccaagaaacccagccccttagtcctccccagccctttaactttcttccttttcacgaactgggaactcgatctccagccctgtccatatcgccatgcctgtgccccagatggaggggaaagcgcacgagagtagggacccaaaagccccttggggagccacaaaattccccttcttagagcccctgcgaggtcctgcgaggaccaacgcccaggacaaaacaagttagaaccaaatcaaaaagtgtgggctttaaaaaaaaaaaaaaaaaggcagtcgcagagcggcaggagctggggccttggctgaatgcgggccgggctggccaggtggcggcgcggggctggcgtccggcgcggcccgcggaccaggcgaggagtgaacgcggagggccgggcgctgactcaccgtcggcggggcgggtcggctcggctccggcggcagcgggctctgggtggctggctccaggagggccgctttatagaacgctgatggacagggtcagttggagcagccgggggcaggggtggggggcccggtctgccaccttgccttatttggtccccttcgcacccgctaggactgccgaggccattcatggagccaagggcaggggagaggatcagccagggagcccccagaccatgtaaggaaggggagggggcagtcagggggatggccaaatagggagctggggaggggcaggcgctgaagggtagggggcaggggaagactaagtgacgccagcccacccctccccctttctggggtgtgggtgctccctggatggtctgtggattcggtcctccgcagccctgccagccttggggacaataagccacatgcagtgggaaggcttggcgccctgccctctgctgaggggtcctgacagctgggccagggcagcaggggagcaacagcggcttctcatcttccagggctgccaccagcacaaaggacaccgcagcagcacatctgagtggctgcaaaaggggcacccaggacagggcacccttctggtctagtccccgccagcctgaatggctttactcagagagctggtgctgggctcatctaggtcagaaagctgagattaaccaaggccacccgagttccaacccatgcatggatcagggtctggccagggaagagtcagaaaagggtttctgtgagagcttggccaagtcttgctggagaagggaccaggtttaccccagcccagttattgggtagccctcatccatgctgcagggttttgctcaaattcagactctggtcttcaggccagaaaaggatcccctgctgccaaagtgaataaaggaacaaatgccaaaagtagcttgcccacttgatggtggggagatgagcatctttaaactgggggcagaggccctcactccaggtggagacaagactgcaaaggcaaatactttgatggagaacatagcaacaacttaaactataggactacaccaatccttgctactcaaagtgcagcccatggacaagcagtattgtcataacctggaaatgagctagaaatgcaatctcaagagccatcccaatccgcttttcagcaagatcctcatttgcttggtatgtacattaaagtgtgagaagcattggcataaatgacagatatcatctcctctgtggaaaacagattttgcaggatcttgaacttttgagaaggaaaaagaaaaatgacatgaaatgaggagagggagaaggaagagggagatgtaagaaggacacagatcactagtttgccctggggtgccctgcattctcagttcttgactggagctttgatttttaatgcttgtgtttttcctccagttcacaccagttaaaaatagaaaactgggcactggcatctctctctagagtggtcttgggctgatatgctgaggaggcctgctgattagatacttgtcccgactggggaatgctgggccctcccctctgaactccccaaccatgtttgggttggtctggagaagaaacgcgatgggcagctgtgtggtggggtcgggtaagagacctggctgagattactctgtgcagcacagcaggcattttacagtgaaaatgtttattgacaggatgccaagagtagaactgccttgtctcgtgaaaatatagaaaaaccaaggaaaaggagaaatgggactggtgtcagagccagacagaactgggctcaaatgctgcctttatcacttactaactatctgtttggtcttgagcaagacacttaaccttcccaagccccaagttttccctctcaaaagtgataccataacacttgttgcagaagttattgtgtattgtaatagttagaaacaaatgctgtaagtaatatggaagatacaaagcaaattgtatgtgtaataatgatacttttggaggcagtagtagctctgccttttaaagaatcaggttgatttcattcttcattgattcagcaaatctttgcaggacaagaactgtgctagttaaggattcagtgataaataaaacagagcaggactcatcctccgtggcaattacagaaaagtcagacagctatggcacaaactgggagggaagaagaggtatcagcaggatagtcacaaaaagggaatggaggt

SEQ ID NO: 1241823 - DNA, 4001 bp, Homo sapiens
cctcacgaagcagtacttaatctcattttagaggtgaggatccactgacccagcaggcataggtgagcccttcttctaatcccttcagaagcaattctcaaactgctcaaatgttccatcagatctgaatgccttacactaaactgacaactctgtcaccaactttacagagaaaacagaagccatcaggtgcaaattccttctttttctctctgccctacctcacacctgagcttatgattatccataatcttttttttaccccatcaggagtcacagataaaggattcattctcctatccccacaactaatacgtgcccaggatcccatttctatctattccaagttactctaccagtgagttgtcttctcatttttctgttccttcaacctctccctctccactagctggtttccctcacaggaccaacacgcatgtgcagtatttgcttccacctgaaaacaaaacaaaagactcttttatcccacaatattctttagccactgccctgacccttttttccttctgagttaagctcctcgaaagtataataatttagactggatacctcctttaactcacctcctattcactgaaacatggattctgcccttattgctccacagaaactgctctccctaaggccattaatgagcttttaaacaccaaatctaaatgtcacttttcaattaccgaatctttatcctgatccaaaccttttctttcttatttcattttgttccacaagaaaacattggaaaatacgaaactttttcttgactccagtatccaaatctgctggactccaaaactcacactcttaaccattatgcagtaccacctgtagttaaccataaagttatctgatttccttttctatttcagccagtcagtcaccaaatcccagtgaacaaatgataaatttcctaaatgtctctggaagtggtttcctatggatgactcccagacacccaatttagaaactttatgattattctgaagtctaacctggatttactccttaaaaacaaagctcagaacatatcacagggaacaatcacctctcttcagtgactcccctttctggggacatattcaacactactttaaaatccacagaattctccaaggcggtgtgatgagaaagagaggctgagtggtttattcaccgtcagtctaacatagggctgggaatacaagggaatcaacagtctactatctgtggggaaacgtcttcttgttaggtgtctataaattatttgtaaaggtcggtttcttcagtttgcaccctggccttagtgacttgttttcaagttttaaatggggttctcttttgcaactgtgagagcattaaataaatcagcaactattagcacccaaggaagctaactaatccttgcctactgaaggtccgtggtgccgacccttcttggctcctaccagacccttccttggcggtccaaggaagccaagtcgtcagtccccacagactcacctcttagagatttctcaactacaaggacttaggcaaggtttcccttttgactggaaggcttgtagaaacgtgacaacccgccttccctaacactcatgtcacagcggtagcggaccgtattctgggacaaatggaactcacgacattccaaagaaaggtcagccgcaagcgaacttagcactggctacaccctcctcaattctggttggcgagatgcgctcttcccggaagtgacgcacaagtgccggcggaaggggaagtccaggagcatgggtggtttttttccccctaccgaggtccgtgaggtgtgtgctaaccaaggggcggctcacaaccgtgacagactgccattcctgagtctcttctggccatgggcccccggagccgtgagcgtcgggcaggcgcggtacagaacaccaacgacagcagcgccctcagcaagcgttccctggccgcgcgcgggtacgtgcaggacccctttgccgcgttgctggttccgggcgcggcgcgccgcgcaccgctcattcaccgaggctactacgtccgcgcacgcgccgtgaggcactgcgtgcgcgcttttttggagcagattggcgcgccccaggccgcgcttcgcgcgcagatcttgtctctcggcgctggcttcgactcgctctattttcgcttaaaaaccgcgggccgcctggcccgggctgcagtctgggaggtggattttccggacgtggcgcggcgcaaagcagaaaggattggagagacgccagagctgtgcgcgttaaccgggcctttcgagaggggggagcccgcgtccgcgctgtgctttgagagcgcagactactgcatcctgggtctggacttgcggcagctccagcgagtggaggaggccctgggcgccgcggggctcgacgcagcctcacccactctgctcctggccgaggcggtgctgacctacctcgagccggagagtgccgcggccctcatcgcctgggcagcccagcgttttcctaatgcccttttcgtggtctatgagcagatgaggcctcaagacgcctttggccagttcatgctgcaacattttcggcagctaaactcccccctgcatggcctggagcgttttcctgacgtggaggcgcagcggcgccgcttccttcaagctggctggaccgcctgcggtgccgtggacatgaatgaattctatcactgctttcttcccgcagaagaacgccggcgggtggaaaatattgaaccctttgacgaatttgaggagtggcatctgaagtgcgcccattatttcattctggcagcttctaggggagacaccctctcccacaccctagtgtttccatcctcagaggcatttcctcgcgtaaatcctgcttcgccttcaggggtattccctgccagcgtagtcagtagcgagggccaggtcccaaacctgaagagatatggccacgcctctgtcttcttgagcccagacgttattctcagtgcaggaggatttggagagcaggaggggcggcactgccgagtgagccagtttcacttgctctcaagagattgtgactctgaatggaaaggcagccaaataggcagttgtgggactggagttcagtgggatggacgcctttatcacaccatgacaagactctcagagagtcgggttctggttctgggagggagactgtccccagtaagtccagccttgggggttctccagcttcatttttttaagagtgaggataataacactgaggacctgaaagtgacaataacaaaggctggccgaaaggatgattccactttgtgttgttggcggcattcaacaacagaagtgtcctgtcagaatcaggaatatttgtttgtgtatgggggtcgaagcgtggtggaacctgtactaagtgactggcatttcctccatgtagggacaatggcttgggtcaggatcccagtggagggagaagtacctgaagcccggcattctcacagtgcctgcacttggcaagggggagcccttattgctggaggtctcggggcttctgaggagccattgaactctgtgctctttctgagaccaatctcttgtggattcctctgggagtcagtagacatccagcctcccattaccccaaggtactcccacacagctcatgtgctcaatggaaagctgttactggttggagggatctggattcattcctcctcatttcctggagtgactgtgatcaatttgactacaggattgagctctgagtatcagattgacacaacatatgtgccatggccattaatgttacacaaccatactagtatccttcttcctgaagagcaacagctcctgctccttggaggtggtgggaactgcttttcctttggtacctacttcaacccccatacagtcacattagacctttcttccttaagtgctgggcagtaaggactggactaatattcaggacccactaaagtagacaataaagttttccacaaataggatgaccctctagcta

SEQ ID NO: 1241824 - DNA, 4001 bp, Homo sapiens
acgatttgttgaaagccacgtttagaacagaaataacaaatgtcagatgaaaaaggctcctctaacagagagtctcccgcacataatcctttttaaaactaaacatctattatcagctcttaatctataatgtgtgtcttgcttgatgaattggattgaaaaaaattaaataaaacgtgtaacaaaaaaatgaacactacaaactataacagaagtctgcctacgcagtaccaccctcggactcggtagaatacaggacagaaatacacttggtcctgcagtcataagtcaaagtggcaaagaaaaaaacagaaacaatacattacatgaaatagatattttctaaattatcaaaggctacagacactcatccaaagcattcctcaaattttttcaatcgttgcttttaggcacaccttgaggtttttaagtttactctggggcaagtcaaaaagcttacctaaaataaagcactttaagcaagaataaaatgatgcagctggtcctagaacacaccggaaataaaaatcgttgtcttcaaaacccgaaacaagaaatgacatgcttttagcaaatttgactttcatgtgcaggggggagggggcactgttttgacaatccactaactacactgtacatctactccacctgaaagtttaacgaaactcttcaagttgggtcacccagggaccgaacttctactctaagagacccaatccagcctacaaatcaaagaacatccccaaatggtttacccttctcccgaccaaaccctttcccctgggcgacagaatgttttcaagaacaccaacacaccctcctgtgatctctctccaaacacaggacacaggaagaaccgaggccactagtctcagataagcgggtgatgactgctgccactccacgggcggcccctctgcagaatggggtcggtcaggaccggcgcgccgggtaaagaacaatacacgagcccagctgcaaacaacacaacttcccacgagtctgcgcggcgggtctcggcggcggagaggacttcggaatccgccaccgggcaggggctgggggaggaatggtgagcaggatgagcgctgaacgaggacggcgagaccgccagcctcgctgcggctgcctgcaccggcgcccgccgagcagactggagggatgcagccaccagcctgggttccaccgctctcaccaggcgacgcggatgccccgacttcgcttctctgggaggcgacccccgcctcccggggccgccagggcggtggggggcggggaaggcctcgccggaggcttgggagcctcctcggcccgccaccgaagggaaagcggtcggggcgcgggggacaatagggagcggggagcgcggcccgccagagtggcgccgctggccggctgggctgactgacgcgcacgccgcgaggcgcgactgggctccgctcggcccggccgccgctccgccgtggtcgcggcgcccccggcgctcgcagtcgtgcctcacctcccatccccgccgcccaggagaggagcagaattaacactctcagcaacaccatcttccgctgccgctgccgccgccgccgcctcctcacgggttaacagcagcacatcgatccggagggagaagctgaaggggcttggtccggagcctccacgggaagccgggacctcccctggcaggagaaacggcgaagcacctccctctcgctccacttcaggggccggcaacgctcctagctcctccaaaacagggacctccctccccctcgttcgtttccttcctcctttccccgctttccttcccttgctcgttccctcttctctccccccctccttcgaaactcagacctccgcctccttcctcaccacgtgacgcgcgggcacccaactggcacgcggagccgcgcccctacctcccgcccctacccgtcccccaggcgcttcaggggcgcgcgcatgcgcgcgggggacggttcccgtgctgctaggcctgccgccgcttcctgtccgccggcggagagctgggattgggcttgggaggcggggtttgtcctggtcccgccccggggcgggagcgctcctacgcggagatagtgctccgctacgtgttagagctgctgaggaccttcccttgggctaaaatggtccgtggaagatgtaagcagggctgctttcgacttcttaacgtcacaagtaacagaggttttttttcttctttttctgcctctcttggtgcaccacagctaccaagtaaacaaaaagtcccaacaagcagtaattatagcggcagctgccccagtgatgcgaacataaatgcaaagaccttcaagcagcaggaaaaaaagacaccatgtccgagatgtaattttccgagctctttacaaatttatgtcacagactaaggctttagcctttgcaaaagcatgcaacctgaaccagactgtcttgaatctccagtccagaaaatgtcctcttttctctctgtcacatctttgaagcgaatccacgcacatcttctccccaacttcttaaagcttgtgtttgttttctcgtaactcattttgattctttaaacttggatgtcatgaactagaactttttatggccatttaattagatattcttcatctatttggtatcgtgcttgagtaggccgaattagggagagtgtgtgtgtgcgtgtgtgtgtgtgtgtatgtgtaaattgttttgttttgctttctaaagacaaggtctccgctgtctcgccaggctgaagtgcagtggtgtgatcatagctcactgtaacctccaactcaagccgaattagggagagtgtgtgtgtgtgtgtgtgtgtgtaaattgttttgttttgctttctaaagacaaggtatccgctgtctcgccaggctgaagtgcagtggtgtgatcatagctcactgtaacctccaactcaagcgatcctcccgcctcggcctcccacaagtgctgggattacaggcgtgagccactgcgctcggccttaatgttattgatactgtaataaactggaattcctatactgttacctgtatattttataccatttattaccattaacataagtgaagagaatttttttttttttgagacggagtttcgctctcgttgcccaggctggggtgcaatggtgtgatctcgactcaccgcaacctctgcctcccaggttcaagcgattctcctgcctcagcctcccaagttgctgagattacaggcatgcaccaccacgcccagcaaattttttgtatttttaatagagacggggtctcaccatgttggttaggctggtctcgaactcccaacctcaggtgatccgcccgccagcctcccaaagtgctgggattacaggtgggagccaccgagcctggccataagagtcttctttaattctcagtttgagaaatgaatgattctagttttgctgcaacattaataggctcaaaaacggacgtttcaaaaccatcataattgtatccatttataatgagatacatggaatcatcaaaggatggcagaatctcacgaatggtttttttttccttcattaaaatattcagtcttaggaaatagttacctgcagacattacatctcatatcacctgtgctttttactaatctcttgtggtagtgctgtcaacaaatgatatttttattttccagctcttaaaccaccttatagcatgttttctgttgcacagtatttttataatgaattccagtgattagaggcaaatggcactttcccttaaaattcaactggaaaaaactccaaagccatattttgcattactaagatgattactgaaaattacatttataaagactgtatttttttttttaatttttaaaatgtatttattttggccagccacggggctcacagctgtaatcccagcactttgggaggccaaggtccgcagatcacttgaggtcaggagtttgagaccagcctggccgacatggtgaaactccgtctctgctaa

SEQ ID NO: 1241825 - DNA, 4001 bp, Homo sapiens
gtggcacaagaaaaggtggaggtgtggggagcagtttcttgtgcctgggaaggacagacacaaactaatatcagaaactgcctccccagaggccagtcatgacagaagacagagaacccctgcggttcatgctctgggtccataccaagcttcgctgggggcagcccatctgccggccatgtgtgcggctttcggggcacgatggagaagctgagtgctcgtctgggcgccagtgtagccacatgatcaagtgtgcgcgcaggcagggcaagtgcacacaagaaccccccctccccctgggagcacctgttccgggtgcctcaaatgcaacaggccaggaacttcggggcagggaagttactgccacagcaagggagctcctgggggcaggaatagggtttatcaccaatgtaaacacccctcaggcctggttgggggtgggcaccagataaatgcctactaatagtataaggaagcaaagacaaacaccctttctctcctgtttcttacgtttcagctaggaagagtggggtgagccgtggcctgtctgggtacctctccaaacttcctgttccaggtacagagagaagactcaaaaggaagggaggtgaatgcccactcccccacctccaagtccaagaacataacacctacacgtacacaggtactcccgtgacatacactttgacacggcggtgcagatgcagtgttctctacattggggccaaggcgcctctgtccagggccctgacagtttcatccctgccagatctgcgctccctagagcgggcggcgtataccccacgcaaccccagctccgcgcgggttccacgggctgcagaggcgctggactgggatgctgcccctcccaccccctttgcctatagagggtaccgaaggccggggtgggggatggggagaggtggaaaggcagggggttccctccggttcccctggaggctggacttccagcagaggcgccccacccccaccctccacggcgaccactctgcgtcgcaacagaccggacgggccgacccggaggtggcgcgggcagtaccaggccgccggcggcgccgcaggcgctgagcgagacgagggagccggggtggccgagcacacggcccgagtagaagcacagctcggcggggcggccgcggcgccgggccgcgcccgcctcctccacctcgaagcctcgggacaggaagcgcaggtcgcggcgcagctgaaggtacaggtcgcgcccgaaggccggcaggtgcagcagcagggcgcgctctccgggccgggcgcgcggggcggctgggggcgtgcgggggcgtcgccgccgtcggggcccgggggctgcgggcagcggcggcaggtgcacgtcgtcggggcgcacccgccacgggagcaccacctccacgtcggccgccgcgtcgccgacagctgcggggagagaggagacgcgtcagcgcggcggggcccgcccggacgcccgccctcccgctggccgccagccgcgccagcgcggggacagcgcgacccggagccggcgctgccttcccttccctcgcccggcacctccacgctggcccgcgccacccggggagggtctccggcgcagccgcgcgagcacctcccggaacggcgccgcgcatcggcgagcggagacccggcggcggcgcgcctgccacggagccacccgattcccgtactccggccgcggcccgcgcctcctccgctcgggcgccgtcagcggtcccgccgccgcccccgggccgccaggacgccgcgagaacgcagagggaaggtagccgcaggacgcggggtgaagagggctgtgggagggggcgctacctgtgcccgggtccagtccccaaaccagcagcagcagcacgggcaggacgagcggaggcagcagggcgccgtcacacatggtacccgggaccggcagcccccccggaccgtggcggcgaagcaggagcgcgctaggcggcggcgccagccggagtgaagccctccagcctttggaaaaagtaattagcgctgcggacaaacccaacgtggtaaaccccaagccccgccttcccctcggaaggcgggaggggattgggccctcgctttcctccgccccgcctcctccttccctactggttgggatgggtcgaaaccacagtgcgtagttaggttgtcagcgctttcttacacgtggtttctgggcagtggcggggacacggcaccaggtggcgcgcgggagccgaccggagccgtgggaccctggaagagctggaggatgcggggctggtcttcagagcttgtcctcattttggaactctctcagcctgctgcccagtttcccgggaaggtagggcggaaatcgccccggccaagcggtttcatccaaaactgcatataatctttacatctgaagttaggttttagttgtttgtggccgcaaagactcccagtccactttcccgcacacctgagttagcacctgaaggctatatccgcggcgtttatccaaactcttcacacctcctgtcttctttaatcccacaggagccagtgcaacacgcatgctcacaccctcttacagactgaaaaactgaggaagagagagagcttaaggaaaaacgctgaagttacccagagagttcctgttggagcagaggctagaatttgtgatcctgatttctggcttggtgcttcttattaacagcaggatccccccgccccgagggaagcaggactcagtgttacaggttaggaaacggaggcacaaagtcccaaagcctagccttgaacgtgagtctcccagaaacagaatgagttgatcctttcctgccacaatataactgaggtctgcagggaaggtgactccattagcttgctgaatagcatcttgtagaggctcatgcctgtaatcccagcactttgggaggccaaggcgggcgggtcacgaagtcaggggttccagactagcctggccaatatggtgaaaccctgtctctactaaaaatacaaaaattagccaggcgtgatggcgcacacctgtagtcccagctactcgggaggctaaggcagaagaatcgcttgaacccggggggtggaggttgcagtgagccgagattgtgccactgcactccagcctgggcaacagagcaagactccatctcaaaaaaacaaaacaaaaccaaacaaaacaaaaaaaacaattaagtgtaaccataaccaatctcaggtttcccgtcccttccctgtcctgctcttttccattttatcatagcagaaaggttatagttccccgctggatgctgcttgaagcctcggaatctaaattcatcacaggattacatatcatctgaaggaatctataacactggccaccttccccgaaatataatgaaccccaaggctgaacagtgaccctccacagaggcttgccacaaaaggggctgccctcactgcttggcacctacagttctgggggcatctgcacaggtcctgctcttggccaggcctggggctgtgtttctcccccttgcctctgtccaggtcaacaacctcagatgactgacagctcagtagcattttctggcagcacaagaaaccttggtgattgaggtgatggacacctcatttaccctgatgggattattactcattgtatggccatatcaaaaaatttcatgtatatacattttgtaaacatatacacctactacgtactcacaaaatattaatttttttaaagatatcacagtaagtttcttagtgaatctttttgtcaaaaagagccatttctaaggcctgccactgaaaaccatggagtatgggccacaccacctcacaagcgcaagtcagcctgaagtagccatcaccaacctatcaagaacctatccaagatgctcaaatgctaaaattagtccatagggacatgaaaactaaaacagaaagatactattttatctcccaactaaccaaaattaaagagcttagaaaaatcaagaatt

SEQ ID NO: 1241826 - DNA, 4001 bp, Homo sapiens
ggagtgtttgtgcccagattaggttggagagagtgcctggcctgcctccaccctcaaacagcaggtccaggtcatctggggagtcctgggtcggcctggcagattaataaaaataatgaccactacattgtagtcactgtgtcctgcctgagcaactgacatattcaatatctcatttaatcctcataagaatcccacgaggttgaccgcacccaactcttcccacagctgccagggggccaggacccaagtcctgagggaagcattttcctgctctcccattcccatcgcccggttcatcctcctcagcccccagctctggacagtggaaaacacaagcctcattcaggaagctcaggagtccaaccccacaggtcgctctactctgagcctgtttgctggtccataaaaggactttccatcacttgctttgcacggttgttgtggagatgatgagaaataagaacccgtgaggctggcacacagtaggtgctcattaaatgttcgctccctctgcgctctgcgcatggctgctagaccaaatctttccaaaacactgctttcatcagctgctcccctcaacggcttcccaaacctctaagatcaagagtcaatgtccccatccttcccgcccagactactttctcgtcacaatccctccagtggggaggcaggtcgaccccatcccagcaagcaaccctaatccagtcccccgactgatgctccccaggggagggccccactccctccacgcccttctagctcatccagaatccatccatccttccagtctctccaacctcatgcccctcctctcctacaaagcctgccggtcggctctattgcaggactctccccactatccaccggctcccctgactgggagctccctgagcaccgggcctggggtctcctacatcctcggttactgaattcccaggccggctgcgtcggacgcgccagcagcgcggccgcccggcaggtcgccgccaaacaagagtctggacgcaggccagaggctcgtcggaggccggcccggcggggcggggagagttaacccatggccgggaaaagaagctcctgctccccgctccactcccggcgtcttcacacttggggaagggagaggcaggaagtgcaaggaccgcgcaagacccggccccccgagccgccaggggccgcgccagcagcccagatgcggtgggcgggagctgggggggcggcggggtcccgcgaagacctgcgacctggcgccctcgccggctgtgtcccggccagcccgctttccaggcgagcctcgctaaggagtgtgagaaaccaaatcctcagtgggtaaaccgcgctccgtccagcccactcggacgagagctctcccgggagccaggcgcgttgctgcacccgaggtggggaaaccggagcccgaagagcggaaggggcttattccaggcgacaggcagtgtcagtaactgaatcaggggccgaggaagtttccccagaagcgcggcttcgctcccggcccggcccgaccccgactactgtcccctaatacccagggagcggaagacgcgaccaactccaggcacagcggagccggcgcggggtccacaaaggtgaggagggacaaaaccgagactgggggagcgggaaggggtggcaggcccggctggccggggaggggcggacacccacctggtgcgggtccgggggcgccgggagccagagcgcagaggagcaggaggagggggcgcagcaaaggcgcggggctgcggggactggggccgccgggcatggcaggaaccgggcggccgccgggtgaccccgcgcgcacgctctcgtccgtcccgtccggtcgctgcctggtcccaggtccggctcaggacatgcccggccggcgtgcagctcccggcgacccggccccgactccgttcggctgcgctcggtccgcgggcaacaaaggctgcagggcccgcccccttggccgctgcagaggcaaagaaaagacaagagagctagaaggagagaaagaaagaaagaaagaaagggagggagagtgagggagggcggctgccggcccccgccccgcccctcggactccttcccccgcccctggccccgccccgccccggccggccccggcctcatcggccccgcaggccgtgctcgcctcaagggctggccggcccggcgcaggcagcgccccgcaacggatgtccgcccccctcgcccccctgtcccgagcgccccctgccggcggagccctgccaggcctttccgaccccggccggttgaggacccccggaaagaatctggaatttccagaattaatgtgttgtccctaaattgggctccacgaggtgcccttcgctgtgttccccaggccaagcagggcagcccctcaaaaggggacgcgggaggcctccagagggccacaccgggggccctgcttcaaagctatctgcggagacaggcctgggccctccctggacagacagcggttgcccgcgcgaggtggggccccgcagttcctcgtctcctgactcctctcctagtgcgtttgcttgaagcagagcgcagagttgagcccacaggcgggggaccgcggcttcgcccaggccagcgcccacagactttcagcaggggctcccggggagcctggaggccggccaaccccagcctcacatcccaggccagcctccgcctccaacaccggccgtctgtccttcgtggccccagccctggctctggcttccggctccccttccccctgtgctcccaggagcttcctttctcccttctgccgtcactaaacatggccctgtaccgaggacgcccgtcttgtcctcggggcggttgcggtcagcttcctccccttggttagtctttgtgtgccccctgccctctgaggcccgcacacctcctcattgtccaatctcctgggccctttcattcaattcctggaagctcacttctggcttcctctccaccctcaacctgtctgtcctctagggaatttgtgtagtacagggtcacctacttcctccatctcatctccagtgaccttccactccacctcagccatcaggtctcagggccaaagcctgggctgtgtcatccctcagaactgctccatcttggaaatccgaagctcaggtgcccccctgtcagacccgactctgcagtcctttccaccttcacagtcccactatgtattgctcttcctccagtcccttgataccttcctcttcgcccaacctaccagcccctcctggcttcacctacttccctcccagctacatctactgcttgactcctggcccctacccaaccaccttgcatttcttccccactgcttacaccagctggtcttgctgctcagtgacatggacaattcagaccaccacatcctaccatgcacactgcatacaatgagcctttgtagctggcacccactcacttctccctccatctggacacagtgaaacaggtgccctccagcagtcagagacaatgcttccaccagggctctgtggctccctcccctcctgtctcctcaaaggtcctgctccaggtgtcccccgctttccttggtctccttgggttggtgaccgtcagtctaaaaacattcttgtcttcctcctattaaagatactgataatagctgggtatagtggcacaggcctgtagtcccagtgatactcaggaggctgaggagggaggattacttgaacccagaagttccaggccagtctgggagacatactgagacactgtctctagggaaaaacaaacaaacaaacaaaaagcaggcaaggtgcctcacacctataatctcaacactttgggaggctgaggtgggagggtcacttgagccccgagtttgggaccagcctgggcaacatagtgaaacaccgtctctacaaaaaaattaaaaattagcccagcatggtggcatatgcctgtgatcccagctatttggggggctgaggtgggaggatcacttg

SEQ ID NO: 1241827 - DNA, 4001 bp, Homo sapiens
ccaggtcatcaccggtgtatggtatccacagtgctattaaagccctactcaggattcagagaggacccaagggatctggataatccttacagctaagccaaccagaaataccattggctagagataggaaagaaagtctggttctctggtgtaggattaacactaatcatgccacatcttaggtggtatacaataatgcctctgagtaaacagagggatgtccaccatttcccttcccctccctatatgaccttacctgcgggaggggagagtgcatgaagaccatccctatcagcacccaccaggggctcgtccaggaagccatggggtctagtctcctccgggtctcagttgtagcctacaaacgaggaaagagttcattaccaaccagctctggcccccatggcagtaaaccgtgacttaagcgacccattagatggagggaccctgaagcccatatactattttggaaaggtttgtgttggcccaggttgccgctgcctactgcagggtgcaggctaactgggctccctttagaaggtccacaacaaagtcaggcgagggctggacctgtctccagtgggcatctcatacctccagctcttcagaagctgagatatccctgcccaagcctatctgtcagcagcagggtgtcgctattggcatttgactcaggaagccagcacagagccaaggtttaggctagcttctgctgctcgcggcaaaaatgagtctaagacaacaaagccgcccagagagggaaaggacctgcctaaggtcacacagcaagatagtgacattttagggctgaaacgcagatcttctgatagttcaaggctttcctcgctagatgacaccgtgcgccctcgaggtccgggacccacacccagagagacgcctgagagctaagttcagggaggtttggaggacacagcccctgagccagcctaacacaatctcctaaaagtaggtgagggccagccagcagaggtcagctgaaaccaggagggaagcggggactttttcccttacttttcctgtcaatttacagggaaatcagtatgagtcgagactggaaaagccgaggtcacactcgactcccgcttcgcctcgcgggcgccttggcggagctggtgtccgggggcgggtcggtggcttctctccatctggagaaggcattaagggcctggtctaatgtgatccgcaaatgtgctgctgtttccgacctgaggcggcgactcctggctgaagggaggcggccagtgcggggccctgggactctgcgccaccctcgcctgctcgcaccagccttccgagtgcacactcctccgactacccgctgcctcgaagtcgctcctccagtgcctccgccgcgtcccggtcacccccacgcccactttccacgatcgcgcgtcgcctcaacccccggcgttctgggcgctcgctacccagtggtcaaccggccggaccttcggacccgcgaggtttctgcttagtaactcccaatcctgaaaaactccaaccctgtggagttcccccataatcaagaacgcccctcagcccgcgaactgccgccgaaagactctccctgaaccttccgggacggcacgaagcgcgcccgacccgaggtgcccagcagtgaggagcaccccagtcctgaggccccctggggcccgcgtggcacgccccgactctgcttggagacccccaacttgcttagagaggccactgctccaagtcttactccctctggggagcgccttcccccgacccctgaggggccgccctgcgccgagctcggtgcacccaccttgcgccgcagaagtatctgggacgtgcagccccggggccgcgcgggctcggcgcgcgctggggagaagttggcagaagccgcccgtcaacacctcgtgcggaatccggcaccaggaccttccccgacgccggcctccagcccgcggcgccgcagtcgccgccgccgccgcgaagttaaatggggctgggacgggggctgccccgcctctcccgccccctccgggcgcgcagagcgctgcgctggccccggcccagaggcggagggcgcgcgccgccacctgcaccgcccggcaagtgcacggcgcgcccaggcgcccgtcagcctgcgcgccggcaccgcgccctcggcttgagctggaggcgccgggggcgcgaagagacgccgtgtggggccaggcccgggccgctcggagcgcgcggggccgcggcgacggcgggactcggctggaacgctcctccgcccgcttcctggaagccactcctcgccctgggccggccgccaggcgttgtgccaagagccgggattgccgacgccgccaccgccgccgccggcaggcgcactggggaaaggcggccgctgcgccgcaagccagcctggccgccccgcctcagccggagccggagcagggatgccgtcgctccccccgagcccacccccggccccacctcccatagcctccacccaccccgcccagacccgggcgccagctctgcaaagtcaggcccagcagccacacagaggtttgcccggaaccgctggctcgtgcctaagagccataggcactcctggccaggcaggaccatagtggagaccaatggccctctcctggcctgcgcctcctccgcgcagcatagacgccacacaagggactgtggagcgctcactgcccagaggcctgggacctttggcagccagggaccacgaggatcttgcaggagcgcctcttaactgggtacctggcgcctccttgtctgagccgggcttggggaactgagagctccacaggtgccagaatcatgccgtgtccaggcctgggatttggggttggggggaagagtgtcgcggacaagagactggggtgagttgcctgtgtacttctggaggtgaggagaagtaaaaggaaatgtttgtccctgtccttgtcctagtcccagcaggataagccaagggccaggagattgatcttaaaggctgcattatgcccccacctaagtcctaccacagtcgccatttccttgggtgtctgtcgagtaccaagctctttgtgtctatctgatcttcacagcagcagtagttcgagcattatcccatttcacctaggataaatctgaggctgggaggataacttgcccaccatgagtggagaagccaggactggaacccctatctgcctctctctagagcctggactgttcacccctaaagttgttctcctgccttctctgtggttgctgcgttccggttactgctagagctttgccaagagcaattggccctgcctgctttcctcactcattcttcccttacttactctggtgacttcctctgaccaagaagaggatcttcaaggctgtctctccactctatgtaaaatgattggacttgtggcaagtgagcagaggacaggtcagtgtggagacaggagaggtaagagtagccagtgaagggtagggagggctgggctaaactagaactaactcatctatggacaatcgatcctttttatttactgtagttgtggtctataaagtcacagaacaacgaatttgtgaatatggagccattgttcctaggggaaatatagagttgggttcctgcaagctcacaatatttttgtcaatcaatcaacacattgccttattttatgcatgtttctgtttaaagacgccttacttaacatctattgttgattcctgaacactgagctcacagcctacagtgctgtaactcatgcctgaatgaagcttatctaacttacgtattttctctgcaacacacatcccagccttcttccacttaggaacgctagacttcacttcagcactgtgcctggggggtgctttaagcagcaaaatcatcaaaaaaaagaccaaaaaaatgtgaaaacatggcaatgaagagaacttttgggccactcatttacagtgtgaaagctgaaacaagaagacagagggttgactggttggac

SEQ ID NO: 1241828 - DNA, 4001 bp, Homo sapiens
atatgctgaaaccctaattcccaatgtgactatatttggacgtagggcctttaaggaagtagttaaggttaaataaggtcatacgggtgagccctattccaaaaggacctagtgtccacataagaagaataagaggcaccaggagtgtacatgcgcagactaactgaaaagccagctggctgcaagctaggaagagaggccacatcggaagccaatcctgccaacaccttgatcttggactatcagcctccagatccacgagaaaacagatttgttgtttaatccacctaatttgtggtattctgttctagcagcccaaatgactgatacaataatatgtttccaacaagtgagacaggggccttgcttcacccatctctgtatcttaagaacctagcacagacctgacactaaccatgtagttggtgaatatctgctgaatgaacgcgcataaagcaaggaaggacaatttaatcccagcactttgggaggccaagatgggaggctggcttgagctcaggagttcgagaccagcctgggcaatatagcaagacctcgactctactaaaaaaaataaaataaataaaaaattggctgggcgtggtggtgcttgcctgtcgtcccagctactccagaggctgaggcagaaggatctcttgagctcgggagttcgaggctgcagtgagcagtgattgcaccactgcactccagcctaggcgacagagagagagaccctgtgtccaaaaaaaaaaaaaaaaaaaaaccccaaaattatagctaatatcgaatgctttttaaagcaggcactatgctagagagattacatgaatgatgtcatttaatcttcaggccaagtttgctctactttacccctcccggccccaacactccacagaaagtagtgagctacatggtagagggcctgcttttatgtggtggttatacataactctgagattacggcaagaaagtcaaatcgaactgagacagggactaaagttagtgtttacagtatcaatactataaagaaaataattacattcccaaggaaaagtacaaagaaaggaggtagtgtcatttggaagaaccttaaatatgcagtgtcactgaagtcaggggaagaaaagaatttcacggagaagggcgtgttcaatgcgtggaaggctgcagagtagataatgaagattcaaaaaggcaaatctgagaggagttgcagtacagtcgtgtggtttctagactacacggcgtttcgaaagtgggtaaaggcagacatcacgcgtcttcaagaagttcagaagaaagaggaagagtgttgtcatagtgggtaaggtcaagtatctttgattgcaaaacaacagtcgccagaagagaaggggctaaaagttggaacgaggaagaaggctcggagaaaggtgtcagacaaagcgggattagcaagaagctgttagggctggtcctaccgggatgagagaaaggcgcagaggccagccgagtggaaagagcagcggtgacgaaccgggttccactcagacgtccgacacttctcgccaaggggccagcgcggacagcagcgcctcccggggacctctgagaagccctgtttctgcgcggctccgcccgacctccaaggccgacctcggaggctcagagacccaggccccgttggcactcaccccactgccacgcggcgccagcgccggactggccgcacgataagcgcgtcccaggctgccgccaaccggccctcgggggagacgggtcccgggggcgcaggcgcgggccccagacacagcgagctccagagagagcgcagcgccgagcctggcagctctggctccagcaggaagacgcagcccacggccagcgccaggaagcccgcgtacgcggagccgcgccacagcgccatggggacccaggcgccgcacctgcgcgaaccaactcctttcctagcccgcgcctcttccgggctcggcgcgcgccgatgtcgacacaagcgctacgtcacaagggtgcgccacggggccccccaaggggcggggcgacgggcggcgccaggacggagcgaggggggaccccacgcctcagtcccaggcctggcactgcggtgttgccgccccggaggaggtgggacaacggcggttgtgccagtccgggcgctgcacccccttcccggaactctaatcgtatccccaaatagagggatgggaacacatttgctttcgcagtaaaacgaaacggacagattgtgaagaagcggacaaacctcgcgttaatattcgaaccagtgggtgtccccattggcacggatcacacccccatcttttaatccctccctccgcccgtgtcccctcatttgctagacttgtcctcttccaggcctagtgctcggcgcttctgagaggaataggctcacagaatagcggcgctgccgagacccctggggtacgcgaggcagggggattccgcccctttggaaggtggccgagaccctcagccactaaaggacttcgtcgagacaggagagcccgcagagatcgttctcttctggataaccagattattccacaatcaaactttaacccttttgggggcgctgttccctttaacaaactctggaaaatgtacacaatcttgtgcacaacacgagagttatggacctgggttgagaaacgctgctttcttttgttcccccttggtgacatcacttaaacccagccctctcttcgctgatacttttctgtgcatgaggctaggttgagagacagtgaagctaggctgggtaccagctcattctcatcagccacaatgcccggcctagtcttgttccctggtttgtttccacttttccaattctctcggctcctgaccttggctttgtgtccagttttccactgtgaccctgacctttggacttggcagcgaaactttatttccctaactttgatcttgggcattagtcttcattctcctcagccccacctcatcagaacttccccatcctggtcatctaccttcccgcagttcatcctacccagcctacctgaccatgccatccctttcgacaaagatattcacacaggaacagatttgggctaccttggaaaagaagccaaagagccagtcagatctttatgaagccatgaaagccatcttccctagagttgcctgtcacttctctctccttagggagacatgtcagtcagttcctagagaaactgcttcttctcacaaccctcagctgtcaggtttccctggcacccagaggggactgagccagcagctgacctgaaaacagcgagtctgctgactgtccagcgatcatttccctctattgagaattttaaccaagtttctgttgtctgtagttatttgatattggctgtggacccacaaagtcacacaaggctaaaggtcagaaccagttaaatatgtttccaaggtgaagttttggggagcacaggaagctgaactgtgggaaggtgatagaacagacagatctagaggactaggagagtgctccacattaaagtgatgtggacagaaacctgcctggggctttcttgctcccacgagaggctgctaaacttccagcactttgcacctaattcttctgcttctttctagatttgccagaattgttgatttagtcacagagacaaaacaacagcagttgaacaaagtggatgtttatttctcatgtaaaagtctaaatggggtgttggcatgttgtgggctgtggtagcaagcttggccccctctggttgctatgggacctgctgtgggcctcttgctggttagtcactcagtgtgggtttgcattgtgggtggtgaagggggccagacaaggaaacgagagagctgacctcaattccaactgagaactgaagagtcaggagccgcaggaggtgaagaacagaacaccagggacagttgccaggcctggcggagcctgatgtggcttctggtcacatacagagtcacagggcccttaattccttctc

SEQ ID NO: 1241829 - DNA, 4001 bp, Homo sapiens
cccatcctgactcatccaccctgcttgctcatcccatcctttccaggagaaaaggtctctcttttaaaaaggtcttaactgtaaccaacttcctcatattgacagtcacatcttagaactgacaaattcagaaccttaatctgcctcagcccagcaatgggagaaaaaagcctaagaagcccaatgcccaccctgctaataactaatttgggaaagggggctggcggatagtcccctcctttctctgtgaggggctgaggctaggagtagggtgggtggctttcctgatcctactggcaaggttttaaagaagccagaaattaagttatctgagaaaaggtctctgtagcctcctatttcaagagaggaaagtagtccttttccaaacaccctgaccttgcttaagagaagagagaaagagacctccccctcatattgttctgtattattttatactcagtacctgttttaagaagaaacaaggaagcaaaaccaaaggcaggcagcccggcgccacgcaccagacccaaaaccagacccaaaaccaggcctgggcctgcctgaccttagcctgatagttaaaattaaacccatgacctagcaaccgatgttatccatagatttcagacattgtatagaaggacactgtgaaatctcttgttctgttctgttctgtttcactctgactaccggtgcatgcagtccctgtcacataccccctagattgctcaatcaatcatggccctttcttgtaaaatctttagtgttgtgagtccttaaaagggacagaaactgtgcactcaacaagctcggattttgagatgctagtctgccgatgcttccagctgattaaaagccaattccttcactacctctgtggggttttgtccgcggctcctcctgctacatgctgacacgtcaaaaccaacagtcatcaaggacacacctctttggggacccaaatgtagctcagtgaagctggagagaagttccgctcagataaaacaaccctttcaacaaggacaaacacaagcctttctctagcctggacccagcgctctgggggtcagacacccggccttcaggcagggagggggtctggcctaaagaaagggtcccagctgcagagtcaatggagcaaaggccccaaaggaaccaagaagtcagaatcctcggtggcatgagagccaccaacctgctggctgatcaagagggcagagggcagttctagaccctcctctggcactaagtagctagatgatctggggcaagtcacgtctcttcaccatcaaccgagggctgtgaattagataagggcttcccaaatgtagttaattaccatatgacatctgatgaaaggctgattttcaggcccactcccacaccgtcctaattgctattttggggaaaggggcctgagaatctagatttttaaaaagagcgcggacgacccctaccctcaagccacaattctgataatcgcccaaacctgaaaaaacctggctcgataaggtcccctgtgctgctaaaaagtccacggaacaacgacaacaactaaagtctgctatcctggcacgacctccccgccggctggcgttctcccaggcgtgacgcgtgggaggcctgatctcaccgggaaggactcgggcgttggtcacttgctggccgcggcagctgggccgagtcccaacgaccagcgccgccccctctggccctggacccccgagcagagcgagggctggagacaggcggcgcccggcctgcttttctgcgggccggtagggcagggtcagcccagttcaggcgtccccgccgcaggccggggcggaaacaacgcgcggggacctgcgacccgggacacgcggcctcagcccgcccgaccccgccgccccggtgcagggtcctggatctcacctgaagccccgcgtgtctcttccggtctgcacgtggcgtccggaaagccggcagctcccacatgcccgggcaagcccggctccgactgcccgcctattggctcgctggacggcagcgcccgcccaagacctcttctgattggtcgagcctgcctggcagcggggaggcgggcgagagcagaaggggagggactcctgaagagggcgtaactcgtgctgcgagccggccatactggcgggaaattttaaagagaagggaagggagactgacctcctgtcgtccctgcccggtcccatcagtgttccccggctccaatccactcctctacctgggtcgggatgtgggctcctgtaagcctggtaccaccaaaggccgaatgacttactgagtacacccacatctgcagattgggaacatcggcccttacctcctcgggtgttctgggattcaaggaaataatatacacagtaggcactaaagagagactttgaaagtcaggtttcctccgtcagcgctgctttttcatttattcttttgcaacacttgactcctaagtattaagttcctacgtgggcttggcagtgggatgcacacaataaacacataagcatcctgagttgtttatctaacagcagggaaacagcaaggttaacagaaaattcagtgcaacatgaggccggggcgcggtggctcacgactgtaatcccagcactttgggaggccgaggcaggtgatcacctgaagtcaggagtttgagaccagcctgaccaacatgaaaccccatctctccaaaaatacaaaaattagccgggcgttgacgggagcctgtaatcccagctactcgggaggctgaggcaggagaatcgcttgagcccagaaggcggaggttgcagtgagccgagatcgcgccattgcactccatccagcctgggcaccaagagcaaaactccgtctcaaaaaaaaagaaagaaagaaagaaagaaaattcagtgtaacatgagtaataacaagaacaataataaacagttcacacgtattatgtgagcacgaatgatgtgccaggcaaaatactcagttaatttgtacaatgaccttactattatttcagttttacagttaaggaaattgacacttaaattaaggagaaacacctagaatccaaagatccttacctaagcagtctgacttctcttagttcacattttgcaagcagaagtgatttggaaacgtacctgtgatgagaaataagctaggagctctttctgatgggagtacaaatttgagggaagcaggacaagggatgaggtcacaagagagatcaatccttttacccaggcccctgaaggctttggggaggcagagggatttaagccatagatagtttaccagtgaatctgcatttgaaaaaacttgttctggctgcagcatagagaggaatggatgaggactggagaaaggagtgggggagtgtttgtggaaatttggaagatcatgatgtccagagtggtgtggaggataaagagctccccacctaagtagcatttgaaatgacagattcaaatgctacttaggaggcagcgttgatcagagagcagaggggaaggggttataggacagcggtcttcaggcatggggactgtgggaggtaaatctggggcaaggagagttttttttgttttgtttgtttttgtttttgagatggagtctcactctgtcacccaggctggaatgcagtggcacaatctcggctcactgcaacatgtgcctcccgggttcaagtaattttcctgcctcagcctcaggaacagctgggattacaggcacgtgccaccatgcccagctaatttttgtatttttagtagagatggggtttcaccatgttggtcaggctggtctcgaactcccgacctcgtgatccacccaccttggcctctcaaagtgctgggattacaggcgtgagccaccacacccaaccaaggagagttttaagagagtcaatatccagatcctctgcttccatggtgctgggcctcagaatatgcctggggtctttggggttcagcttccctctcctcatgtgtaaccag

SEQ ID NO: 1241830 - DNA, 4001 bp, Homo sapiens
aaatggcctctcctatggggctggtcctgccatcaccatcaagttgtccagaacctccctgacgctttctccctgtgctactccaccaaagcttcccaaattgcactcatgataacaaccctagaagtgccttttcagtcagctttaggtcttggagtacgagtacctcttaggccaactttggccagcagccggaagagaggcaggaggatgtcatagtctggaggagctgtcctcgctgtgtctaccagggtctgcagaagagcttcactgccacccttgctgatcatgtagtgaattctccggtctgtgcctgaggggaaaccggaggaaagatgagccacaagtaataatccccattttccttggagcagaagacagacctcccaactagagacagagcaagaattagttcatttcaactacgtaaaattatgtagttcttgaagcaacctgtgttaaagttgtactatcagttaagggaagagggttgtgaaataggaaaatagtggaatatttaagaacctagttgtgttcagctgcaacagctgtaataaatagagcttatctgagattctgttgaatattcagtatatgtatgtatacatgtgtgtacatgtatgtaaatatgcatatgggcttttgaataatcatatacttagaagagagaatatcagtatccctctgctatacatttgaatcttctgtaacaaggattgggatgatggcctaatctggaatcattgtattgatggcataatgattttctgatgctagccttcagaaattgatggaagaaaattacagaaaccactgcagtagtcccttgagaaagaaacatccaatcatcctatctagggaattttgaagacagtctagagctatgacgaactattggtctttctacctaagtacaattttgaacagggacctcctccaccttgcccaaggacaaactcaaaagcaacgatttcattacaacttggccttggttgattctctctatgtacggggcaaagttgacttaaccaaggtggccaacagggtggtacattatcaaagacgaccatctgattttttgtcctaatgaaaagtagcattctctgcaagaggcaaagtaatcaccaccttatcagagggagaacttcaaggttttgtcttaagagtttcagacacctctggacaaatgtaagacagcactatcccagaagacgagtgacttcacttacacaggccccacgtgaaagactaaatgtaagtcatcctgccagtggaacgcagcacaaaccatggaaagaccccaatacaatgggccccttcctcttgaaaccataatcctgaggatctatgggtctggagtgtcatttatttctgatattgcctgttcagtgttaatatttctttctaaagtaatgaggcaagcatacataaaaatgcaaattgagtgaatgttggaatgttcaaaaatctcagtaagaacttgagcgaatagaagcatgctccagttaatccagttgattccaatgtagtcaactctgttatcttatctctgaaaacgtgatgcttacatgctttcaagttcagcttctgcctgatattcctgcctctacttcaaatagccaaagcagcttctgatactcagctctcttaaataggtcacaatggaagcgagcagggcgagaagaggggtagaaccacggagggttactactaaatctaatttcctcctcagtgtcgggtgagaagactgaggagtgcaagtacaaacagtccaggttacttgggtcttattaaccttagagaaaaaagatgggctagtgatgctgcctctcacaggaaactgaagcaagagcaaacccccaggtcacagaggtgcctgggagagatcacagccagcaggctccacatccgccatatgaaagcatgagagcatggcctactcaccaacagaaagcagatctccgaggaccttgaggatggtcaggatggactccttgtcagaggagctctgcaatgagaacacaggcagccatatttaagaatgcaagaggaaggagttggatgatcagggatgtacatggaatggcagagctctacttcctgtcatggagaaagattaactacagcgaaaggacaggcaaggggattcacttggtaagagacccaggggctgtgcctccctccatatttagtcttcagaactcatctttgcagacgtatcttgtagtaacatcagcaagatgaacaaaagaataagcaataatgatttacacagaaaacaaggaagtaaaaggggctttgtgggccagagtagcacaggtctgttatttcagtaggcttggcttatttttatttttatttaagatgaagtcttgctctgttgcccaggcgggggtgcagtggtgcgatctccactcactgcaacttccacctcccgggttcaagcagttcttctgcctcagcctgccaagtaactggggctacaggcatgtgccaccacccctggctagttttttgtgtttttagtagagacaagtttccactgtgttagctaggatggtctcaatctcctgaccacgttatctgcctgcctcggcctcccaaagggattacaggcatgagccaccacacccggccggcttatttttcaatacagcacagaggcaagaaacagaaatccactaaaatgttctgacgaaaagacttccctgactgacaagaatgaactcctccttttctcaggagaatcccagggtggtgccaaatcctattatgaaaaaactctaaaggatctctgcaatgcttgatactctatcctctgttatacagaagagaaccctgaattcagagacagtgtggacttgctgagtctcctgaagtaatacatacagcaaggccagaagtaccactcagtccagtctcccaaaatcaggccagcgctctttgcactgtaagatatttggaggagagggtattttatttaaggcaaagccttaatcttccataagactcatactcctcatccacttcaaaggcctcaataattccccatcacatataggataaagtcatagctcattaatagaatttccaaagctctttatgatcttgtccttcttatgtcttcagcttcattattcattacaacaccctgcctgaaatagatgtttcatcaacacggaaccccttggagtttcctgctcaaaccatgccatttcatgcctctgtaactttgatcacactcttccctcttccagccgcacttttccttacctctcagcctagtcaatgccagctcatccttcaagtgcactccagctccacgagatcccatccaacccccaagctgggtctggagtcccttctatctccacatcactctgggctcagccctgacattgcacttaccacatggtgttggtatcatggtataatcttgcttcccactccacccccactaggtatgaagatatttaaagaagaaatcaagttttgtgtatatatctttccagcacctggcacaaggggtctttcataaaaggtgggcaaatatttgttgaatggaaccaaactgaaccaaaaagaactccaaggaggccatgaagtccaacaacatccccaaaggcacatgatgcctacactttcttcagtcccagccttaagcctccccagggtcttaaagagttaaaatcagacttcaaaatcccagccagggccacctgcttcagcacaaaatttaaggggcattaaaaaaaaaaaaacccacagtaatcaagataaatatttttacaaatcaaaattaattaattgaaaaaatcaactaattgattaacacctgtgggcgggtgtttgagaagtacccccctgagggtgaagaacttggcatctgactgcgctatgactctgggaggggcacccacaacatgcacggggaataccaagacctgaccaccaggggcgctgtcacccagtgctacccagacaggggctctccacatcat

SEQ ID NO: 1241831 - DNA, 4001 bp, Homo sapiens
tgagaagtgaagttttctccactgaaaatcttttattatttattgggcaggatagtacaaatacacaaagacaaacacctttattagctgtaggtttgtggggaaaacaaaaaaacaaaaaaccacattcttgtcactcaaattcttcataccccttaccatgctcgagaaaaccctcgggctcttcatatgaatatggggtaaaaagtaactgcctggcaagtctcaaattaagtaacgtatatggaagtgcttcattaaaactataaaacagcaactctgaggccaataagcctgtactgatttagctccattcacaagggctttccatgcccacctagagtataaagtattatatattttagcattattttaaatgttcaatatttcttgtgatactcagattttctttttatccttctccccacccgcaggcaaaatcatagggtatcatggacataaagatcctaaaaatgagattctcctaaatacattatatgaggacaaaaattttaaaacatcaccgtgatctcacagagaaaatcacatttctgagaaaccaaaatgaataatatcttggaacaatttcaaaacaccaagttaccaactgctggcagccgaggcccagcaagtcaaccacctgacagtgattatggagagacaatgacaacactctaccacaaatcacaacgcctctacctagtgccctgcccaacatggcatttcattggtttttgtgtctagccttctgagcccattccttagcctcacttgaccaaagaaaaaaatcgaaaagacccaagtaataaactgaattgataaatcaataaaataggtccactatttccttgaccaaggcaatatatttccactttgcttaaaatgaccctcacctccacatacaccctcacaagttcagttactgaggttctttctgtcatctatgaaatgcttggttgacttccaatttcccctgcctttgccagaaaattgctaaatttccaaaaagtgctctttgagctgtccaacattcccagactctcatcttaccggctggaggagttcttactaattttagattcaaggatgccttctgtgagcaattagctattcagagtctccgccctcatcctgcttagacaccaaacatcactaatgcggagaacacaaacaaatacagctatcaacaaagtcagaagctacctctgaaaagcagtcaaaccaagccaaaaggtcagctctgccaccttaatagataggtttattggaaatccttccaaaagaaataaatgttgcctatccttcccctaaagaattgaacgagacagtagcagaaaaacagaaaagactcagacaaaagacagaaatacttaaaagacagaggcagagagactgacagagaaagagaccaggcagatgggggtggagtctgggggcggaggggtgacagagacagaaggacaaacagagcaacttggaaggtgaatttctctctctgtgattttcaacagtatgaggttctcccaagcataagaatccattttaatgaaagtaaaattacatttcaacagtaagtggtccaatgctgattaccaagcacctattgcttcctgttcagatattcctttaagaggcttacattcacccctcatcctccactgtgcacagatttctcggcctttctcccaatacaggagggccagggacatggctaccgggttcaaagcgctaaaacagcctgcagagcttcagaatgcatgaggtgcagccccccttaccttcagcaataccacgtccacagtcctgtccaccttggagatgtcacagaggctgtagcgcctcttgtgccgttcatacattttgcccaaatgcaagaaagaacagagaaaatgcaggaagtatatccactgttaacttggggaccagtgcaagtccttagttccaaatttctcacggttaggtggtggagatctctgccttccagactcctctctattaaaactctcaaaggggtcaaaaacaatgaattaaaaagaaatcaagcagaatccaatgccttgaactgactgagaacttgctgataacttcagagtgctggaaagatgaatgtagaactcataatataaacaataaataccacctaatgctatactttgtgcagatcttgactgaaagagaagcaaacaccgtttccatcactggcaatgactccagtaaaaaaataaagaataaactggctaagcataacggccgatacacgtagggaaaaaaacccaagaaggcaataaaaatccagtatatactttgccaggaagagggagagaaagaaaggaagacgacgctatttcaaagcgatggcatgaaaaaagtcattagattctgttcttgcttaaaacaaaaacaaagacaaagaaaatctacttttccttaaaaaaaagtagaagctgggagatgcttttcaaagtaaagtctttggaatctctcttgctcaccaggcagtagggcttggttttgatttaagttgaaaatctctaaggacagcagagtaaaagggaaaaaaataaaagaccactcctgctgtactccctccctccctccttccctccctagccagcctcctcctccctttttccttctctctcaagaacgtcactgcttgccctttcagctccgcacccgcagccttggaggtttgaaaacccaattgcagttgtgggaacatgattcatctaccgagacgaagagaaaaacaaggcttccttttccaacccgcttcttcttcctcctcctcctcctcccacccctatgaaaaaggctctgtcaggcattgcaagatgcagctcagttctttgatgtcagagtagtatgctaataaaggaaggggggtgttatactaaacaccacaagcgtgtacaatggacttgtcgtgaggtacagaaaattgaaactacccaaagcatacactatacctccctgccaaatgcaaagcaatgatttaacacgagaaaaatgtcagccaaatattgcagttatgtctctaggatcgagacgtggctataaatgtgtctgataaagtttaaaaattatcaagagttaagctttatttttggggagggagaagggatgatggagttgatttaaagaaaatgaaaaagaaaaggagtggaacaaaggagttctgtgtatgttaatatttgttgcgactaagtatagctgcctggctgggacttcttcagtgtttctatgcacactaactgggtcttgaattgtgggtctgctacttcatttgcctgttttcttactattccagacccttctagccccccactctatctaacattctcagggacagacttacttcagaatgcattctctcacctgagacattctcttacttggatcatgaatgatttgggagggaaaaggatgaggaactgagggaagcaaaaagcagaaaggagtgaagaaacaaaagaaaaagggattaaaaaaaaaaaaggatttctctttctaggagctgctgacattttccttgagttgtccagagtagtccttagctaggctgtgaaagcagtggctcaaataccacaacagaaggggagaggagagatttaacacctacatttctgttgacattgcaaacaaagttggtgaaaaggtttttcaggagctaaaaaacggatatagaaaaagggtatagatgagttgctgtgtcctcaggccagatattcaagttgctgaccagcttaaaggagggaaatacagcaaaccctgctaagaagactgtaaacgtcttcctcaactttctattaatacaccccagctacatacaggctttattctgaaataaaagccataaggttttatctccctattcctcactggttcatccgaggaatgaaggcggacaacccctccccttctcgtgccccaagtgagccttggctctgtagtggtaccaacatgtgcagtgaaacagatgttgcttttcattacaaatg

SEQ ID NO: 1241832 - DNA, 4001 bp, Homo sapiens
atcaccgcccagagaaggaaagcaactagtgcactcgtcacgtcatgttgtaagtagtacttgcttacattatgtccctccctgacaatcccttccaacctctgtcaacctccttccccacaatcacacacacaaaaccacacaaccaggaagggaagccatggagcgagtactgtgaatcctaaaagcggctctgtaatttaaaagtgcaatggctgtacctgaagaaaatttgtctttagcttcatcaggtgaagaaaattggttttataacacaaggcccaccaaaccagaaaagcccaggaacgcttctccacaggactcacttagcacgagaaatcactctgagcaaactgacacacacagtatttctcaaatttttctttttcatttagcagatggtaaaggaatacaactgaagttaacaataaatgacactctggccattttgctccactatgaatgacagacatttaagctagttccatctggggaactgaaacagaatcatgttcatataataagccacacaaaccaaattaagtgtaatatgtgcacccaaacttgacaaaacttgtacttaatgcagcctgcaaatccccaagagtccacgacagaatacaagaatagtaacaatgatttatctcaactgatcttagcttcttcacaaacttgccaataatgacctttcaagaactgcaccgtttgtcctcatctgcgcaatccaacagttcagaaaaactgaagaaaatgcttcttctaaaaataaaacacttgttgtgggggggactactaacaaaaaaaaaggcacactggtttttactgtactgaagcaataaactctccaaataacttcattaaggagtgtcattagcaaagaatgaacaccaaaataccgctcaatccaattttcattgtgaattccgggatctagaaaattaaatgggacggtatcactctgctataagaactatttccaaaacaaaacaaacctatctaccccctttcttgatttttttttaaaaagttttagggtttttccttttttcaacttcacatacttcgtggctttgcaaaaaaaaaaaaaaaaaaaaagcagtaaaccgtatttaccaaaaaaaaaaaaaaaagttttgtttggtatcaaagtatagctgcaagctgagccggctggctgcacgggtcccagagcgcgtggggaccgcacgggtctcctgggccgctcgcctgcgacccgcgcgggtcagctgggccgcacccccgagaagccgcggagaggcaccgacaggcaggcgcggcccgacgtgtttaccgtccgcgtcgaccccggggagccgctccctcgcgcccgcagcacttgttcacggcgcggactccacggcggggactccacaccgcggccgcccgccccaggggaggagtgagcccgccccggcggcgccgacccggggacccggggcaaggattcggggcctcgctgggggcggagcgcctgaggtagcatcggcggccgggcgcgccccccacccggaaagcggcgacggcctctaagttgggctgcggagtgggaggcgcgccgagccccaagcagacaatgcgggagaagggcgatgcgcagggaggaggggtccgcagacctgaggtcccggcgccgcccggcgacccgtctgtccagcccgcccccgaaacccccgcagcccccgcccctcctccggggcccgccccaccgagcaaccgcaggggactggccgcgctccgcgccccgacccacaaatcacaaaacttcccccaactccgccaactaagttgcgctctcaccgtgcggctcccggggctcccccgcgggccgagctgggacaactcttcaccttcgccgcggagaaagacaataggcggccgctcccccggaggcggctaaagcggcggcgaccgaggcgagcaatgggcacggcagtctcggcagagcacaggcgcttcaccgcggctgctcgggctccgcgctggccctgcacacagctccagtccgcgcatgcgccgaaagacgctcgggagggtgggcggggcacgcgggaaggcggtaacgcctgcgagtcctcccgtgagtacacgcggagcaagaactgcgagctgggattgcacggcagaactgcccatctcgctgcatgagaccaatagtaaggctcctggacggggcactcaggttgctaagggaggctgaggttgaccgccgctgctgctcggcggcaaagtgatcaaagtagggtggctggcagaggctgctctgggaaatgcccacccacggtctcctctccgccctgtctccagaaaccgcccttcctctgtgtactggtggttacctgagctgcagcacttaaccacacatcgtgaaatgatttactcctctatttcccccacttcaactcaggaagtggggtttagtcttctgtgtccacagcctaggaccgtctaaggtattaggtattaaatataggtattaaacaagtgttggatggatgcacggcgctatggcggaatcacaattgtgacagtgcattccgtgaacttctggctactcgatcaccacaaagtcattccgtgttcgagctgcaaaggacctcaaaaatcatctggttgctttgggaaacaaaatgtggtccgtgtaccaatggtgccggtaaccaccggcccacagaggaagggcggtttctggagacagggcggagaatatattagttggtacacgaagaaacttcttttttcaaatagttaagtgtttttagtgcgcattaggagggaaatgcctatcacgtcaaaccactgtttcattaatgttatttcttaggtcaaataaaaagtggcaaaaaacgaaagcacttcaagaaaagtgttaagtaaaaaactgagacaatttatatgcagttgaagaacgtgtaaaactagttgatagtgattgaagtaagaacagcggttaggtaggaggagaagattattggctgggaaggaggaggagggaaccctctggggtgctggttctgtattttgacctgggtgatagataacaaaagtatatacatgaataaaaaatacatccagtgcactttagtgcactttgcacattttaaacatgtatttttaatgtcagttttcaaaaatctggtacaggatattacccccccgcccccaaaagaaaagcaaagatgcaaatgactgccatttgggaaacactgatccaggcggctcactagcagtgaccaaacacctgagaaagggtattgtgaatacctgatgtgtgtgccaggaacttccattgttgaatagctccaaatctcagaaatgctcctaatgttgagctctggtgctcacatatattttctctttttttcttttttctttttttttttttttttttttttgaggcagagtttcactcttgttgcccaggctggagtgcaatggtgcaatctcagctcactgtaacctccacctccagggttcaagcgattctcctgcctcagcctcccaagtagctgggattacaggtacccaccaccacacccggctaatttttttatttttagtagagacagtgtttcaccatgttggccaggctggtctcaaactcctgacctcaggtgctccacccacctcggcctcccaaattgccgggattacaggcatgagccaccgcacccggccctattttcttaagtaaccctcaccgaatggctttaaaaaaaaaaaaagaaaagaaaagaaaggccaaacatgcccagttcttcatgtgaaattatttctgtatcacttcatcatgctgctcaccctcttccactgttctctaatctgtccttgttgatttttaaaaactggcacaaggcctggcgcggtggctcacacctgtaatcccagcactttgggaggctgaggagggcagattgctcgagcccaggagttcgagaccagcctgggcatcaattgaaacgccatctgtactaacaaataca

SEQ ID NO: 1241833 - DNA, 4001 bp, Homo sapiens
agaaaagagagagggggtagttagggagtaagagaactggaagagcttccaaattaaattctgaaaaacgtacctattgcatacctaaaatttctttcagaggctgttagaaaaatcccatcaaaaataagactaaaatcaaaccttcccaaatctgagggttaggtcttttctcctgtgtagatcttccattttaagacctttaaaaagagcctgaagaggttagagaccctcataaaataaaacttctaagctgcatgctttccctgctcgttcctaaacccagacaagtgccacacattggcactattgttatgcaaacaatgcctaaaaggttataaccattaacgacctctcattaaaacggctttgaaaaatttgtcacaccatctaaaaaagctagcaggtacattaaatccatctaaatcgacattcaaaacacaaatcgccctgatttgtaacctaaaactcaatgcaagtaaaatctcaatattctgatgttgtttcttgtatatctcattcaaccactaagccagatgcaaacaatttacttctctacaaaatttatcttgtaaaaaagcacgatggaatacatctttaatcaacctttaaccatatgcatgtgcgtctatgcgtttgcgttaattgggagaagttgagtgtagaaatgtaccgaaaggactagaaaatcaaaccagagaactacaaaatgaactccaagaaacgtggttttcaatcccatctctctctcaccacctccctcaaaatgttgtaacattacaatacccctacgtttgtaatcgatcattttttttctatgtcgaatttgtggaaagtaaattcattttatattaggtagcagacgcatattcttttttaggcgatgcaacaacaaaaatcctgcttagcaaacccaagatgtcaacgttcgttataaaaaaaaaaaagtaagttcttcagttcaaaaccgaacatgctaacaaatattaaaactttttaagtttcccagggaaactgccgctgcctacaaaattcacatgaaacgctgacgttggagttactgtacttatcagtcaggtttccgtgaaatttgtcaaaccggccagagcgctggtgtcttgacaattccttacgggaaagcccctcagcaccctccgggctgtggaggacctgattgggaccaacagccgaggggcccggaaggcggaggaccgagaggcgacggccaggctgcgtggccaagctgacggggaaccccggcctccatctgaggatactaagcggttccgacgccttcccccgcggcagtcgggaccgggagaatcggacagaaaccagcctcagagtccggggcaggagccgttgacggctgcccctcaacgctgcgcttcgggttgggttaagtccccaaggcgtcctcagaccacggcggggcttcaaacgccccagtcccgaagacaggcagggggtccctctgctgcgccgggatgacaggctggccccgacgaccccggccccgtcccgcagccctcacccgctgaagagatcggggaaaccgaagaaggttctagaaagtctccgtggacgacgggcgctgggcggccgcttaccttggtgtacttaatttcgagattgggcgtgggcgacggcaggaggtgcagcgacgccatgagggcggcggggtcggccttcacctcgccgggcatctctatcttgctggaagtcatggtggcgggccgggtgtccctagcccgcggcgtggggcagtgcgggctgtgcgcgcggtccgcggcccgggggcgcgctcgcctgtatataggcaggtgtcaagctggggctcttcttattggacgtgagggccgaggcgcggggggctggtccatcctacctaggacgcccggcgcagcctccatttacataaagcccgcgccgcgcggccgggacgcttggcgcccacggtcaagtccgcccggcgctcccgccccccggccgcggagaccagcccacgccgcctccacagtcctcgacggtgggagcggaacttgcgccgcggcccgcgggcctcggccagccggacttggtctccgggtccctgggtcagagtcggcgggaggcgcacagcggccgaagtcgagcgagggtcgtggcccccggaagcggagctggcaggggctggcggggaccggagcggcccggtgctgcttcggagtagagaaaggccaggaaagtccaggctgcggagggcggctcccagctcgcccacgttccctcccatccccgtcccaggacccaccgaaccccgtcccccttcctttccggagacccgggagggcgtcctccgttctcctcctccgggcaggggcgccaggctctcggcagctacgccctctcccccgaccccccgactcccctcagccgggccgaggtgcatggtggccagagggtcagggagaggtggcagtgggtgcgagtccccctcgcctcgggctcagaatgaggatccctgcgagcgggtcagcgcggggcggcccttgccaggcgtcgcccgcccagttgctgccctctgccggccgggaccgcccgggcggcttgcgctgtggcgggaggatatgggcagtgatcatccccggctcctccgaggagctgcatgcttcgtgggctcctttagttcttctcggatcccctcttccggctgtttcccctcctcacccagcacacccacagaaacactattttgtttttctgttgttccttacacgctaagagctatcgtcccgccagaccttaggctcattttactgtccctttgggattgagtttccatctcccccctaatctaagtgtttccaaagtctaacaagctgccctctagtctgtggatcggcctgcaggtgtaaaccaagaacctagagaccctgcctcagaatgggctttggactccgtggactaaatcaaggccgcatggaaagacctgcataagtcccttcccttccttactcctcactccaaatgtaagcttgacaggggcctacagtgttgataaacgctttttctacactaccaagcaacactgtgattctcgtctttttgttttgtttgaagagacagggtctcactccttcactcaggctggaatgcagtggcaccgtgacagctcactgtgatcttgaactgggctcaagtgaccctaccacctcagcctcccaaagtgctaggattataggcatgagccactgcacccggcctgattctcatcttaaatgccatttttagagccgctggagtcccatttcttgggcgttaagaaaacattaagcatcagccagaaaacatctttccttagatactttgagtaactaaaactgcctaatgctcagcgctcagatgctaagcaatagtgaaaacagacaaaaatatttcattttagtattaggtttatagaaataagttccagcctctcagaacccaaagtgacctgggtgaatcgttttcatggagaaactacagaccttagcttgggcagtcgagggatctgtactcagggaatttctatggccaaaaattatgacttaataacagtgtatgctcataagatatacttttatcaaagccttagaaggttagagatacaattgagaaataaaaaagtaaaatcttagagttcattggggagaaagagagggttccagcaagggggaacagtgatacctgtggaaaaacttatcactagttatgagaggctgtggggaaaacatgaaaaagagccataacaacatgagctgagtgctccaaggaggacgcctactccctgggaaagctgacctttggctgggtcttaagggagaagggaggcttcaacaagagcaaaaagaacactatagaaaaggtatagaggctgggcacggtggctcatgcctgtaatcccagcagtttgggaggccgaggcgggtggatcacttgaggtcaggagttcaagaccagcctaaccaacatggtgaaac

SEQ ID NO: 1241834 - DNA, 4001 bp, Homo sapiens
ttgagagtgtttaaaacaggaatctcatttaggtgtggtaggaaaagagacctgatcagtgagacacagagaagaaaaagaaaggcatttgagttttattatatgaaaatataactggagaaattaattaatcatcttctagcacagtgttaatccaatgctatagatatcatatatctttagctcaattaaacagtcatttattgacaacctatgtgccctcatttgccatttatgtgctaagaaccatgctaggattaccaaaaaaaggtaaaatacaagtttaattctcaagaaaatgataatccagtgaaaagacaagtaatgtgtcccaaaaaacttggttttgcatgatattggtatgttagccagaaaaatggtgatgagactcaaataagcttgagaagcatttagtaggcttttcctgagcctttaatatgcccagtgtcttgtgaatctgcaaggaggaatttcttcaccatgaaacacctttttcacagtatgaataaacacctcattggaagagtattccctagagtgccagattagaaaatatttttatatacacataaatgttatatatagctagaatcccaaaccatttccataaaggaatcattttgttcccatactatgaacagattcctgagggggatggtagaagggaagaactatggtaggagggacactgagaaagggaaaaaatgattccttccccagaagcaagcccaatagtgacctattttcccaagtaggggaaaggatatagtactcatggcttgaatgccctgactgaacaaggaaaccctaaatattcattgataccaggtggagatcccaaatgtatagtgcatacattcctaaatgctttcagtttccaaaaagtttatattctctaagaaattgacttttattttaaaaacagcaacaacaacaaaacccattagggcaggagaagttcgttatgtgaggaaaatcattgttttagtgaaaggaagttgctatctcctgctgtctctcctttctactggctcacagaatgacagggcaaacggagcagaagtgtatgagaggtccgtaccatcccctctggttctgaaggattccttttactcaagagaggttaactctggggaggtaaaaacttgttctatttcattctcataagaatcatttgatactcgttttctgcaagcagcatggtgactctcttgttgcttgactgtttttaatttgtcatggggagggggagttttagaaaagaaggtacttaccagtcatggcaagctccagttttctcttcaaaattcagtgagaaaagatattcagctgatcctccatttctccttctccatctgatccccaaatccaaacatgtctcatttttcatatgtattacctattcctttgctttttccccaggtctgcttcaaagtatccttttaggagctcaagaccagcctgaccaacatagtgaaaccccgtctctactaaaaatacaaaaattagccaggtgtggtggcacgtgcacgtaatcccagctactcaggaggctgaggcaggagaatcgcttgtacctgggaggcagaggttgcagtgagctgaaatcgtgccactgcgctccagcctgggcgacagagctagactccgtctcaaaaaataaaataaataaaaataaaataaaatacagccgaagaatgtaaatttcagcagaatggcaaatgtgggttaaagacttaatgttttcttaggttacttactgcaagaactgccctgtcccgttccaccaagtctgcaagcttatccaacagacgtcccctttctgaagcatccatccttctccacactgaaccaagagagaaagccaggcgggctgcctgcactgctttgtctatatctgcctgttagagaggaagaggcacaactgaagaaaaacactccaaataaaggaagaaccatccactgtcatgaaaaaagtgaagcatgagcatgtagtggtgtactgagagcatatgtttgctgctctgctgtttgaaggcagttatttcataggaaatcttttatctacaaaagacataccttgtctgcttcttgaacttcacacacctgttctcctgtggctggattatagacagggaacactctcccactctctgagttctgccactcgttgtttataaagatctaagggagtagataacagaatgggatctgtgacacaggtgataagcagccagtcaacggccaagtgttacggaactactatggtaataacacttgttgtataataaaagtatacaatttgaagtgttttaagagacccttctagactcaacgccaatttaggaatttcctctatatttttgctttaacatcatccaaaggctaactacagttcttacctttcatgaacctgtcaactaactaaagatacaaataaggatagagtgtctcacatacatacaatcatacactgatgctaaggcaagagttatcgatagcccaagctctggctagtatccatgagggttaaatagcagatcaaacttacagtcatcaagccttagatcctactttctctgccacaggcctaagtgacttctcaaggaaacttgaatggtgctgcaataagcattcacctaatttatactcaggtcctgaacaatgactctaaccaaactaactagttagttcaacaagttatatgtgtaaatccaagttagatttatttccctttgctgaataggctatcttgcagagccaaaaaagatggggatggggagttagcaagtggggtgtaattttcaaatgatcaccccaggatttcttaaaaggcttggtctccctatgtatgaaattgagattaaaatggcaaagagactgaagatttgggaaattattcaagtcaatttctcacaagatttgtaataaatgagttaaaggacaagggaaaagaaaaggccagaaaaattttaaattcttattgagtgagaaacctaaactaatatttttagaccatgtaatcttagaggacatacgaagatgttttactctataaaatttacagcaccacagtgaaatttctgaacttatgaaccagtcagtcatctaatttaggacaaaaacaatgataattatttagtgcctgccatttaaaaaataatcagagatgaggcttaataaatataaatctacacttggtaaatatcaaattctagaaaatgtcccaaagctttccttttacatgttttccttgatttgataaaaactatgagcccatgtagaaggaggcactgattaaactataactttcttttcccaaaggatttttaagataaaggaaaataccttaaatttgtagagcacttaacacagctgtattgatacaaacaaaatgaccttgtaattgtacattttacagtttataatacacagttcataaacacatgtaacaaaatttacccaataaatactcagataacttctagtcacaggaaaaataaagatggttaagagagttccagccctccagagtctgacagtctctagtagtttatttagtacttacaataaccccgtgaagcagggttttctctctattacacatgagaaaattgagaggcagggagcttgagtccaaagaagcaggttcttgttgtggctgactcaacaatgtgttctttccaatacacataatttccaggattagtcagcccaaagaaacagaactagttaatgtccaagcctgagctagttagaattcttaaattattggtctggttctcttttcattcactctatttaataaatttgctcacagctgatagctcattacattttcatgctcctttgaacacagtataaagtccaggtaacaaaaggagaaaattaaaaagttagtttcattaaggatccacttcttgggtattatcaggtttagggaaaaagtggtcttacccatgtccctatccttttattcaccatgtgactgaatcaaactt

SEQ ID NO: 1241835 - DNA, 4001 bp, Homo sapiens
ggttccctttaactggcaaaggttgcgcacccaccaagacaacaggcaaccattgctctgtgaattgtctaaggtctccataagggctacatctacactttaaaagtgtcctaaaaatcatagagaaagaggtaaactttttgtatgtggtcagattgctgataggactcaaaaacataaaaagtaaaaggaccataatacatttactgtctggtttctatatacagtattttgaaatcctgtacaaccaaaagaaaacaaacaacctccccacttaaccatcagtagcagcagccaagcacctggggttagggtcttacaaaattcgggtaccattttcactcttcccagaattcgtgttggaattttcactctgaagctgatattacaaataaaactacattaagaataatttccagcgtttagtttacagcgacgtgtctttgttgattacagagccttctgaaaacagttaatttaaatgtcttgtgatcagaggctcagccgacattgggaattaagtgccaagagacccaaatctgaaggccacacatagtgccctgcaactttctccgcttgattaaaattctttgagaaagataattgctacttcttaaagtaaaacggatgaggaaattctctaagtgcggtgtcagctggagttgggggctatgggtaaaagcaaaaatcaagagaagccaaaggtggggaaagttaaggcaatggctctcggcctggcctgtgcctctaaagtgccccagcaccggcccacgacagacgcgcacgccagacagcctgggggtgtcctccatcgggtcgcgctcccggacccgggtctctcggccctcctcagccccagctcagaggcctcggaggcctcaccatcttcttttattcctttctgccccgggcaggtaatctcgccgttctgccaacgctgtagcctcccagcccacagagcgaggaggcagagaaccgtgcgcttctgcggcctcgcgacccaccgcttcccaaaggcccaggtctgcgaccttccggagcgcgcgccttgtgtgtaaacaccgggacctctgggctccggggaggtttcgtcagtaagcgagcaccttcctactcctcctcgttctgctgctgagccgggtataaactaagcacggaaggcgcccgctgcgctttgctcggaggacccgcttccccagtcttccaactgcagctccgccatctgcctcccggactctctcttggcgctctcggaccctccgaccctctcaaagccagactcgtccaccctggaaatcatcgcaggggtttttggggagggagctccccaaaaccagcgcgctccgagtcaacgcggcgcgcacctccactcgcgatcaaagcgggcagcgcagggacacgtcggggcctcgcagggatgcgggcggcccggccccgcgcgggcgctggacggcctcggtttcccggcttcgaggctcacagcgccgagccccgccgcctgcgatcccgcccgagacgtcccgcgaaaggtgcggtttctggagagccgcgcccgggcagggaggctcgggtctcggcggcgcccggcggacccccggcccgctgctccctcgcccccgccgccccgagtctggctgcccagcgcaggggcccgcggccgtcgggtgggaggggcgcccgcctcaccttggtgaacttgacctccaggttgcggatggggcgcggcagggccggcggcttcctgtccggctgcccgttttccacggccccgttagcggtggccatggctcctccgcgctccctggcccgaggcgccctagtctgcggcgcaccggctcggcccggacactgcgcagcccgctcccggggtggcagctccccgccgctttatgcagcgccccacgcctcccgcccgagggggccgcctaattggctgcgggaccggaggaagggagggcgggctgcgggagggaggagaggggagggcggccggcccgcctcaccccgccccgcccgccgcccctgcgggagcccgagcgccggcggctccacccgcgtgccgcggaccgtcccggcgcccgcgccgcgcgctctctcgccccggaggctgcctgtggacgagctccccgaggagccgccgggccccggaagtcgcagggctgggacacccgacccggcagggagctgagccgcggggccacggcgccccgctgcctccccgaagtcgggcgggctccccgcgcggcacatgcagcccactcccagccgccgcacggcgcgctcgcccgacttcggccggctcgcggcgctcgggaatgcgcgctctccgccgggccctgcgccgcgcccgggtcggggctcctggcggggccgccccgcgtcgctgcgcacgtgccctgctcttgggtccagccgcccgatccccgctagcaggacagacgcccgctgcgccccaccctgcccgagcgcggacagccggcgggcgcaccccggcccagccggcctggagtctccccggggccctggggcttcgcccgcggtggggcagaaggcgaaagcaaagcgccggacccgggcggctctccgccgaggagccctggcgccgctgggcctctgaccttcgcaggcgcacaccgccttccatcccagagcccggggggcaattgatctgattttttaaatgcataaattatacctcgattaaaaaatgataattaaaaaaaagcacatgagacctttgctgctaatcgttttaagagtttaaattcttgtcgcgcattacttcccaggagggggaggtaagtctagctcctctccttttgcgatttgggaaacgctccatcaactcccaggacttgacccaggccccatctgagacacggaagcggcttctgatgcatgccattcctcaggtcgctggaacaaagaccggaggcacggactcctgacaaaagctgtgctttaatcctcagataggctcagccccttcagttcatctctttctgtaggtaaccccaagtaatcaacaatggggaggggtctccttattttcctgttttgaggcctccgtgtccatctctctgtcccctggtgtccttctggatagagctggatagaggggtaagttttgaagcttttggaaaccccacatctgacccttaccctggggttgtggaaaggtcttgtgctgttatggcctggagtgcacagctgaggccggggaaaggggataatggaccctcgagcggggcagccttgaccgatatcggctggctaacactggcgagtctgagcaatgccagctctttcctcagctgcttctgcaaatccggggctccctgccctcttggctggccccatggctcccactcagatctcctgaaaacatctgggcagatgtgctatgccacggcccccggctgggtgctgagccctagcgtttgggtgcctgagcccaagaggaccgtcagggagtagtgacaaacccctcctgcatggatggaggccaggggcccaaggccagtgtgtgcagcaggccccaggaagctgcaactagagatgctttacaaactgaactcccatcctgagactttatcgggggtccttgatggttgaaattatgtcactgccaggattttaaaaaaaaatctgaaataaaatttatagaggaaactgtgttaattaaataattgctggattgatgggggaggcaaatggggttgagcttagaactctgctcctttagggaagatagtcgagcctgtttggtcaaagatagacagtcaccactttgttggctatgaagtcaggaatgaaagccacctcacctcacactcagacatccttgtgacccgaggcgtctggtctcaggagccagttgcaaagatgccgactggctcacctgcagctcctccgtttgatacccacgtgatcctgggagcctgagatcagactggagcactcagccatagactttgtcacagtaggtggctcccagagag

SEQ ID NO: 1241836 - DNA, 4001 bp, Homo sapiens
taggactcagccaattcacgaggaagtgcccaggacttttcctgaatgtcctcgatgcctgtttttatgctgttttaggaatggagaacaagaggtctctggacagcctcttggaggaatggccgttttctgcataatacacaagtcaagttctcaggctatgaaacaaccactatctcaacacatttccctttggaaaacagactccagaagtgaagggaaactgagctgcccacagggggcaggaagtgtctgtctccatggcaatgcgcctgtccacgtgtgcctgtgtgcctttgatttcctggatgcctgtctattgtctttgtgtctttatatctgtgggtggcctagctgctaaaacaaagcttccacacctcttgaactcttggaagaccagtgaagggctcatcagttccacacctcccttggcatttcacttccccaaactggacagggcacttggctccctcagagctgcaagtccttaattcccaacatctccagacagtacctcatcccaccccctatctcaccagcccccactcaggtcctggggaggacccaagtcctcggcccagtagaggaaccttatttacaaaggtttatttcttcctggagaacctccccaccctgagctaagcagctcctactctgggcagccccccagcaccctctccctgtccccaccagtgctctccccctcccttcctgccagggaggaatttcagccactctggctttccttatcgctagctgtggaatcccaagccagggagtagcagggtagggggcaggggagataaggaaagccttcagaccccatgaaatcactccaaagtggagcctttgtcctctcttgagcctcgaattgccagaggcctgaggcgcatggatcaggaggggtcacaaggggctatgaaagccattccagcccggccatgtccccaggccctgggccttggggctgagagggctcgagggcgcaggcccagcccaggcctccaggggccaggccgccctcacagggactgatcccagggcatcgccggcccgacgccgccctgccccttggtgccacttacctggtctcgggccgcacgctgagcaggtagctccggctggctgggctggggatccacacggggccgtcgtcctcaccgtcgccccccgcccccgaccgcccacccgcgccccagccccggctgggggccctccgcgaccccatggcaccgccctccccgaccgccggccccgcactcgccgctgcctcgcctgtcctccaggccccggcccccgggcccctgcccgccgccgccgctcccgcccgcggctgacgcgcgcccctatttatagccggtggccgggccgtcgtcacctgctgctgtccctcccctggcctggcccgacccgggcagcgcggcttggagacgccggggggcgccggggcccatgtgcccgccccagggccggctccgagtccgctcccttggcggccctggtgtctgcagtagcgccgcgtctggagaggcccgggaggcctcgggaggaaggcgcagcgggtgtcctggtcatggaggacaggccccttcgtggagctcccgggacccggctcccggccggcctgctcatgtcccgtgtggcatatgaggggtccacgaggcctggccggggccaggggagccaggtcaaccgctggccagcttgggctagaccgcgggagaccagggagccaaagaaccagccctcttcctggcaccagccgtgactgaccctcgccttgcctcgccagtggctgttggcccagcacatagacaagccaagccacctccattagtgacctgagtccctgggaggccggaaccccgtgggatctctctcctgtctcccccaacacccccagtaactagcatagattaggggctcaattaacacttctagatcactccttcggcctccatttctcagcaccagagggggaaatgggctgagtcctgatacccagaaaaataatcaaatcatgcaacaatttccaagaactagtgccaagcactgccgaaacctggtctaaatattggaagtccccacagactttttttttttttgagacagagtctggctctgtcgcccaggctggagtgcagtggcgctatctcggctcaccgcaacctccgcctcccgggttcatgccattctcctgcctcagcctcccgagtagctgggactacaggcgccccacaccacgcccggctaatttttttctttgtattttttagtagagacggggtttcaccgtgttagccaggatggtctcgatctcctgacctcgtgattcgcccgcctgggcctcccaaagtgctgggattacaggcgtgagccaccgcgcccggccggaagtgcccacagacttttttatccatccttctttctcctattttcctgagagcatccagaaagtacctgaagctaaatggctgtaattgttagaaagtgggagcaaaggagtccaacccttctgttttcgaagctgcacccatccctactccttttggaaatggctttcccctactccgtgtggttccaatggcaactaccttgttcccacatgatcccactcctggcctcagctgactgccatcaaactcaagccaggctattcacggtacccaatctccctgactatagaccctggctgtgccaataaagttcttctctaaaacatttttaactggaattgggaaagaaaaccagaccctctgtggtggaaaactgagctgtgaggccacagctgtcagcagccatgtttcctgccctgtagagtaagccagtttacagtgaggaataaggaagctagcacagagagaagcagaggcaaaggacacagggtcctggtggctttcaggtgccctcgttcaggtgttcctgggttccagctttgtccctggccttcctgcaggttggcagttcaaactttccttggaatctgtgtaccaaaaaagttctccctttgctatttccaatttaggcttctgttggtagaagtatcctgaccaatactaatgtgttctctcctagtgatcccaaattcatctcttgatcacatgtccccattcattcttgctcttggctctctggaggtgcacagaatcttcagtcatctacagggtagtctttcaaatatttgaaaacccacttggagttctggttcatttgtttaaatcgtgtatgctggttcaagcagcagagaaaaaaagggggtgggtgggaaagcatgtgaacactcatgggtcaggttagggcacaggtgctagaggccggggtcacagggtctctgcctgcaagaagctcacagtctaataggtgggacaggcaacatacgatgcaggggaaaacatacaattctaaaactatgtatagggaagcaccaaagtacagagaaaacagtggttagttctgcctgtattaggacagttttacaaggaaggaagtaaaacttgagaaggattttgtaaattacgtaggtcctcgccaagtagactgttatgggtggggagcaggaggaaccgaatattccagatagagggaacagtacgtataaagatatggaggactgacacagcccggtatgcacgtcacttgagtatgaagtcgacaggaaagtagagagaggatgacgaggcaggggctagagccttgagaccttgcctagcacaatggggactctggacttcccttccaggccatttctcatacgacaatggatatggtgccactagttacccattccaaattaccaatttcctctggaaaatgtggcccctgcagaggttagaccatagcaacctacaactaaattcgcacctatattaagggtgggtctgggctccagacattaacaacttccctgacagacagccaaattatttcactgactcaatttttcattgagcctgtgagttttcaacaaaaaccactgttcatcaaagtcttccccactccta

SEQ ID NO: 1241837 - DNA, 4001 bp, Homo sapiens
acatactagcacagagacaaatatttgctggccctttccatagtcactgcagggcaagtgaccccatagcctgcatgtttggtccagtatgaatgtctgaacccagcccctttgtgtatccagggacaggtgacgagtgtcttggtagggaaggctaagatgcactgaggtgagagacaggcctgccatgcagtttgtttttctagataaattccacacagtcttctccagatgagaaagaggatcttgagctttctggggcctcatggatacaacctgtggatctcagagttgctaccctggggggcaatcacacagtcctgggttcaactctggcttaaccacttcctagctgtgttaggcagtttcctcatctgcaaaacaggagtgcgagcttccctacaaggttaatatcatgattagaaatgagatatgaaaaccccctggcacagtgtctggcacataatgaccacaccgccaccaccaccaccatcatcatcactattattcctccaaggcaaagggtcaaattctggtagccaaagagagctgccacttcagatgtgagcttacagaggcctgggttctagtaccttccctgccactttccagcagcaggatcctgggctagtcacatcccccttgtaggtctgtttcttccattgtaaaactgggggagggtgaagaaagagatctgtataggtcccttcctgtctggcaccctctatcttatgtgcagcttagggggattggcctggtttgtattggcaaacagccaggagttccaatgggaagccagcagacactgcatagggtcaggccagagaaggttaagttagaatgaaatcaagtccagtctcatctcttccatccacctcccatccggcaccctctttctggccacatccaatacccactgagctacctgagcctttgcccatgctgggtctttgtccagaattctctgccacacaccccaatgctccattggtacacattcttcgcaggcccactcaagtgatcctccgccccaggcagaaccatgtacctaatcttgattgagcattcccacccccaacacatccctcagctgagtagatgcagtgtgccagcattttggacactataggtctcaaaggaatccagtgagctgcactatgcgcttttgagggaaagccccgggattcagctgtcaggattcagccagggctgcaggatcaaggactcacagtgcagacaccgacacaatctttctctcccctctcccagacggtgcagccaaagctgccccaggccagctgatgcccacacagacgctgctgcccggcctagaggccctggcactgggcgcactccttgagggaggttcggaggtgccctcattccacctgtggccagtcaggctcctctcctctgagtgcgtgccccatctgatgcggtctccactcgctatccagccccagcattccgggtgagctgggcccttcagcacttctaccactcaatggctgtgtgaccttgaacaactcatttgaacaccctgtgcctcagtttctcatctgcgaaatgaagataacataatgtcctacccatatggccgcagcgaagatcaaatgacgtgcctctcctgggtcaaggcctggcacacaaagtacagcacgcagtcaaggatcgctattacctttattatttgtagctaacctctcagccgctgctccccgctcacctggcgggtgtggtccccgagtcccagacgcactggcaaggtcccctcggcccagtgcgcggaccggtaaccattccgctcggagccacacagacgccccacacggaggtggccgttcggagggcgccaacctcacccctggcactccccaaacggatgcgggggtcctctcggcctcggcccgcccccctccctcctccaggcagactcacggccgtcggtctcccacgccagctcctcctgcatcctgccgctccgcagcccctgcgcgcgctggtgcccgggcgcgaggcgcgcgtccgccggggcggggcccggggagccgagaggacggggcggtcgctcctccagactccacgccccgcctgctaggagcgcagctgccccggccaccccagtcccggaccaggacgcaggtccctcctcctgctctcttaacctgcccacccctccgcgcccgaggccggcgggtcggggccacgccgagttccgcaggtgtccctgacccagtctcctccccgggagttcgcccagcctccccggccctggagatagatgcgcacaaggcatctggcaggctcatcctcctcgcgcctctcgggactcggggaggagggctgagccttgggcccgccgcctcaggcgcagaaagtcaaaccccaaagatgtgagctggcgtttaagggaccacaacctcagcaggtctgcaagcatatgaagagatggtcggatttatcagtgttcagaaagatttatcaggcccataaagggacatgtaggaggatgttggttgctgtgttgctgtggttgctgggagttggagacaatctaagcgccctttcttgtaagagcagatggataaactgtgcagcactcaaagcaagggacccgctgtattcgtggcaatatggatttaaacacctagtgctaggcagaaaaagtaaataaccaaaccaaataagacctaggaaacaatatcaataaaaatattacaaatgcatttacatcaaacaacacagacttgcaaagacacatagaaacaaaaagatacacattaaatacaccagaatgggttgcacttcagacccttgggggatgtccatgtcctttttgccttaaaggcatttacagcttctttgaatttagggataatggggtctcaggcatctctatcccaaggcaagaagccagcaaagccatgataggtgtagttactactactttggggatcaaaggaggaagagcatctttcagtcattagtccttagaatatagttcaagaaggcttcctgaagaaggaggtatttggaatggcctttgaaaaataacataatgataacagctaacaattaatgagccctgagccaacccctcaaaatggtctcaaaataacaattccaacataataatcaaagatatgatttttttttttctgagacagagtctcactctttcgcccaggctggagtacagtggtatgatctcggctcactgcaacctctgcctcctgggttcaagcagttctcctgcctcagcctcccatgtagctaggattacaggcactcgcccccacacctggataattttgtatttttagtagagatggggtttcactatgttggtcaggctggtgttgaactcctgacctcaggtgatccacctaccttggcctcccaaagtgttgggattacaggtgtgagccactgcgccgcacccccccctttttgtttttgttttttttttaagacagagtctcactgtgttgcccaagctggagtgcagtagcgtaatctcagctcactgcaacctctgcctcccaggttcaagcgattctcatgcctaaacctcccaagtagctgggactacaggtgtgtgccaccacacgcggctgatttttgtatttttagtagagacgggggtttcaccatgttggccaggctggcctcgaactcctgacctcaggtgatctacccacctaggtctcccaaagtgcttggccaccacgcctagccaaagatattattcctgaaaacagtttaaatgttttttgtaaagcttttgtcacatgtacatcccactaggggcatagtgtcacgttactgttttagtcacttggaatagttctttatgtggttatgccaccaactcaacatgcatggtttatttattttgttttgcttttgttttttgatatttttaaatgttaattttgctttacaattatgtaaagtatttacatgtttcaaagttaagtctctgaaggttgtcatagtca

SEQ ID NO: 1241838 - DNA, 4001 bp, Homo sapiens
gagtaattttgggcaagcatcattttgccaaacaagtagaataaccccagtcctgcctacttaacaacattgttataaggatcaaatggtaggcaatatgtccacactctctataaagtcctgttaaaaaatctaagaggctattacacactgaactaagctcatccagaattcctcccactgagccccgctctgtgcccagtccctttggagtgtgctgagggaagtgttcaccaccaattctccttctcttctaattacctgctccttcctttcagcccctaacacccaaccacaattcccagtttgccagtctttccacacatatgatctccttggccaccctcccctgacacttttgcaaggaaagcattatcaagtatttacagatagttaaaatctgaagttcagacacatttagtaattttgtctaagggcacacgtttttaagtgctacagctttgatttaaactctgttcctctgatcccaagttcagagctatttcacgcagggaattccactcaagcacatcctcccaccactgcaatctggcagcgtttaagagcgcagccataccatttgctagttccataaacctggacaagttactcggcctctcttgcttcagttttctcatctgtaaaatggggatactcataggacacaaatttgtggtgcactggcttagcacggggccttggcacatggtaagcgcttaataaatgctagatttttaaagaagtttgggtacaccttccgaaatccggggaggccacacagtttgcctgtagttttcgcggaagcttgggagatatctttacactccgcctcttccttctgcagtcacgggaagcagttagaagcagatcagaaatcgaacacgtttgcttttgcgattcgagagccctttctggcgcggagctaggggcggtgttacgtagctgccctgaactgagagcagcgttggccgggggctagggagccgggctgttccacgctcactgtgcgcctcgggcggcggggctcgggctctgtccgaggtgctgaactccggggctccggccgcgccggcagagtgtgccagcgtccattattgccagtgtctgtgggcatcttccagaaggccgagcatgggggtcaggtgaaaccagggcggtaagtgcttctcccatcatttctcagaaatgcttaggtgcctactttttacaatttcgtgcacattttcaggatcataacctctcaccgccagttcctcacaggtttctgcaaaaactgacgacctttcttccccttcagtccctgcaaaaatccagacacctatcacccagccccgctccgcaaccatttcctacaagaatccaggcccctacgcatctcatccccacgcgtcaatgcaaaaataaaaaatgttaaatccgccttccattcccgtctcccacaatttcctgtgataaaagcaagctgtctcctaccagttccccactcctgcctgtggctaaacagcatggaccgacttctcgggagctcgaggtccccacccgggtgaccaatgcagacccctgggggtgcgcttacctggtggggacaatcgccgagcgaggccacctgggtccaggctataggtagtgtcattattattcccaaaacaaaatcagggggcgtccagcacccctacctgcagctgcgggttggctgccagagggcactgccagactgaaccagcgccgggagctggggctaccccgggccccgcgggtcctgttgagtcacttgcccagaacttcttcaaggttcgtgaataaaacctctgcgtcagttccttcaaatcggtccaccgctcctccaagttgcggtgggagcaggggagttttgggtttggtttggtttggtttggttttaagaaaaagaaagaagcatgaaagaaagataggaatcgcccccggttccgcgctgcgggtgtgcaggtctctgcgcagccccagacctccggcttggtcttcggccggctgtgctggctgacgacgcgctgctgcccgctggcgccgagagcagctctccagccgcgacgggcgagggttgtgtgggtgtgcgagctgcgaggaaggaggaaggagggggccgcgggggtggggaagtgcctacctgcagcctcggcagaggcgcctgctgccccaccccctcgaccctagctcttggggctccgactcgctcagcaacttagcagggggctcctagactccccgagggtgagcgcggagcaggcgcggccactcctggggtccggagaagtgaggggacgctcccaaagtctgacgttgcaggtctcagaccctggcaggaatttgaactcgtgtcccctttgttctctctgcggccctgccctcctcggctttccttcacacacgccctggaatctcaggctgtctgtccaaggtgtaggaaagagagggagagaggagggtgcagtgcgatcctcaaaactgggaataatttgatgatcagggctggttccacggccgttggatttcattccaaatcaatgttttagcccacccgctacctattcccagggcctcctgtggagtcgttcgcggacaatcttcgtttcctttttacaaagtagttaatagttgctgcatatgattgaaagcataaggcattgtatttaggaagtaagtggctcatgcttgtaatcctagcgctttgggaggccaaggtaggaggaccgcttgaggccaggagttcaaaaccagcctaggcaacatagtgagacttaccaaaaaaaaaaaaaaaaaaaaaaaaaaaaaaaagtctctacaaaaaaaaaaaaaactaaaatgctttccaaaaaaaatagaaagtgagtgccccctcctcccctaccctgcagtgtccttcccccactaatcagttccccagaggtaaccagcattttcgtctagatacatgtatatgcacacaggggttctatttgccctatgttttttaaatccctacttcttcagtcatttttagtaatttatattttcctaggatattgtccatctcatttacattttcaaattttctggcacaaagttacaaatagtgtcaccttatatttattttcatctctaaaactgttctgggcctccttattgctgatattatttatttgtgttttctactgctccattcccaattttttaaatcaagcttgctggaggattatcaattttatcttttaagggcaaaaatattattccataagttgcctttatcacttagtgtgtctatagtatcacttagagaaatgtaccctcctagtacccaatatttataatgactgcctactgtttgtggagtttttctctctaaagcagtttcaaggtttatgtagtcaaacacatgtcttatcttgcatggtttctagatttcccatcttgcctagggaggcttcgtaccccagaatcaccatacagttccctaaatgttctagtaatgtatagctctgttgtttagattaccatttcatctggaaactgtatttgtgcacagggtaaggtaaggaactgacaaagatgagaacccaattgtcccaacaccaattcaaaaagtccattcttcgctcactgatgtgaatgccacctttataacactttatatttctcaaaacaaactctacttggttaatgtatgttattttatacaaatacactgctagattgcaataatttacttatgttaatataaggtttattccgtctatattaataagtaaaaattgtgttctttttcctttttaggggatgagggttctcattcaactttggtgcaaggttatggtaaccttatagaatgattttggacgcattctgttttttcctacactctggaatatttaaattatcaagttaactatcagttcattgagggtttaatagaacatacccatgaaactgtctggacttgatggattttagaaggatagatctttgattatcttttcaaattcattgat

SEQ ID NO: 1241839 - DNA, 4001 bp, Homo sapiens
acccagcggaaatagggcttgggcctccaggggtgaggtgttgaacctcgatgatggaattcaaatgcatctgagctgaagagcgggctggctctggagcccggagttggcctgggtaggggttgtgtggagcagtgactccacattatcaatgaagctgaatcctggggcagagagagagggagctggagttacccaggagctgattcaagggacaactggtgttcaacactagggactctcccactcccaaaatatgctttcattgtcttgagacaggagtttctaccctggaaaaacataacagccagaccccttcctcctcaaccctccagtcctgaaaggctctagggccccctccgtcctttccttctcccacacttggagggaaaggagactttggtagtttgtgggattattgtcagcatcagtaggcagaaagtggggaggctgggtccttattctccaaggtggacccttctatttacctggctgcccagttgttgggaaacccagcgaggggaggggggccggacaggagcgacagatggctaggccgacccaggattgagcctgagggctggggagggggaatccaccttcctggctgtagcctacggaaccagtcaatcgacacctctagacctaggcagggaataccgaggagcacaaaaaagaagatggaggtcccttatttctggtggagggctggtggaggtctcgccttggcagggaggcaggttccaaaatggactgcggggggcggctgccgaaaaggtgagggacctagaagagagaaataccagtggagtagaaacgggagggtaggggaagcaggcctcgggccttggcgccgtttaccgctgagcacgcagcaccacagcctcggtgcccgcctgccaagggttcggcccaggcaccgagacagacagagcgttggcctctaactccgggccactctcgggccctggcgcctccccgaccaggctggggatatctggggctgtggagcgtcggcgcaaacccaggcggccagagccggggccgccctccgggtggggactgaggccaatgggggcttgcgctaaggttgggggcgctccctccagcacctcctgtgagcgccaccgcccagtccccgaagactggggcgagtttggtagggccatcagggccccagcccgcaggcgggcagcctcctcctcggttaccgcacctagagccaggctcatgctccgacccagctcgggccgttcgctgccctgcgcccggtgccggcccgaattcttgcccgctgagccagcctcgccgccgtggccgcccgccgctcgcgcaaagcgcgccaggagaggccgcgggaggcggcgggggctgggtcgtcgatgctcggggctggccgcgggggccgggcggccagggggactatcggagttggagccccgggccgcagcggcggcggcggcgcggccccagggcccggtgagggcctgcacacaggtcccgtggccgcgggcggcggccagttgcagcgcggtgagccccgcacggttggtgcggtcgaggcgcaggcctaggcggcggaaggaccgcaccaggaactcgagcaccgccccgtggccgcaggccgccgcccacatcaccgggctgttgcccgcagagtcggccgcctcggggtcaccgctgaactgcaccagcagctgcacggcgtccaggtggcctcgctcgcacgccaggctgagtgcggtgcggccgcgctcgtctcgcaggttcactgcagcaccctgctcgagcagcagccgcacgaagcgcgcgcgcagcgcggggtccggcagccccacggccaccatgagcggcgtacggccctgctccgcgcggcagtcgatgatgctgcggtccagcgcatccaacacgaagcgggccaagtgcactttgcccgcctgcatggcctccaggaaggtgcgcgtccccgctcgggggcacaggtccttgggtttgagcatggccccggccgccgcgcccgggcagcctggcagttccgcacgggggcgcccctgttctcgcgccccgcggggctccggcctccgcccgcgctctgatacctctccctccgcgcgtgggcggctgcagccgagggtcccgaggttcctactccgctgtcccggaggctccgactgccccgccgctcctgggccgcacgcctggcgtgtcgccgctccttccccgggcctcccgcctggaggtgttgattgctcgctactccgggctccgctcctggcccgccaccagacgtcgggagcagagactcgaccctctcccgagtctctcgccgctttcccggtgtccggcgcccctcagtcctcgtggtttggagccgccgtgccactcacccgcacccagggcagcccccgctcccccgcagcgacggtggcgcccgccgtgcacgcctgcctccagccctggcggggcgcgccgctcctcaagctgctggcgccgttcctccgcctcctcccctctcgcgggggccgggccacgccagggcgcttgctccttacttggggggctcagcggcgcgggagctgccgcccgcctagatacctgactttatagccttgggggtctccatggcaatggctgtcctgggagcggactgcgccgtcagggcagagacggacggggcgggggagaccgctcctgacccccaccccttcgtgggccacgaagtaggggagcggttcctcctccgcgctcccctgggaatgcggcggcggttgcggggcgggggcgggggctgctcgccgggggccacatgcacccaaccgggccaatcccaaagtcgcagtcttctctccccgccctccgcccccaaccgagtcggtgccctcggctccttagaaactggcgggacctcggcctcgtcggggaagactgaaagctgcccccatcggtccagggtgaaaggaattgggaccccatgagcgcagaactggaccacgcgcgagctaggggtggcagcgaaaggcggatgaggagtaatttgggggagggggtatacgtgccgcggattgggggcgctcagcctggctgggaactgccactcgaagtgcagagaatcacgcactcacacacaattgttccacccgcacacgctccctgggaacgaggggtggggtccgagtgcgctctccaatttcagacgtctccaaccccgacaacgcgcccgcgtgccagctcctggtggctgcctagcgggcagagtgtagacgcccagaccagggaggggctccttaggacccgggagtgccgcggacatgttaaaagttccctggcgccgccaccctggaaagagctagggacccactcgaggttccctgcccctcgcttctcccttgagcacaaaacaacccccaggccacagggctctggctctgaccactggctgacccctaaagagaggaggcgagcacaagttccattttccgtaagatgcttggagaaaccactgcatctcctctccctccggccagcaggtccccctcggtcctggaggaggggggatgatacacaggcctgggcggagcagagttagggcgcctcagagcctgggtgtgggtggtggggagggtgtgagtagggttggaatggatatttgtaaagtaaggagtaaagcagttatcagctgcagaatttactgagacttttcatgagccgcacattttgttgccggcagcgggtaagagagagacagaatctcggttctgggtgcgagacgttccacctcttaagaagacaacactgggacttaaaaaatggacgttgtcacctgagggctgaattcttctgctaaatacgtaccaacacagtccttggatgaaaagatggagttgtgggcaggagagggctctcgggccttttaaagataggccttcaaggatgtgcgggatctggctgcaaaagaaagaaggaaggaatcccaggccgggtgcagtggctcacgcctgtaa

SEQ ID NO: 1241840 - DNA, 4001 bp, Homo sapiens
cgcggaaactccggcctccaccggcggcgccccctcctctcccgcggccgccccctccccgccctgcgcgccataaggcactcgcacgtctccagtccacagctgcgttaaggcggggagggggtagacaaaaaggatcttgttttcaaaagtctcactcaggtttgggggaggaactagggaaaagaggaagcgaggcctgccttcgccgggattcgggtttaacgggctagaggggcgacaggccagcgcacggtgctgcccaaactcccaactccatggagctcgggccaccgagactgggggcgtcctcccgccagcgcgtccccggtccccccaaggggccaagaggggagctggccagggtctccgccccagagccgccaactcgccgaaaacactcaggtttgaaagcgagagggaggcagaaataaaaaccagcgttcgagtcacccaccctcaccttccccctcctcaggggtaagctttcgctcgagcctcgcgattcccacccgtgtaagtttcctccggccgtgctcccgccgctgcccaatcaataacggcggctagcgggcaaactcccatcctagagctgcgtgtttgccatgcccgcataaacgtggacccagccagtacccaccacgggcgccagctccgggcagctcgcgtcctgacaaagtttcccgtgcccatttattaagcaggcgccgaatggctgccgacaagcccagcactgagaaagacgggccgggggttcgagctggggggcaccagggcccaaaggctggcatcttggggaagccggaaggagctggggcgagggggcaccgggacgtagcctttgggcaacttgcaccagcgatcgctggaggcagggagacgcggggattatctgtgccttagcacgttcgaaaatccctccccctccttctaatttatcctcccttcggaaggaaaggaagaaacatcagcatctggcccgaaggtggggtggaaagagtgagggagaaagaggaggagaggaagggaggcagagaaagggagggagggagagaaagggcgcgttcacgaacactacaaagttacaaatatggctcccccgtctctcgcctcatcactgcaaagaaatgaagacgcactttaaactccagccattcccaactccgctgcagccccctccccacgcgctctccccgggggcctcggcccacatttatcagaaactaaaccggactcgcgaagccccaaacttattgtgtgtgcgagcgagcgagcgagagaaagggaggggggaggcgcgggaggggggcggaaggggggatacatttataaaatgtaaaaccccctttttttgttgttaaatccaggaggcagcccctctcctcctcctccctcgttaatcttccccccagacggagtcacgggagcagcgatctccgagggtgatttcgcctcattctctccgacccaaacgcgtgcgcccgccggcccccgatgggtgcacactcgcacgcacactctcgcacccacactcgcacacgcgggagcacacgcacaggtagtcacacaccaagggcagcggcggcggcagccggaacatgctcggatggcattgcaaccccccagccttgccaattcgcttgcagtccgacccccaaacccgcacctcccgggcgcccccccccaaaaaaagtgcctccccccagcgcgcacacacacacacacacacaaagtaggagaatggaccgacagagatatttttggcaaatgctcacatcagagggcgtcctgttccgcagctctaaatgaatccgtctgcccatctccatctctcgcgctctctctctgcagaggctcccgcgccggcggaattcaatcaataaaccccgaacccacggccgcgcgttttaggactttgaaggctcaaccagctccgctcggttctcgagcccccagcacccgcggcgcacactaacctgatcgccgtggaggcgggatctgcggccccatggacgagcggcagcggcccgagccaatcgccgccgagggtctccgggcaacagccaatggcagtggcggcgggggggggaagggaccaatgggcgggctgcgcagccggccagggaggctcggccatttggtagtggtgccggagacggacccctttagatttcggggcggctgaggagcgcggcggctgctctgtggctgagtgaggggggtgggcggaatggcgggggaagggaaggtgactgtgcctcgagggccgagccgcccggccttgccagccagccgccgcctcagcgttcggccgggggcggggccgcaggtgcgttctgcgagggggaggggcgcggccggaggggtcgggtcggggtccccgcccggccgagggcttcgcggggcggcgcgacggggttgcggaaggaggcgggcggcttgaggtccggggaccgcgggctgcccagcgggagggcagatgaaaggcctggaaggaggagaggggtcagggtgcaatgccgggaggggctcgtcgggtcccgggtccggcggctcgcgctggggagcgtggctgcccccgtcacccccaccgcggctgcccagcagcccgcgcgccccttcccctccggcctcgtccctgtcaggccgccaccatcgccaccctcgtatacataagtcagtaaaagcaagatgcttccacttttggatgacttaccgcgcggtcgcgacccttcccacgaagaggcttttcactttgctgtcatattaggtcagcttggaagaagtgatcaccaagagacacccaagatcttgtttaggcaataaatgaatgaagaccatggattaagaaccgttgctagatatgtagaatattaaaaggtggaaaaggaaggtgctcataactcctggttttctggaccaaacataatttctgggctttatagacctagtgaaagagaacggcgcacggtttattctaatcgtccacctgagtcattcggttcggtttgggttgccaaggaggctctaactggagccctttctcctggtttttcggcgtggttgccttgggtatttttgaatcacattaagttttaagagaccttaaagccccgatgcccactgggttaccgacttacggcactaagttggctgcctgtggctgttaataaaccacggggattgttgtcaacgaggacagatacatccttacctttccacacgactgtattttagtgtttgtttctacatgtctgcactcttccccacacgcctcaaggtagtttttctggatacatatgtttatttttcaggaacaggagttcaaaggagagataagccagtatgtatgttgcaaagttaaaatactgttgcataatagcaatccagtttcattcttagacatacgaagttgaggaggaaataaaaagtgacaatgtaaataaaacacatacagaatgcttacactggggaagaagctgtagtaactttaatattgcaacctgatggattgcaagtgtaaagccctgcaactaaggattttactcagtaaattctttcagataaaatgataaatggaatttgaagtctgatgtttactctgattaggtgggaaatgcaccataaaagttagaagtcattgttttattttatctgggtataaatagtataatttatttaacttgttgacttgcctgtcatcctcagattttgttaatcttattgaagcctatttgtatagttggaatttattctaagttttattggcttctttgtaatacatgaggaaccccaaatttcctatttatgccattgagacagttgttatttctggatatggtgtttaggattgtattcaaacagaactcttatcaaaacaggtcaatatggtgtgtatgatctgtgtaacataggagtcctgaagtttgtgttctctttgatggtaaatgttcattttcaatttaaaagtttaaccacagttaagaccacgctgctagcaa

SEQ ID NO: 1241841 - DNA, 4001 bp, Homo sapiens
catacagcccctcacatctactgtggccgtgccaaggggagttgaagaccacaggagaagacacgcacccatttggccagaccagggctgggagctgggggtagttctcagaagtagaacttgttagccagggagtgctgggggctgcttccagacacaggcctgtggaggacccacatcttgcctccaaggtgtgactgggaccactgtagggccaggagtgacaggcacccggggtgaagcccgggctagggatagatggctgccagcctatgtgaataaggacaccccagggcctcggtgtgcggctgacacactgtccatgccatgcctccagggctgtccaggagccccagcatagggttccagatctcccaccagagccagcccaggaactggacccagttccaacaccttggctccttccgacatggggacccccatctatgtcctcagaatgcctagcatacaattcttacagcgatggggctggaggccttagcttaaaggctgtaggggtgtaaggagcgccagcgtgtaacgaaggtctcattccccagaaggctctgggggaagcacagggcaggcggctgggctgcctcaagacactgggccggtttccccacctgtgaagcgggagcagcgctgtgggtggcctccttgcactcatagtgtggccttcgaggctagggctccacaggaaggtggctgagagtggatgagggcctcatgggcccagcacaccctcccacagggagaggggagtccaccctcttccctgcccagctcccccatacccactggggctagccagccttcctgtgggacagaggctgtccccacttcctcctggtcacccctaccccacacgcccacctcccctccacaaaacacataccctgaggggccctctggtccaagcctcccctttcacaggtgaattaactgaggcccagtaaggccagggcgtttagagactcagggatgaagccacatcagacctcaggtctggctgagaccagggctctgaccacccccgaacacggcctggtgggttgcagtccaggggctgaggtgggggaggagtggggatccagtcacaaaaccccaggacatagcccacctgggccgtccctgcccaccgcactgctggggggggggggtgcgttctggagtcatttggggaaaggatcccattggccctgtttaggggaccttttcccagaccaagagtggattgcaatggggccctggatctgtctcagttgctcaccagggagggcgtggaataggctccacaacccccaaacctcggtccccatccatgccccggcatcttggccgggttgtaggagcgagggagaacgcgactgtaacgcgggcgttgagcacctagagttccccttcctcttcactgagagctgcggcggaggctttagaccgaggagcgagatctaaggttaaagaaagggcctctgagcccagtgttggccagagaccccacaggcgggccgggttcgccctttgccttcggccgcgccccacccaccagggacagagtggccgcggccgagccgggtccacccgccgcagcttagctccgctccgccgccctccccgtccgtcctccccaggctcccgtcgccctcgcccaccctggggccccctccccagatgggagcccctccgacccctgcgaggcccgctggggacccacttgaccgcgagatcgtagtgggagctcggccaaaagaattcttcgctttccctggccctcagtttacccatctgggaagaggggcgtcgcggccgcagaagtccagctccgcacgcgccaagcgctgggtctgcagctccctcggttcccgcgcacccaactgccccacgacccctacccgcgcccgcagcccccgccctcccgccccacttgcctgggccgccgggcgctggaacctggaccctggaccctggcgggttccgagctgcgccgccgccgtccctgcccctccagcactggactcctcctttcccgtctttttaaagggaagtaaccggacccgaccactactccacccgattcacccctagcgggccgcccgcccgcagctccgcccgggctcctcccccgtccgcccgcggcttcccgggagccccccagggctcctccgctcctccgacggcccggccttccccccggggcctgggatgcaccagggctcctgctgcccccgacggggtccctgtcgccgcagcccgcgggacccgccggccacatctggacggcatctgccgcgggggaggggctcagagcctcgccctgagtgtcccgcagggagccttgtgcatccggggcaggaagccagcgcatcccgtgcagacgggtggtgcagataacggacccgccacagcacgcaattcaactttcttggtacctgggactcgtagttcagaaggcgcagtagcacgaccttgcgaaaaagcaccggagtcgggaacacgcgcttctcatttttttctttttcctttatttgtttttgagacagagtctcgctctgtcgctcacgctggagtgcagtggcactttctccgctcactgcaacttcctcctcctgggttcaagcgattctcctgcctcagcctcccgagtagctgggactacaggtgcacgccaccacgcctggttaatttttggagttttagtagagacagggtttcaccatgtaaggctcgtctcgaactcctgacctcaagtgatccgcccgccttggcctcccaaagtgctgagattacaggagtgagccaccacacctggcctgcgcctctcatcttgatcctgcttgcagaggttgtgcagccaccggagccccgccagggtggggctccctgtctctgagcagctttaatgggcggtaccagataatatttgtattggttccctgtggctgccgtaacacaaacataaaacaacactaatttactatcttacaagttttgtaaaatcagaagtccaaaatgggtctcgctggactaaaagcaagggggttgagggatacagctttcttgaggctggaagggaacctgtttctttggcttttctggcttctagaagctgcccacattccttggctggtggccccatccatcttcaaagccagcagtggcccaccagtctctcacaatctgtcactctgacaccaactgttctgcctcttgcttccactggtgagcatctttgtgattacatcgggcctacccagataatccagggtaatctttctattttaaatcaatggattggcaacttgaattccacctgcaactgtaatttcccttcgtggggtagcataacatattcacagattctgggcattagaaccagggcatcttttgaggaggaggatatgattatgtctaccacaatattcaagctgacttccagactttcagatttataatcaaatttaagctcttccttatccatgattggaatccttgggacagttaaagccttgcactgcatggtccaaattgatggctttgtgactggctgtgttttattattttacttgcacttgctcttcttttggaaacttcatggaggaccagggtacctctaggtagcagccttgcttctccttcctaatttgctctgtactcttaaaaaccaggtcacaaacatatcggaatatagaattgtgtgtaaagtaagagtaagtaggctgtgagtgagacctcagaggctattttgttttttttctctctccagtctcatgcatgtctgactctctccactatcatatctggcataatctcctccatgtctgacaagccaaggaaaacactacatcaggccaggagagaatcttccccccggagctctgcctctcccacccaggctccgcggagattttaagaggagtaaagatcctgctgtggcagaagtgcaacccagctttctggagggcagtttggggttaggaatgaagatcactttcagaaat

SEQ ID NO: 1241842 - DNA, 4001 bp, Homo sapiens
caagggcacctctgctgccccagtcttaccaaaaatcttccttaatattgcctgaatattgctgctttacattctataaattatagatctgtttaggtgaacgagggttttttattattattatgtatttattttttgagactgggtcttgctatgttgctcacattggccttggactcaagagatccactagcttgagcagctgggactacaggcccacgaccacgcccagtatcgttgttttttaaataacaagactcctctcggttgctgaggctcttaggaccaccaaccattcctaacttaatgaatatcgattcaatctgctagtctctagctggatgcaggtccgccgaaatgggaaggaggaaggaatgcagcgtaactggaccggcctggatggctgttgtaatgcgtcacggaagagccagaagagcgtctctaaggaggtggaaggtggaaaaaagaaagtggaacaggggcaaagacataattttccaattaaaataatttactcagtgtcaaccttaaagctaaaaaaagttccagaaaaatatttcagtgatttagtcttcctacacacacattgcccctcactaccctccacctccccaccaccaatcccataatcaggcagtgcatgttaaaaaggtctttcagggctagcctgggaacgtcagcaccttctgcaacactgtttcagtgggaaagtgcattctgcattccaagtcaccaagttccagacaggcacagtagcacacacgtgtgaacagaatccatcagtacagtctggggcccaggcctttgcacaccaacaacttaaggttcttggtaatggcccagcgtgcacccatgaggccactgctcttttacacacgcactcagaacacccacagctttaaaacggcaatcttactacaaaaatgacactttgcatttgcacagcactttgttttttgtgtactttacacatttattacctaatgactgtgttttttgaaatctccaataactctgggtggtggtaagaataggcatccttaagccaccttcccagatgaggaaacttatctgtgttcccctccttcttctcaacagccggctgatggaacccaagccctccacaccagcagtggggccagctgcacagagcggccagaagggagaggccccggggccacgcccttctctctactctcagttcctgactcattgtcacatcatggcgagtaacaggacaaccctccccacagaatcatgggggacactaccttcctgaggccaatgtgttcaaccaagcgggaaactctccgggtagagtgaaatccgaagttgctatgctacaagataacctagagcaaggggaataactgacgttttaatgtcttcttttatggggggctgaggggtgcctactcacactcccccctctcgtcttcccccgctacttccctcctgctggtcggttcaactccacaagcgcgcgtttgtttcgagtacagtaacttagagcagatggggggcactttctagagggcagtggaaagcccacttgctactgctgcgccggggacctgcggctccctgggcggccacgccctgcctcggcggcgcctggcgcgtctggaatgcggggcctccctccgcccctctccccacgccgcctcgccccgctcccgctagggcttcttagagaagcccgaccccccaccacctctgccctgcaccctcccggcccgagggccggtggcccctcacccctgccccaaacaccttgtccctgagccccctccccaaagactctccagtgccggccgtcccttcagccccctgcccccgacggcctccggggccagttgccggggcctccctgccaggccgtacccttcttcccagcgtctccacaccccgctagctggcggcccatcgcgggcgggcagggcgcgccccgcttacctgggccgtgcgccgagagctgagagcgtccccaaatgctgagcagagccggctggcctgggtggggcttttatacccgccacatcctccctaggcgaggcgaggcccgccccgccccgccccgcctcccccttacacggcccgctcccaccccaagtcaggggtgactcaccccggcccgccggcccgcagggaccgcgccctggaacgctcccgagccgcgccacgcgggagcggccccagcgcccctggccctgccctccgagaaagcccggccgaggctgccccgaggcccacagggaccccgtttcttcctcctttcctcattttacttcttaagtgccacgtcgagctctcagcctcggcttgggttaataaattaacaagactttagtagtagactctgggcttgattaagtgtttttttttttttttttttttttttggcgttaatgcaatggaggaaagaattgttccaagaaacataaatctggactcccctgagctggggctgttggcatccagcgccccattaccgtctgcaaacatgtcagcttaacctctggccgccagttcccggggggcgcccggggagggagggagattcgccctgtgctgcaaagcctggcccgccccggcctccgagggccaggaagccccgagcctgggctgggaggccaaagccgggagccaggatcccacctcagtcccgcccagggtggcgcccctgtccctagcacggctgtgctccgcttctctccgcgcctggggcatctctgcgcggcctcgtagcaggcagtcctgagcggggtggggcccatagctttgaacccggagtttcgtgtgtgtgtgtgtgtgtgtgtgtgtgtgtgtgtgtgtgtgtgtgtgtgtgtttcgaacccggagtttcaacaaagaactttcctctccttctttcatgactgctggggtgtgtgtgtgcgtgtgtggtgtgtgtgtgtgtgtgtgtgtgtttcttgcagccgtttagccaactcccttgctcggtgttgctgttactcgcttttcttccgagagagagagagagagagagagagagagagtttcttgcagcacagagagagagagagagagtgagatagagagtttcttgcagccagttagccaactcccttgctcggttttgctgtttctcacttttcttccgtgtgtgtgtgtgtgtgtgtgtgtttcttgcagccgtttagccaactctcttgctcggttttgctgtttctcgcttttcttccgtgtgtgtgtgtgtgtgtgtgtgtgtgtgtgtgtttcttgcagccgtttagccaactcccttgctcggttttgctgcttctcgcttttcttccaagagtcacgttggcaacgtgcaggcagacacctatttgttgtatgtgagacgacgcaaatactgtattcgaacctcaaactaacaggaaagcgacgctgagaatcccgaggatctctggctgcgttttttaaacccctccttgcacactacttcctgcagctctttttcctggttttgatgattctgtgtttcaatctcccatttatcttaacatccatttttactttccatttgagcgtcaattcactcctgggaatcagagaatgatagcaaggccaacagacattcagtgctctgcccactcgcatagagtgacacaggcaaagtcggccacagctgaggtcttttaacccgcccaaagctttctgttacccagcgctttcacgaggaattatacgcgatgggccctaccacagagccaaatagaaaatcaagcaacactttgggtacaattgctgatttacatttatagctcttcaatttagcctgaaagcttcaaagtcagaaacaatgtttatctgcttactttgtgtgaacattttggaaggttaggggaacacaggcagacagtaatattgggcacgattcagcctcccttctgtgtatctcaagataggttccacagtctcttactcctaatcgtgctgtgataggccctttacagaagataaaatttaattca

SEQ ID NO: 1241843 - DNA, 4001 bp, Homo sapiens
cttcaaggctatggagaagcagtatctctccataccaccccccgccaaaatgtttgctgccccaacacttcaacactattttatgttatttttcttattaataaaagaagacaggaatgtcaggcctctgagcccaagctaagccatgatatcccctgtgacctgcacgtatacatccagatggcctgaagtaactgaagagtgaaaatggcctgtgcctgccttaactgatgacattatcttgtgaaattccttctcctggctcatcctggctcaaaagctcccccactgagcaccttgtgtccccccaccgccagagaacaaccccctttgactgtaattttccactacctacccaaatcctgtaaaacggtcccaccccatttcccttcgctgactcttttttcggactcagctggcctgcacccaagtgattaaaaagctttattgttcaaagcctgtttggtggtctcttcacatggacgtgcgtgaaaatcctcatcttctccccctgtccctctaaacccccacccaatatccaattaatcatcaggtctgaggcttccacctcttccacagcctcaaatcttctgcctctcccctggtctaggccacaatcatgccaggcctgtgaacttcaagacccacctcccttgtctcttgttcaatctggcccacctccaatctcttctccacaatgcagcagcctgacgtccttctaaaatataaatctgattatgtcgcctgcttagaatccttcaggagtcctccccaccctcttttctggtcagtccagtggctcacacagattgtggcctggctctcaaccttcctgaaagccctttcctctgcctggaacatacctcacgctcctgtcttccttctctccggcgccagagactaggtcctctccctgctcccactgcccccattacactcgactgtccctgactgcttcttcatctgtgctcccctctagagcatcgtgaggacaagaagggtctcatgttcacagttgtattccgtgactagttcaggactcgacacagttggcttttcataaatgcttgttgcagaatttacgaataaacaaatgaagaaacaaacgaacgaatcaaaggtgggggagggtgtgaaggtggagctgaactacaggggcaatgccaggagcagggatgtgagggtcagatggagatggggaccagagggaggggaaatgaatttgcagcagggccaagctgggaggctgtgcaagtacatccagggcccgccttcctgaagaggccccaggctcaagctcaagttcgctgactcagacccctcccccacatttttgggaagccaacccgcctagcacgaaaaaggaagggaacccctaacgcaacgccgcaaaccggagaaacacctggaaccggagggtttctcctctcgaaactgagctggcccatcccccgccagcccctatctgcccccctccgcgtcctaggccggcccctggagccggggtgccagcgctgcccgcgctgggccggggctccaggccgcaggagggggccgggcgggcttccggtcggcgcggccggggcggggccggcgctggggccgggcgctgtccatggtgcccgcgcgcctcgcccggtccccggccccaaccctcccgcgagcttcctggcgggctccctcaccgcttgtagtcggaggagaagatgccgccgctcgcggggtcgtggccgtactcgggctccccggggccagcggagccgcccttgtcttcgctgtaggcgggggcggccgacatggggcggccagggagacttcgccgaggaggaggttgcggggccggaggccggctggagcggaggaagggaaggcgggccggtccggtccgggctggcgaaggcggcggcgcggcaggggttcagcagaggctgcagtgtgcagcggcggaggctgcgcgcggatttctcaatcagggccgcgcgctgaggtcttaaaggcaccggcgccagccgagcggagggcgtgtccgcgaggaggcgacaggggcggtgcgtcagggcctggccccgcccatccctaggaaatgccctcttcagggcgtcttctgccctttaaagcgacttggctcgtctccagatctaaaggtgggcgagtctgctggacggacgctgggaccgtcttgcaggggatgtggaatagctgcccccacccccgaccacctggcctcggcgggacgggcctctggggctccgctctccccagacgcacgcgcggatgctcacccacgccgtggagggaaagcgggaactggaaagaaggctgtgcccgcaggctgggggttctagagcgggaaggggtcaccgcacccgaggaccggcctcagatacctaaggacgctccctttcccgccccacctttcctacaaaatctggcttggcagcaggaagccgaggagcttcctggaggtggcggaatttaaggaattaaggtcagggagctccgaggagcccttgggggcttagagagatgggaaacaggatacagaggacggtgaacatctaattaagctttggaaagtagtttaatgaatctttctgaagcctccacgtccacccaggagggccaaggtcatgcttaatccggggacacgtccacgtccattgacacctgaaaaggaagagaagggtctggtgtgaccaccagggctcctgagtcatgtgagccctccagttcagctcccgagcccgagtgacccctaggcccaaggaaggaaggcttggatccgatggaaagtagtgaattgggctgggggaagaggtaggatccagttgggcatcagttgaggtggctggagtcttttagctgggcatggggactggaggagttcctaaggcctgagtcttggtctgtaactagcatcccgaagtctccatgggcagaattggcgggcctacctgggaaggagtggggcccagaaaggtggagcttggctcagtagaaaagttctattgggggtaattctactggggtaaggttctattggggtaatgagaaggttctgttgggataacctagacaagtgggtgggtccgcttggttccggtggctttgtgcctgccagagaaaagtggatcttgaatttggagaaaactggcctgggtggggagtgggaagagaagggcctggattttgcagttgcgcgtttataaggcgctttggctagtctgctcaggaggtgggatgggtcctgtgcaggtagctgggccacgctcaccgacctgctggagctcccgtctatttgccgggggtccaggctgggacctgggacgagcagacacagtgcaaagtgcacacagttgctgcgcatggagtgataggatggtgggtccgcgtccgtcgcttcgctcactctgcgcagcacgcgccagcaggagcgcagcagcgggcgctgcccctgtttggatacgatgcctttccaggagcccagaaacttcccaggagcccacagcctcctgagttcttgcctgcggggatcgccagaggggtgcggatcagagccaggcttaggtcctatgccctgtgatcccgcacccccatttcctgagacctcagggaccctgagtgcccaaaccccattttcagagaaacgtacccccagcctgggacttcagtctttatccccgagtagccagctcactggtggggcgtggcttggctgggcagcctctccgcagacttgggcctgtgtttctgctggaggcactcaccctcaaagtggatgatctctccatggccacagtatatgccaacgtgggccccgcaccagcgtcaggtggggggaatcagcctgaacaggaagacgtctcctggctcaggctccctgccctccaactacacagcctcgaagtgttgacccaggaaagcctcagagaggaagaacttaatggtgctgactgccccagtcagggcctgcatggagaaagggacctgccttcctggcg

SEQ ID NO: 1241844 - DNA, 4001 bp, Homo sapiens
ctggggccggacacagtggctcatgcctgtaatcccagcactttgggaggctgagtccggtggattgcttgagcccaggagttcaagaccagcctgggcaacatagaaagaccccgtctctataagtaaataacataaaataaataagtaaacagtatggcatgttagttttatctcagtaaccctgttagaaaaaaactaggggggaaatttgcatacacacaaatgcaaatacaaatagttacgctgaatactcatatacatacatatatatatatacttttttgtgtgtgtgtgtgatggagtctcgctctttcgcccaggctggagtgcagtggcgctatcttggctcactgcaagctccgcctcccgggctcacgccattctcctgcctcagcctcctgagtagctgggacttggaggtgcccgccaccgcgcttggctaattttttgtatttttagtagagacggggtttcaccgtgttagccaggatggtctccatctcctgacctcgtgatccgcccgcctcggcctcccaaagtgctgggattacaggcgtgagccaccgcgcccggcctgaatactcatatttttacctcgatgtaatctacttaataaaatgtaatctagctttaaaaatcttatgaaggagtaaaattattttttcatttctaattgacaaaagacaataaaagtctgaaaagggtttattaacttgtcaacagacgcaagagtagaaaaggtggagctgaagcctgaacacgttttctggctctttcccctcttcagttccaccagtcccccaattatgtaacattttgaaaccctgccatgaagaaatataatcttcgaagacaggaagcaaatactgatgtttatgtgtttgcaaaggaacgtgttgggaaaattcaaatttacgtaatcacttattgagcccttatgcggcagcatttataatttctcatcatttttccacttttaaactgattttcttcaaccctaagagtgaagggtatctagtctctggaaagtcccagccaacactgaagcaaaataattccaaaaaaaaaagaacttttccagttctggctataacaaaaactttcagaaacttaatatttcttcctcatgaaactgtggtcaacaaccaaaaagatgacagaatgtgacttcaatcactcaagttctcatcgaggcacactccccactgtcgcttctatctcgttcccagagacccacgggaaaatgtcacaaaatggcacagaaatgccaggatcaagaaaagggtcagcgagagcggggcagtagggcgggagacagaaggcctggcaccagcctgcgcctagattaaatgcttaagtagggcgagggtcatgctcggtgcaggagccccaggtgaccaaagagcggtgcccccgggcgccgagaggccaaagaggagggaagacatagtgggcgccctgaaggggcgtggtgaagccgggccgcactcacgaaacgctggtagaagcggactagccgtggcttcccatggttgttgaaaaccagaatcgcctgaatcatctttgccagccacggttctctcagcaccggctactcccagaaagctcctccttccgccacaacacgatcacttccggttggtgcgctgctgagagcggcactcggaaacttggccccggcgctcacgagccctagcacccaagggtccggcctctctgacgccttggagggcaggtgcggatgccgaggagagtggtcacctcggccagcgttggttggccagtcaggatgcgaatccggatctatgtccctcgcccagaccgacggctggccccagaagccgaaacgaccgtcagccgggttgccaaaacggagaggcggcgggagcttgcttttctcaccgcccgctccaaatcatgcactcccgccatccccttagcgctcgcagaacgttccgcggagtggagacgccggtcattcggccgttcgtcggttatggaacatttcgttcattttaatttttcagtattataatgctgcagtgaattacgtagctgtctctccgtgcagatgggctgttcctctatggtagacggtgaatggtggaattaaggaatttttagtgcatttccatttaaaatcccaaatcgatcaagttcttatttttgtttgttcttttaatgacccagtgtgggtgaagtggagcatgtccgtatactgcagatggagcagcggatacagatgcaaatcgatccagaggactgtttggcgatatggatcagaagcctttaaaatatataacagtccgggcgcggtggctcacgcctgtaatcccagcactttgggaggccgaggcgggcggctcacttgaggtcagcagttcgagaccagcctggccaacaaggtgaaaccccgcctctactaaaattacaaaaattagccggttgtggtggcgcgcgcctgtagtcccagatacttgggagactgaggcaggagaatggcttgaacccgggaggcggaggttgcagtgagctgagatcacaccacactgcactccagcctgggtgacagatatataacatatatatatatatatataaaacattagactcagcgtttccagctctagaatttatgataaaatgattgtggatgtgtgaaaagatttagcctgaggaacatacatttctgccagagtatcttcagaacagtaaaaaaaagaagaaaaaaatatatatctcagcagtgttattacaggggaaaatgggaagaaaattattacaaaaatgagaaattggttaagtgcattgttctacattgaatatgagaaatattaaatagataataaaaatcatgctgggaaagatttatgatacggaagtgttcatgacacctgttaagctaaaagattacacaaagtatgtacagggacaacccactttgctcaagattggaggcaaatacaccaaaatatgaatcatgtatctgatggaatggcagagtcagggtgtttgatctgtacaggaccctggaaccacactgccctgattcaaagcatggttctgcggactgcctgggcaccctgggcaagtttccccatctgtagaaaaggtgtaatatcagtttcctaaactggaaaactggaaaatgagtctactgacttcagacagttgttataaacacaaagggagttagtataatatttgtaagcacttggacagtgcatggcacataactgagtaccacataagtgatttaaaaacatctttgggtggtaggattatcaagttttcctttttttccttcaaagaaatatgtactacttttgcagccagagttctggggtttgcttgtttgtttttcagagatagggtcttacccaggttggagtgcagtggcacagtcatacctcactgtaacctcaaactgctggcctcaggcaatcctccagcctcagtctcccaaaccgccaccacgcctagtccagttttttgtttgtttgtttgtttgtttgtttgagatggagtctcactctgttgcccaggctggagtgcagtggcacaatcttggctcactgcaacctccgtctcccgggttcaaacaattctcctgcttcagcctccccagtagctgggattacaggcacatgccaccatgcccagcaaatttttgtatttttagtagagatggggtttcaccacattggccagtctggtctcaaactcctgacctcaagtgattcacccatctcagtctcccgaagtgctgggattacaggcgtgagccactgcgcccggcatggcccagtttttaaataaataaaaaccaaaagtcagttgcactgaaacttgacaaaatgtttaaaatgttgaggaagaatatcaaagaaaattctgaaacagaattatgaagaagaactagctctgccaactatgaaaacctactttgatggttcaaattgtaattataggaagaataactgaaatattataaataa

SEQ ID NO: 1241845 - DNA, 4001 bp, Homo sapiens
aaaacaaaacaaaacaagacaagcccacaagtaatgattctggaatgtgaagcaggttctctccggatagcatcaacttattagagctgccaaaaaaatattttttttaaaccttcagagcactttcttttctgtctttccttctcttttagcacttctattgcattgtagtcatgcttatacttgtcttaagcccaaaacgaatgactaattccttgggaaaagggaatgtgtttaattctattttcctgtgtctaacacataaccttgttccataaacatctgttgaacaaataatgacattaacacgtgctctttttaagatataaactccttgtagctgtgaatcggtatactacacaatccgtgcaaccatcgagcgcctgtgggggcccggcgcggtggctcatgcctgtaatcccagcactttgggaggccgaagtgagcgaacacttgaggtcagttcaagaccagcctgcccaacatggtgaaatcctgtctctactaaaaatacaaaaattagccgggcgtagtggcatacgcctataatcccagctacttgggaggctgaggcaggagaatcgcttgaacccgggaggcagacgctccagtgagccaagatcgcaccatcgcactccagcctgggcgacagagcgagactccgtcattaaaaatttaaaaattttaaggccgggcagggtagctcacgcacgtaatcccaacactttgggacgccaaggcgggcggatcgcgaggtcaggagatcgagaccatcctcgctaacacggtgaaaccccgtctctacgaaaagtacaaaaaattagccaggcagtggcgggcacttgtagtcccagctactcgggaagctgaggcaggagaatggcgtgaacccggaaggcggagcttgtagtgagcccagatcgcgccactgcactccagcctgcgcgacagagcgagactccgtctcaaaaaaaaacaaaaattaaaatttttaaaaccttaaggctccagcgagccgagatcgagatcgcaccattgcactccagcctgggcgacagagagagactccgtcaataaaaatttaaaaattttaaaagtttaagaatttttataactgctcattttcaaagcccacttgaggcagagacttagcaaattttacattttgagagaactgtgctttttctttgcccaacacgttgttgtaacccaagaacctcaagctccccaaagatattcaacaagaggctcacaggatctcttcaggtatgcgacatctgaactgttgttcagttgaaggcaccgggggagagaaggaaactgagtagggaaaaaaaactttgtggaaggtaaataatgtctgacacttccatcgcactaggtattttcacacgcttgacatctcacccaatcctcaaaacaaacaaaaaacctatgaattatgtatcagtacttttccaccacaacgttgagaaaacacacggaggctcagaggttacagagatgtgcccccgatcaaagagtcagtgtcagaactaactgtggaaactcggcttccctgctgtcagtcccagcaggaaagtgaagcttccaggcagacgaaaggacgaaccgacacagcagcccctgagccccgccggagggctaaccccagaggccctgaagtctcgccgcccggccagggcctcctggcgcgggggcctcactccgatgtccctgagctcccgggccggcgggcacctacgtgcttggaggtgagggctgtgatgccgcggacaaggctgcccagcctcgaggagaaggacgccttggcggccgcgggcccaccaccgggctggttctgcagaaagagtcccggcagcgccgtcagcgtcttctccactatgtcgctcatcgccgccgccgcccgcgatgccgccgccgcccgcgatcccgtagccgcccggcttcatgcccggccgccgctgccggcccggcctccgtaggcacttcctgttttttgaataagaaatctttattggcgtcccacctgaacaagttcagcgtcgttctcgcgagaggccaccagagggcgcaagagaccgcgggggtggaaaaggccgctcgctcgagattgcgcgcgtaagtagacctcctttctcgcgacggggtagcggttccggaatcccccagaaccgtgagtcctcctgaggaagccgtcgggggcctggccctgttaggcactgtctcccagagtccccctttcccactagccgcctccgcgtagcccgagaccgcgtcaggagttgcgtcttcctggctgcgcctttttcgggacgtccccgcgccgtccgccgcctctcactgtccccggagcgcgcgccacccgcccgcttcccacaggcggtttcacgcgggtccccggcgccgcgcgcggctccggccctggcgactcttgggacacccgagtagttgcgtgatagcggggctgtcctgaggattcggcgtgccaggttgagagcccgtcgcgtgccggggactcgcggccactgtcgcttcccgtccgcccctcttctcctgggatttggggaggtgggcgggaaagagaactggtcggcggccacccttgccgactcctcctcagcaggtcgcagttgaaaggtcatccttctagagcccactcccctggcccggcgggcaaggataggtctccaagtcccaccctctcacagcgctcggttctgttccactttagaacaggtcgcagttgccactacgtaaacagctccccatagagagagtattttattcattccgattgctccgtcttttatctagaacagagtctggtacaatggctctcgaaatgtggtctggtgacctcagggtcgctgagacccttctagggaattcacaaagtcaaaacaacattgataacgtttcttacgtgttatttgccgtttttaccctcattctgttggaaatgtacagagttttcaagcggctagatgacgattgactagctggtaaaatgtatcctggagtatccttgtgttttctagaattttctaaggtagtaggtttagggcataaatacgtgcgttttcagagattaatgcaatttgctctcagtactcctagtgtgtttctaggaggtaggttaggtaggtggtgatagcctcccttcaaggggaacaaacttgctaaataaatagaacaaaccagcccatagtgtacaaaccacatccgaggctcctggttagaaaattttgcagcaaagaggtacgagagcagaagggaaaatccccaaactctcacaagcgcagaaacccatgatcagtgtcgttgggctgaattatactcattataatagtaaaaaaaaaaaaaaaaaaaaaacaccactcctgggtgaagatttaagatactaataagacatgcagtgtatgtactagcatatacaaccacagcgcacatggcgacagaaaaccagagaacgtgcttaatagcagcacccgttctccccgcttcatgaatgatcctgtgagactcctacaaagggagtttccccagtgtcagtgcatgctgtctcacctttgagcagcccgctctgatcagctgtgagggtgtactttcgctttgcaataaactcttttgcttgcttttactttggacttcaaaattattttgcaccgcgaagtccagaacctcaaccggcccaccagctacagctacacttacaagctatcttcggttatacctgctctaatctctgtaacctccttgtcacctaataaatgagtttttttgaaatcctgaagttgttttaatacctatatgggaacataagaaaaaagttcaatttgttggcttgtctcgcaagaatattttttaatatattgagaacattttaaaatatttaaactttatctaaaagggatactcatttattcatttaattttttttttttcagagtctcgctctatcacccagactggaatgcagtggcacaatctgggttcac

SEQ ID NO: 1241846 - DNA, 4001 bp, Homo sapiens
ggaacatggtgacaccagtgagcacctgtctgctgagcgctgaggcccctccccccaccccacacctcccccagactcagcacccacccccagggcaggaggctagagaaacggaactctctcaggtctggggatgcttgttcctgcatcatgaggcagcctatcctgactgatacacactgcataagggttcacctaaatgatgacataactctatatatcagagttagggttagggttagatggagcagctctcaggagggaaatctacgagttcaaccatcttgaccacaacagaagactaagaaatagcagcgtgcccatattctttacaaatgtggagataaatccagaggaagaagcaataagagctggaagtggtaatctatggggagtgggcagggcaggggcggtggggagatggtctgggaggccaggggtctgctatttttttcataaaacttataaaactctttgacatcttaaaatatgcatatgtatcaggctgacaatataaaaactgtgtctgaaaagtagaccaagcctttgaggtgcaaaggggacaaggatgggtggtctgagtaagcattccaaggcacaggccagtcctagctgcctggtttccccagcgtcctgcacagggcgtggtgtggtgactgaggtgtggctgaggccctgaattccagttctaccacatgggcaacaacctcagttctctcacctctagtgaccattaggggagtgaccgtggcttcctcagcacggtgcatggtgcatgtgggataaatcctgctgtgcctgcttctaaggtctcaccgaatacctgaaggacctgcagtgttctgggttgagaggcaggaacaggacaggctgggcaggttaggatgtctcctgagagagggtgtggagcaggatggtgctgagccagctcctgggaacagggtctgggttacagatcgaaaccatggggaggccagtgggagcagggtcatcgagggagagcagtgtgtcagaacaggcaggtggaatgtggctcagacggcccactaaaggacagagcatggctgtgacacagctgtggccccattgtgcactgcactgagatattccactgggcacagagctcctgcgggacaatggctggctgtagaagatgctcccacctctgcaggaggggctgagctgctcccacaaccagaccctgcaggcagctcgagaacatgtcctgcacaatcgccttgtggggactaactgtggtggccaccagtgtcttgggctgccctgctgctgcccctggggagggccctgcccacactggtggtgcctgggactggctacctgggtcaaggcaagcagcctggggtgctgagcaatttaggaattgttattgccaggtcgagcggaaagaacctgcccactttctgccagcccctcctcctgggtccctgggaagaactgaccaccgggatgcccccagcctatgtgcaccccatggggaagggaggctgcccaagaaagcagcacagctccaccaggaggacagaggcactcagtgcagctgggaaaagggacctggggcactccagggacaggatctccgaggtgagactgacagggttacagggaatgcacagtcttctcctagcaactggtcccctgtaaatgtctgttcttcccctttcgcctcaaaataaatgtaagcgtatgtgaagtttgtgaaagcagaaagcaaaaatatttaccgtagctgtgtttaagcttttattagagaaaggtgagggccatcgtggctataactcttcttacggcccccaattagcacatcagcccagactcattcatgaatgccacattaagtgcagtggggatcataacgggttctactcactcagaatctccagacacaagaagaggctcaccccgtctgtccacaggacagtcctggcctattggtggtttgtccacaggagattcagcaacgcgtaaatattcaggagactgtaaagaaaaagaacacaaacaaatgaagcgtcaaccagctgagaaaggaaaccacttattcacccacagaggggcaggtgtggatggcaacgatgggccacacgctcatatgggaggctaacagctccctccccagaacctctagagcagctggaactccaaggctctccagagcagctgaatatctgaaaaaccaagcgtcacaagttgaccgtgattctcccccaagtcttcaagtgaaccttcgtgtttatttccaaaggtcagtgagtatggacaactaatgatttcgggccacaggtagcagagctgcatgctaagcttgtggggagtacatttttcaatgtaggaagattttgtaggaagataagggaaatctcgtgccattaatatttcaggtttcatttgctctgacaggaaatgaaacacattcatcagggttctgttcccaacttgttttttcaaagtacaaaatgctgcctgagatacagagcttgtggcatagagcatgccacacctagtaggctgggggatgttctaccaaatacactaaacaaaccccctgcagagaaagggtgatggtgcccacgtgctggtgcccagagaagccatcagattagccagtgacactgtttctccttgagatgcaggtggccatcagcgctcagccagcaccccttactgatcagcaccatctgcctggacttcgcacagaactgagctgcagagatagacgtcctagctctgccactgacatcctgagaagactatgtaacctgcctgtgcctcagtttccttattatgaaggatgatggcagcactgagatatgggggttcaggctccagctccagcacctgctcccaacccctctcaccctcatcttcctaccacaccaaacgagggagctgacagccattccttaagaggttcctccagctttaacatccacggctgctgccttccaacttgatacttcctctaatctgtgtttcctgcctgggagcaggccacccagctggaggcctcctaaacccaaacatttattcccactccacgggcccactctgatactgaagcacaagaaggagtagtgtccattttggggaaacccaggccaaaccccacctgcctgctcctaccgtggtgtgggcatgaaaggcacaccaagagccagggactctaatggggcccagggaggcacagttctgcatgacaaggccattgcctccaagtcatggcatgcaaagcacctgaggtcctgggcctagaccctgcccatggcttccttgccccatcacaccccaaatccctgtgccatctgtgcctcacctcttctgtgcccatgtttaaatctttttgttgctgttgttcctctagaatcttcctggcaaactcctattcattcttcaaaacccagctggtgcaggcatctctgaattctaggggaaatcacactcttctcagccctgtcttctttctgcagtcctcacaatcattcgtgaccacttctcccattccctctcaggctcctacctggccccgagagggcacacagtttatagactgcacatgatgctgctggccagtaaaccctcaaaagcagccttaaagaaggaagataaatgaaagcaaatgcaaaggccgaggaggggcctctgctgggtgaggagggagcatcgggctgggagtcaaagacatcgggctacagaggaagcaagctgccacagaacatgccactgtcgccacacggagcacccacagccatgctcaagcccattcttatcccacggacaaacggggcctccagatgtttcggactgaggagggggttatcacatcaatatggatcaggatgacctgggggagcggggctcatctgggagcccccagaaaggaaatgcagaggttgccctcagggccaaaagtacacagcccttctgggacaagacagctgcaggatgctcactgagtccccgctgcagggtgtgctgatgaagct

SEQ ID NO: 1241847 - DNA, 4001 bp, Homo sapiens
caagaaatatttttttgaataaaggaagaaaggaaggaaataagaaatttccacaagataaaagaacactcaagattttcaggctggaaatgtaccaatctcttggcttagtactatgtaggagggcatagatacaatactatattcacgtttcaaatgaccaaatcataactaaaatctaactggggaaaaaaaaggtaaggcaggtatttaacttactttaagagtttataatatgcaaatcggaacatttcttggatatagacagagacaaacgctccaaagatcagcagatatttctgtgttggtccatctttgttgtcaataatgactcttgccatgaaccaaacaagggacgaaatcagtagagacaccaaccagaagaaagctctgaaaaatacgggaaaaaaagttacaagtgaacatcagtacaggattaataatgtttaaaagcaggaaaaaaaaaaaaacctgcttgagaaggaagagatttcttgacgtttcaataaggaaaagaaagtcctcataaagtgatactctgatcagttgttcttaacggtgcattttccttggtgagacaaacgtgtccaagaggaaggctgaggtttcccaacaattacttttttcaatgaccctgctacttgcaagtacatctgcagactctatctgccaaggactatctagctagaaacttggttatttgctactctttctaatcaatgctctgcccattgatgagccaaaacaagaaaatacacaaccctgattactgcaattttcatattcttaaaacttacaagaaattatggatttactgatcagatatctgcaaagatgagtatcttttccagaaaaatatctacatctctattaataaagtgactggtataaaattcaacttgaaaacctgtgttctgatctggatcagtatccaagccctccaggtcttacagcacccctggggattctaatgattatagcaagctttacagacccttcccaaatctctattatttttaaaatgacatgcagcgaagcactttcaatacgtttgtgggaggtgaagaaacgcagaaaagcgggaatcattggcctagtctggtgccaagagagactcatcagaggaggggggatgtggtatgtgcaagtaagaggcaggtgatgactgcgatgggacaccagagtccggtatttaccaagctcccagaaggagacgcacagtcaggtgcttcggtgtttttacaggtttccacccttcggctgcacaacggaaccatccaaaaggagcttaaatttttttttttttttctgaagcccgaatcccatcccctagacattctgattcaatggatcggggtgggggtgggcatcggcatgttttaaagcacctggccacaggtgattctaataggcggaagtcgcgcactactatcctaaacgccaatggtttttaaccctttggggattacacatgcctttgagaatctgagggaaattagggactccccctccagaaaatgaaggatgcatatatgaacttatccataatttttttatacaactttagtagcttcacggatcactaaaccccacccatgagccccaggcaaaaggccctgacccccagtgtgcgcttcttcctaagagggcgaggcgcctttggggagccggatctccgctctccccctctcaaccctcctcccgtctgaaacgcaacaaggtcgagccgcgcggtgggggcgccgagggtcgcgggtaaccccagcgggggaggggagccccggcgtccgggtttcccgacgcgaccgcctcacccggcgatgaggaagatgatacgcaacggctcggtggcgatggtgaagacataaagggcgagcgcaggcccgaaggcaatgaaggcgcagccgaagaacacggccgcagtcatggccaccgcggaaaccgacccgggggcccgttggggacgcgagatgctcccggcgcgggcggggttcggtgggtggggctcggggtggggggctaagcgggacgcggggggcggggcgcggctcatgggcaggcacggggacgggggcggggctcgggggcggggcacgtgggggcgggggcggggctcggaggcggggtacgtgggtcgcggggcgaggcggggcgtgggggtaaacgctagggcctgggggactgggcggggcgtgggctgagggcgccgggcgcaggggcgggctcaaggcggtgagcgcggaccccaccgttgggccctccgccctaccgggtgtccggaagcgccagggccacgccgcagctcctgctcccgaggcgggcgtcctcggcgacgttagggccccagccatcgccgcagccccacagatacactccgatcgggttccagtgccggccgcgaggtggttaagagaagggaagctccctagcccaccttcgagccgcatgcaccgagaacaggcagagattccaagtcaaccaaagagactaaacaaaaatgtagcgcaggaacaagcaggattcctttttaaataggtttttttttttttttaagcacattttaccgtttggatagttgcgggaacttcgtactccatcctgtataaaacctaggctgggatagcagtgaccccggggataacccacagatggtaaaatgatgaaagagtggtggaagaagctgcccttctcagggctgtttcagccaaatggtttttatttttttcccaattcttcaaaagggttgtttttgcaggcattctgtgaccaccctacaagcaatagtaacatctccctgctccgtcttctcacagtcgtccatttcacttgcttatttttcttccccgttaaaacgcgaactcctgggggacagggactttgctttgctctttgttgtttcctcagcacctagaagttcactaatatctgttcaataagtgaaataatttaaaaggtggaagttataaacatctatattaacaatttctgaaaggtttaaaaattaaaacttaagttctctgatcattcacatccaagttagatttttctttatgttgaataatacttcgtcggttattttgatcagtgtgcctgacacaggtaagtgctatgtaagtattaaccactcctacataatgtccatcatgaataaagattttggcaatccacatttaaaaaaacaccagtagacaaatgttgggacctgacagatgttttgcagctcgcccctgaaaatgcaccttcaaataatacaactgcaggtatttaattcttacagaaaaacattacctttgcccatttaaaagtcatatatatttccattcactcccacagaatacttcttcagattccagtgattgtattttgaatggtcagatcccagcacaatacctatcaaaactcgggtcgagacaacagttcagagtgatagatctgctttgtaaagatatggaaaatgagcttccagactggaggtcctcagtgcaacgcaggcatgagatggcagtggcctgattcagggaattagcaggactctggagggaagcagacaaatttaatagaagtttaggaattgtacaaacagaatttagtgactaatgagctacatagagtgagatgggggaagagtcaaggatgagggcttctagagggttcgggcttaagtggatgctgtggagacaggaggaggagagaatatggcaaagtagacacgataatgagtaccattttgttattttgttgttactgttttggagacatagtctcactctgtcgcccaggctggagtgcagtggtgtgatctcagctcactgcaacctctgcctcccgagttcaagcaattatcctgcctcagcctccagagtagctgggactataggcacgcgccaccatgcctgggttattttcgtattttagtagagacagtgtgaacaatgttggccaggccagtctcgaactcctggcctcaagtgacttgcccacctcggcctcccaaagtgctg

SEQ ID NO: 1241848 - DNA, 4001 bp, Homo sapiens
aaaaaaaaaaaagatgtgtagttcatttcctcctctgttttctgcagagcactaagaattgtaactgaatttgcttcacttttctgactcactcgtcactgtgaggctgtaatcactctgtattgacaactgcttctttggggccagattgtcaagtaacatgacagaggggtctcagtctcactaagaaagattttccagtaagcagtgaccgggaatcataagaatcactgactttcatcttctctcttttatttcttttattttagttagaaataactacttacataatgtcttactacataatgtcttgctacattatgacagtgagtgtggtcagagcagccaggaatgaatgccaagggaagatgaggagtgcaagaaattgtccgtaactccctgaaaatactgtaacgaatctggtctaatgtgtttctcagagaccagaaaacttatgactctctcttcacattccactagttcaattttttgagttcacatttgtttctcattcttggcttagctgatgcattccaagcttattcttctaaattattatgtatttgccccaagcaaagaacttttaatgcacagagtttatgggctattctctataactttaaggaaaatgaaattatttatacctggagtaggaaatccttaagcaggataaaaaaaaccagttgaaatcaatagttgccacatgataatacatttctattcacaaatggcctggttccaggtaaaacttcaggatacagagaatgctagaacgtgcagcaaaatgaaagcccagaccacttaagtaaactttccagtctcttgttaatagctgagtaaatctctgggcaatcctcaagaggttcttagaagtcgtccctcgtttatatctagaaggttcttgtaattgtcttgtaaatctccaaagatatttagagattactttgctttaaatagagaccaaaaatgacacaaaactaaagctggactattgcctggtacactatttctacctagtgcaatttttaatttcttaaaaatcaagtgatctgacagcacaatacttgtcaagtacttgtcatactgagatgtttcttgccatccatatgtatatttttgccaactatatttattgactattgatgcttattccaggtggctgagtcaccccaatgcttggaggaagcaagcagggtacaaatcaattgatcaatgaaaacactaacgactgacttttaaatcacaaagccattttagagtataagtaaatacctgaaataaagaaggcacttcactcactccttctcttccattcccatcaacttttgtgggtaaatgcaataggtaattgaaaacttaatatcacaacccctaaatagtcaaacagcctctagtaacttgtttcttcctggaaaagatgaatctgatcccaattaacttaaataaaacaaaccaaacaaaactctccactaccagcctggcagctagggaggcattattgggtctgaatgtaggaaatcaggaaatacttacaatcaagatgaacgtgcccaagaactcagagagggtttctttcgctaagctgctcttcaagaccagtctctgcttgaagctttttcccttttctgctccctcaggctgcatcttggggcttctctgaggactcctgtttctaccaatacctacctgttgtggtcctcactttcacagccagatgaaaatggacgttttgacaatggctcacagattcctggagatgtctggtaagagtctctgactgtacaaatgccgttccaattagaggctgtggcttaatcgtcttctggtggaactgtcattccctgttcgctgctatttgtttgaatctgcgacttagaacccgaaatccccaaaacaatcccttttgtgcctgacagattaatcattacctttattctcaaggtacttttttctctgttggtttttttcaagagatgagaaaagagatgtgccagttgtgttgccaaatcacagtgacgggccctggtccagaaaagattttcatgttacacaattgcaggcttctgatttttttttcttctcattcagaagtgggtggttggggtgtagtttggaactgtcaaatcaggtgtagatatatccaatgttaacattcttttctgaaaaaggtttttatgcaaaatgaagaatttgaagaaaatatagatttatcatcctagaagattaatcactcttgttttcttctggtatcatttcagtggcttcatgataccactctgaggttagtaagaaccacataggccatcctagagatggagaaattaacatacagagaaaccattgcaagcttcacactgcaagtctgtaggacagatggagtcacctcttcggttatgaaactgggcttcacttgctgaagatactttaggatccaagaatcagaaagatggaggagtcacctttttggtgacttctgaagtttcttctgaagaaacattccagtttgggtttcttctgaagaagcattccagtttgaaaatagtcactcttcttcattcaccatgaaatatttagacataatacataggaaataaacaatagcagcttgaaattctttactgcatggagatgactgagccggaaagagatcaattagcgtgtatgtcattctaatcaaacgagaaagggagccagtacacctaaccgaggctcctaggttataccctttcaatttgataaattgacatccttgctggcaagaaactgtgtttgggagtagctccttgtcctgccaaatattcaagccttgtttttcaaaactggcttatctgaagaaatagaatatagcattagtttctaaatagcaaggcaggcctagtttctgattaccaatgtggactcatggaattagtatccatgctgtgtggttccttccagtcctcccacagggaagccagctctgcatcaggccctcccctagctttgcaaaaagggagggaggagaggacatggagaaagcagctggtgagaggccaaaggcagaaggagacttctcatctgtaggtgacatttagaatttagactttaaaaagttataacctgcctgaggccacactactgcagaaccaggacaaaacctcagcactttggctttaattcctgatgaagttatcataaataccattgtctagaagagttacctatgaccacaccattaccaagtcccagtggatggaccagagaaacaggactttcttactgtgactacagctaataacatgcaagagcgttctctggtcttcccattcactcatctaacaactatttactgcacactcattatgtgccaagcactgcacttaacaagagcacatagggttcttgtccttcacagagcctagagtctagtgaagcagacagatgtaagtgaaataatcccacacacataaatacaaaatcacaactgagatgtatgctgcaaagatgggggccatatttccataagcaaatatagcaaaaggatttgactttgttggagagatctctgatggcttctccaaggaagtcatgtgtggactgagatcagaaagaagcatgggattaactacatgaagtggggaagaaagtgcatgtacaaagtccttggtggctttgggggtaaggggtaggggacagcatgatgcctctcaaagaatgagagaaatttactgtggttggccccagagagagtgaaggagtacagcatgcaaaatgagccctgaggtgtgggcaagggtcagaccttactaggccttgtaagtggtagttagggctaaaagtgtaagtcattaaggtggtttaagcagaaatacgacatgatcagattagagttttgaaaagatcctccgagctgtgaggtggagaggggattggagggggcttggaatggtcataggcagatacatttgggggtattacagaattccagaattgggtggtagtttgacagtggagaaatggag

SEQ ID NO: 1241849 - DNA, 4001 bp, Homo sapiens
aattctttaaagatttctttttttttgcttcgtttttagacggagttttgctcttgttgcccaggctggagtgcaatggtgcgatcttggctcattgcaacctccgcctcccgggttcaagcaattctcctgcctcagcctcccgagtagctgggattacaggcatgcaccaccaagcctgcctacttttgtatttttagtagagacagggtttctccatgttggtcaggctggtctcgaactcccgacctcaggtgatcgacctgccacggcctcccaaagtgctgggattacaggcatgagccatcgcgcccggctgaagattttaaggacagccagccttagtgtagtccctgtagtcctagctacaagggaggctgaggtggaaggctcactggagcccagccaacatagtgagaccctatcttgaaagaagaaaaggaaggaaaggaaggaagagatttttttttttttttgagacggagtctcgcactgttgcccaggctggagtgcagtggcgcgatctcggctcactgcaagctccgcctcccgggttcacgccattctcctgcctcagcctcccgagtagctgggaccaaaggcacctgccaccatgcccggctaattttttttctttttatttttagtagagacggggtttcaccgtgttagccaggatggtctcgatctcctgacctcgtgatccgcccgcctcggcctcccaaagtgctgggattacaggcgtgagcccctgcgcccggccggaaggcagaaattttaagaaggcaagtgatatgatgagatttgcacttgtatgaaatcactcggaaagcaacatgaagaatgggctagagcagagcaagaggaaggacaatataacagattacgataccttggtccaggcagaaaacaatggcaaccaagcttagggtgacagagatgtagaacaccagatagattcaaaagatatttagaatgtagaaatgtagggactaagggaaagggaggattcaaaatcactccctaggcttctgccctggcaaatctgttgagacaaggaataaagaataaagaagcaggtgggcatgataacttctacattgaactacttacactcttatgcaattcacaaataaataataagaatgaggaatgatgctgacaaccacaggactgtggttccctatccaaagccaactgtggctcacaatgcaagatagtaaacagattctaaatgaacgctctcaaactacagaattactctgtttttagataggtctatttggaggtgtcttgtcagtttctcatcgctgctcaaaaactcaggacactctaaggaccaggaaaaagcctactcctacttgaagaggcagtccagcatcactctgctgcgaagcctacttgccagtctcagatagactggggtgttccctcctctctgaatccattgctcctgagacaaactccaacacagcaaaactcatacagtagttttattttcatgcgtctgtcttccttgggccatgaactccccagggcagggcagcttctttcaccacggtatgcccagcacctagcatagtggccggcacggagctgatactcagtaaaaagacgtgtgtgaatcaattaacaaacgaatgcctcctccggactcctaaatcctgaaaaaaaaccccaccaccaggcctcggggccacgacgtccatacccactcacacacaccagactcgcccgagctcacctgggtcacgaactccgcattgatttgggacaccgtaggggccacgatcttcttgggctgcgcaggggctgccatggcagcactcttccctccactccagtggaaactaaaggaccgctctgggcagcggcaaccctggtccacttcccttaagttactgccggggcgcttaactccgcgccgcacaaacgctccgggccggatatcctcagccttcagagtcccgtagggaacccgtacaacagcccaagcgttcctcgggaagcggaatggcgtgtagccggaagttcatgcaggcgttggggctgagctagcgagccaagagctttgacctcctctgtacacgccctctagcgggcggcagagagaagacacctcgctggcgggattaggagggcaagggagggacccggtggatggtgttgggtggggtttctcgtggttagtgaagagtgccgtgtgcggtgaatggggatttagttttttttcaaccctaaagaaaaaacaaaacaaaacaaaaaaaacagcctgggaatatgggctgggttttaactgcccttaacagtgttttagtttagttttgttttttttgagacggagtttcgctcttgttgcccaggctgcaatgcaatggtgcaatctcggctcacagcaacctctgcctcccgggttcaagcgattctcctgcctcagcctcccgtgttgttgggattacaggcatgcgccaccatgcacagctaatttttgtatttttagtagacacagggtttctccgtattggtcaggctggtctcgaactcaccaactttaggtaatccgcctgcctcagggtcccaaagtgcagggattacaggccttaacagttttatggaggtaaaaattgacatacaataacccagccaggcgcggtagtcacgcctgtaatcccagcgttttgggaggctgaagctggccgattgcctgaggtcaggagtttgagaccagcctggctaacatggtgaaaacccatctctactaaaaaacaaaatttagccgggcgtggtggcgcgcgcctgtagttccagctactcggattcaggagaataatcacttgaagctgggaggcggaggttgcagtgagccgagattgcgccattgcactccagcttggtgacagagcgagactagcctcaaaaaataaaaataaaataataataaaaataattcacatacaataacccacacatatttaggttgtaaaatttgatgcgttttgacatgaacatacatttgtgaaactattgccaaaatcataatgagcatatcaaagcctctaaaagtttcctcgtgaacttttgctatctgtgcctttcactgttcccacccacttttcaggcaaccactgatctgctttctgtcactatagtttgcttttcatggaattttatataaatgaaataatacagtgcatgccttctttcactcaacgaaatgattttgagatggattcatgttgttgcatgtatcagtagttcattccttttttattgcttaacattcgttccattttactgatataccacagtttgataaactattcatctgctgatagacatttgagttgttccaagttctcagttattacaaataaagccactatgagcatttgtgtataagtcttcatgtggacatatacttcctttgctcttaaatacttaggagtgaaatatttgggttatacgataggtgtgtttgtttgtttgttgtttgtttgagatggagtcttgctctgtcgcccgggctggagtgcaatggcgtgatctcggatcactgcaacctctgcctcctgggatcaagagattctcctgcctcaggctcctgagtagctgggattacaggcaacgcgccatcacacctgactagtttttgtatttttagtagagacggggtttcaccatgttggtcaggctggtcttgaactcctaagctcgtgatctgcccactttgacctcccaaagtgctgggattacaggcataagccactgcacccggcaagtatatgtttaagtttttagaaactgccatctttctaaagtagtactattttacattcacatcaggagcatataattctagtttgttctccacctcgtcaacacttaatatggacaattttttttaaatttttaagttcaagggcacatgtgcaggatgggcaggtttgttacataggtaaaggtgtgtcataggggttcattgtacaaattatttcatcact

SEQ ID NO: 1241850 - DNA, 4001 bp, Homo sapiens
aaattaggcacataaatttaaaataaaatgctttacattcagcttatttttcacaatggaattcctgattatgtggcagagctattaaaatctcattcaaaatccctttatttcaaccaccaaaacatcaacaacttctcaattattccactctggcttctcaatttactcatacaaaaaaaaatttactgtcccaaaagtatgacatggccaagcagcaaatctgtttcccaaattagtgaatatgcagtcatcatttgaagcctatttctaatgttctgtcatacttcttcatctacagattcatgtagaaaatgcactggtctcccttgtccctctacaaccttactctaaaacaagggtggaggggtagagtttttgtccctcccaacgtactacctgttccaaatacagtaagctggcaatatccggagacatttttaattgtcacaactgagagatgctaccagcatctagtgggtaaaagacagacatcccgctaaacatcccacaattcacagaacagcatttcgtcttcccctaacaaaaattatctaatccaaaatgtcaatagtgctgaagttggaaaatcctgcaactttctctcaatgatcaaaaatccttgggggaaaaaaaacaagaatgtcactttttaaatatcagcaatcgaccatctgaactgaattacacacctaaccattctttttgatacacagagtgaacattttagcacgatctggtagtaagtgatgataaagggtgtgccctttcttttaaacctaaatcccttttcacagaacttacccctatttccgtggctgctgtttcatgtctcctgcgatcgcactgcccacggacacccttcaccttaataccatagaaggcccgcagatgctgcaacagggccaacctcaccagcctctgatcccacattccggatacgtcgataactctctgaggcaggatgcaggtcctgaccctcgttcgccaccaagtcttccaatttccaaacgctctcaaatttgaactccgctcggctgctttccggccccgtctggcacttctgcggccccgacccccggccacttccacggcttttccttgatcctcactcacatccacttacacagacccgcttctcttagccctttgatccagccacacctcactcttccttcacttacaccgaccttctttctggtcacccaatgctttcagctactcacatagacttctttctgattctttcggtttctcgtctattgccagattctctccacttcttgctacttccaacgatcccccttcctccaaaccttactgtccccgtctggttcgctctgaaatgtgaagaaaacccttctcgctcctccagccccagcaggctcaactgggcgctcgcccccgccctagcctggccgccggaccagccggctgctcaggcaactcttccagtcccggtgcccgcccgggctggtagccgccgtcaccccgtctcacaggctgctcgttccctcccccatcagcctgcctctacctcccggcctgcacatcccggtgcgttcactgaagccaagccgttagcctcatgcttccgcccccagctcctccgcagacacccagagccaccacgggggggtcacacccgcagtttcagcccaggctcaaatggcagcgcgaaacagcgctccacatctgattggtccactcctcttttcaaaatcaggaccccggagggtggccgagagctgcctgtctagataagtgcgggcgaaggggtgtaacgggcaaacccagcaaacatgaaaagcaggatgagtttcacttgttccttcaaggccagtttttggggcgggggaatactgtttaaaggtttttaaatacacctgacctgcgcctcagaccattcacagtatttgaggaaatataaaagacaacttattcccgttcttttccgagcttggctgtcgctgaaggccctcttatgaagaaaccgttcttacggaagcccagatgagacaacttgagacaggattcagaaacgctgattttagtaaccttaaccctcggcccttggtgggaacttcggctctgtgggaattagtctttgggggactgatggtcatgctgaaatcttattgcgtaggaaattaagtacaacaaagaagacccgtcgtgagaggagagtgcggaagaaatgcgaagtctacgggaggtggcagctgcagaagcttggtgttggatttggcgttaggagaccgggaggagcccagcttccggtccagacggttatcttgttgacttgcacgactgcaaacgccctgagctgcttttgcagtctgaaacatcagcgatcccatcaaaatattctgtttcttgggatataagaaacatcccaaggcgggctgtagagcgagagatttggactcgatttaaatacagacaaaatagtatgcatttactaacaccacatctcacccccacgaaacttggtaagggcagcaacagaactttatctgccatatgcactcctgtattcctattaccaaatagtgccagggactaagtgaatatttgtccaatgaatgagttttaagtaggaaacgtttgcatagaatcattttgtttcttttggagttcaaatcttcggatattttacccttcccaatccaaagaaaagtctctgagtgaagagatgggaacaaaatgtaagttaaatatgttgctttaacaactgtttattgaactcgtgctatagactatagaatgatgagcaaaaccaggcacagtttcggccctggaagaggaaaggcaggcatatatttatcaagtaagtacattaatggcggcacttatcagttgagagaagtgcgctaaggaaaggaatatgattctatgatagcgtataataaaagatccttgaccggggaggggaaacgtaccagtgattaactgatctgaagaatcagtataaattgactttgtagaaagtataggtggatggctgagtgggaccatcattcaggaagcaaatgcctgcagaaaaaaacatcaattttaacaagaaacggtgtatcagagatgaaactgaacctattccttgtcttttcttcttgcttcagacataactttaaaaaattgcttacgctgtctttagccacatctcttccccaaactccacactgttcggcgttttagccgtctcaaatttccttttcttaaagacccatgacaatcttcagtgttgtgtctttttctacgtcgtgatccttttttaaagctgagctcttcttgtttttcgtctcctttctctttttttttttttttttttgtgatggagtctcgctctgtcgcccaggctggagtgcagttgcacaatttcggctcactgcaaactccacctcccacgttcaagcaattctctgcctcagcctcccaagcagctgggattacaggcgtctgccagcaggcccggctaatttttgtatgtttagtagagacggtgtttcaccattttggccaggctggtcctgaactcctgacctcgtgatccacccgcctcggcctcccaaagtgctgggattacaggtgtgagccaccacatccggcccttcctttctcttaagatgaaaatattggttcttttttcctacacacaaggaggcaatgaaaatattggttcttttcattgccttattattaatgttactattaataaatattaatattaacataatggttatttgcttcatctacctatattcacaggtatataaacacaacaatagcaataacaggataaagaataaaaacagaataacaatagagatattgctaacagataaatgaagtttaactttgcatgtacttccttttttctaaaattgtatccaactaaggatgtaaaatcaagatactgtgttttaaatgaactgggcataattattctttttggttatatatggatgtactgtagtttatttagccaggcccttactagt

SEQ ID NO: 1241851 - DNA, 4001 bp, Homo sapiens
caaaaaaaaaaaaaaaaaaggaaaagaaaagaaaaggggtgaaaaaaagtccatatacaaactcttccatatacttacaaaatcagctacatttgagatcttggaaagccagttttacaatcagaaaaaaatcactgtagctttttaaatgtaagtacatgtattgccattaatttgctaccaacaaaaataacttctccaaagtttatcagcgattaagaggcacacatattacttttgttagtggttttcttctccaagcactttttttaagaaaccataaactattaaaagcaacgtatattaattttattagcttgtctccaagtactaggaagtaccatataaattaggcacataaatttaaaataaaatgctttacattcagcttatttttcacaatggaattcctgattatgtggcagagctattaaaatctcattcaaaatccctttatttcaaccaccaaaacatcaacaacttctcaattattccactctggcttctcaatttactcatacaaaaaaaaatttactgtcccaaaagtatgacatggccaagcagcaaatctgtttcccaaattagtgaatatgcagtcatcatttgaagcctatttctaatgttctgtcatacttcttcatctacagattcatgtagaaaatgcactggtctcccttgtccctctacaaccttactctaaaacaagggtggaggggtagagtttttgtccctcccaacgtactacctgttccaaatacagtaagctggcaatatccggagacatttttaattgtcacaactgagagatgctaccagcatctagtgggtaaaagacagacatcccgctaaacatcccacaattcacagaacagcatttcgtcttcccctaacaaaaattatctaatccaaaatgtcaatagtgctgaagttggaaaatcctgcaactttctctcaatgatcaaaaatccttgggggaaaaaaaacaagaatgtcactttttaaatatcagcaatcgaccatctgaactgaattacacacctaaccattctttttgatacacagagtgaacattttagcacgatctggtagtaagtgatgataaagggtgtgccctttcttttaaacctaaatcccttttcacagaacttacccctatttccgtggctgctgtttcatgtctcctgcgatcgcactgcccacggacacccttcaccttaataccatagaaggcccgcagatgctgcaacagggccaacctcaccagcctctgatcccacattccggatacgtcgataactctctgaggcaggatgcaggtcctgaccctcgttcgccaccaagtcttccaatttccaaacgctctcaaatttgaactccgctcggctgctttccggccccgtctggcacttctgcggccccgacccccggccacttccacggcttttccttgatcctcactcacatccacttacacagacccgcttctcttagccctttgatccagccacacctcactcttccttcacttacaccgaccttctttctggtcacccaatgctttcagctactcacatagacttctttctgattctttcggtttctcgtctattgccagattctctccacttcttgctacttccaacgatcccccttcctccaaaccttactgtccccgtctggttcgctctgaaatgtgaagaaaacccttctcgctcctccagccccagcaggctcaactgggcgctcgcccccgccctagcctggccgccggaccagccggctgctcaggcaactcttccagtcccggtgcccgcccgggctggtagccgccgtcaccccgtctcacaggctgctcgttccctcccccatcagcctgcctctacctcccggcctgcacatcccggtgcgttcactgaagccaagccgttagcctcatgcttccgcccccagctcctccgcagacacccagagccaccacgggggggtcacacccgcagtttcagcccaggctcaaatggcagcgcgaaacagcgctccacatctgattggtccactcctcttttcaaaatcaggaccccggagggtggccgagagctgcctgtctagataagtgcgggcgaaggggtgtaacgggcaaacccagcaaacatgaaaagcaggatgagtttcacttgttccttcaaggccagtttttggggcgggggaatactgtttaaaggtttttaaatacacctgacctgcgcctcagaccattcacagtatttgaggaaatataaaagacaacttattcccgttcttttccgagcttggctgtcgctgaaggccctcttatgaagaaaccgttcttacggaagcccagatgagacaacttgagacaggattcagaaacgctgattttagtaaccttaaccctcggcccttggtgggaacttcggctctgtgggaattagtctttgggggactgatggtcatgctgaaatcttattgcgtaggaaattaagtacaacaaagaagacccgtcgtgagaggagagtgcggaagaaatgcgaagtctacgggaggtggcagctgcagaagcttggtgttggatttggcgttaggagaccgggaggagcccagcttccggtccagacggttatcttgttgacttgcacgactgcaaacgccctgagctgcttttgcagtctgaaacatcagcgatcccatcaaaatattctgtttcttgggatataagaaacatcccaaggcgggctgtagagcgagagatttggactcgatttaaatacagacaaaatagtatgcatttactaacaccacatctcacccccacgaaacttggtaagggcagcaacagaactttatctgccatatgcactcctgtattcctattaccaaatagtgccagggactaagtgaatatttgtccaatgaatgagttttaagtaggaaacgtttgcatagaatcattttgtttcttttggagttcaaatcttcggatattttacccttcccaatccaaagaaaagtctctgagtgaagagatgggaacaaaatgtaagttaaatatgttgctttaacaactgtttattgaactcgtgctatagactatagaatgatgagcaaaaccaggcacagtttcggccctggaagaggaaaggcaggcatatatttatcaagtaagtacattaatggcggcacttatcagttgagagaagtgcgctaaggaaaggaatatgattctatgatagcgtataataaaagatccttgaccggggaggggaaacgtaccagtgattaactgatctgaagaatcagtataaattgactttgtagaaagtataggtggatggctgagtgggaccatcattcaggaagcaaatgcctgcagaaaaaaacatcaattttaacaagaaacggtgtatcagagatgaaactgaacctattccttgtcttttcttcttgcttcagacataactttaaaaaattgcttacgctgtctttagccacatctcttccccaaactccacactgttcggcgttttagccgtctcaaatttccttttcttaaagacccatgacaatcttcagtgttgtgtctttttctacgtcgtgatccttttttaaagctgagctcttcttgtttttcgtctcctttctctttttttttttttttttttgtgatggagtctcgctctgtcgcccaggctggagtgcagttgcacaatttcggctcactgcaaactccacctcccacgttcaagcaattctctgcctcagcctcccaagcagctgggattacaggcgtctgccagcaggcccggctaatttttgtatgtttagtagagacggtgtttcaccattttggccaggctggtcctgaactcctgacctcgtgatccacccgcctcggcctcccaaagtgctgggattacaggtgtgagccaccacatccggcccttcctttctcttaagatgaaaatattggttcttttttcctacac

SEQ ID NO: 1241852 - DNA, 4001 bp, Homo sapiens
aatttatatggcgtgattaccaattaggaggcagaccaatgatatgacaactatcattagatgaagtggcatgtgacacgcactgtgctaggcctacataaagagcttcactttttaaaaatccctaaataatccaaggagaaatacgttcccactttatagatataaaactgaagcttagggaaatcaaacaagcagcccaagtttacagatgtagtaggggtggaacagcactcaaactcaggtctatccgactctgaaaacaggcaacagtttttcttgttaaggggtgaaaaggacaggtgcagtggctcacgcctgcaatcccaccactttgggaggccgaggcgggcggatcacgagggcaggagatcgagaccatcctggctaacacagtgaaaccccgtctctactaaaaaatacaaaaaattagccaggtgtggtggcggacgcctgtagttccagctactcgggaagctgaggcaggagaatggcgtgaacccgggaggcggagcttgcagtgagccaagatcgcgccactgcactccagcctgggcgacagagggagactccatctcaaaaacaaaaaaaaaaaaaggaaaagaaaagaaaaggggtgaaaaaaagtccatatacaaactcttccatatacttacaaaatcagctacatttgagatcttggaaagccagttttacaatcagaaaaaaatcactgtagctttttaaatgtaagtacatgtattgccattaatttgctaccaacaaaaataacttctccaaagtttatcagcgattaagagacacacatattacttttgttagtggttttcttctccaagcacttttttttagaaaccataaactattaaaagcaacgtatattaactttattagcttgtctccaagtactaggaagtaccatataaattaggcacataaatttaaaataaaatgctttacattcagcttatttttcacaatgcaattcctgattatgtggcagagctattaaaatctcattcaaaatccctttatttcaaccaccaaaacatcaacaacttctcaattattccactctggcttctcaatttactcatacaaaaaaaaaaattgctgtcccaaaagtatgatatggccaagcagcaaatctgtttcccaaattagtgaatatgcagtcatcatttgaagcctatttctaatgttctgtcatacttcatctacagattcatgtagaaaatgcactggtctcccttgtccctctacaaccttactctaaaacaagggtggaggggtagagtttttgtccctcccaacgtactacctgttccaaatacagtaagctggcaatatccggagacatttttaatcgtcacaactgagagatgctaccagcatctagtgggtaaaagacagacatcccgctaaacatcccacaattcacagaacagcatttcgtcttcccctaacaaaaattatctaatccaaaatgtcaatagtgctgaagttggaaaatcctgcaactttctctcaatgatcaaaaatccttggggaaaaaaaaaacaagaatgtcactttttaaatatcagcaatcgatcatctgaactgaattacacacctaaccattctttttgatacacagagtgaacattttagcacgatctgctaataagtgatgataaagggtgtgccctttcttttaaacctaaatcccttttcacagaacttacccctatttccgtggctgctgtttcatgtctcctgcgatcgcactgcccacggacacccttcaccttaataccatagaaggcccgcagatgctgcaacagggccaacttcaccagcctctgatcccacattccggatacgtcgataactctgaggcaggatgcaggtcctgaccctcgttcgccaccaagtcttccaatttccaaacgctctcaaatttgaactccgctcggctgctttccggccccgtctggcacttctgcggccccgacccccggccacttccacggcttttccttgatcctcactcacatccacttacacagacccgcttctcttagccctttgatccagccacacctcactcttccttcacttacagcgaccttctttctggtcacccaatgctttcagctactcacatagacttctttctgattctttcggtttctcgcctattgccagattctctccacttcctgctacttccaacgatcccccttcctccaaaccttactgtccgtctggttcgctctgaaatgtgaagagaacccttctcgctcctccagccccagcaggctcaactgggcgctcgcccccgccctagcctggccgccggaccagccggctgctcaggcaactcttccagtcccggtgcccgcccgggctggtagccgccgtcaccccgtctcacaggctgctcgttccctcccccatcagcctgcctctacctcccggcctgcacatcccggtgcgttcactgaagccaagccgttagcctcatgcttccgcccccagctccactgcagacacccggagccaccacgggggggtcacacccgcagtttcagcccaggctcaaatggcagcgccaaacagcgctccacatctgattggtccactcctcttttcaaaatcaggaccccggagggtggccgagagctgcctgtctagataggtgcgggcgaaggggtgtaacgggcaaacccagcaaacatgaaaagcaggatgagtttcacttgttccttcaaggccagtttttggggcgggggaatactgtttaaaggtttttaaatacacctgacctgcgcctcagaccattcacagtatttgaggaaatgtaagagacaacttattcccgttcttttccgagctcggctgtcgctgaaggccctcttacgaagaaaccgttctacggaagcccagttgagacaacttgagacaggattcagaaacgctgattttagtaaccttaaccctcggcctttggtgggaacttcggctctgtgggaattagtctttgggggactgatggtgatgctgaaatcttattgcgtaggaaattaagtacaacaaagaagacccgtcgtgagaggagagtgcggaagaaatgcgaagtctacgggaggtggcagctgcagaagcttggtgttggatttggagttaggagaccgggaggagcccagcttccggtccagacggttatcttgttgacttgcacgactgcaaacgccctgagctgcttttgcagtctgaaacatcagcgatcccatcaaaatattctgtttcttgggatataagaaacatcccaaggcgggctgtagagcgagagatttggactcgatttaaatacagacaaaatagtatgcatttactaacaccacatctcacccccacgaaacttggtaagggcagcaacagaactttatctgccatatgcactcctgtattcctattaccaaatagtgccagggactaagtgaatatttgcccaatgaatgagttttaagtaggaaacgtttgcatagaatcattttgtttcttttggagttcaaatcttcggatattttacccttcccaatccaaagaaaagtctctgagtgaagagatgggaacaaaatgtaagttaaatatgttgctttaacaactgtttattgaactcgtgctatatactgtagaatgatgagcaaaaccaggcacagtttcggccctggaagaggaaaggcaggcatatatttatcaagtaagtacattaatggcggcacttatcagttgagagaagtgcgctaaggaaaggaatatgattctatgatagcgtataataaaagatccttgaccggggaggggaaacgtaccagtgattaactgatctgaagaatcagtataaattgactttgtagaaagtataggtggatggctgagtgggaccatcattcaggaagcaaatgcctgcagaaaaaaacatcaattttaacaagaaacagtgtatcagagat

SEQ ID NO: 1241853 - DNA, 4001 bp, Homo sapiens
atatggcatgattaccaattaggaggcagaccaatgatatgacaactatcattagatgaagaagtggcatgttacccgcactgtgctaggcctacataaagagcttcactttttaaaaatccctaaataatccaaggagaaatacgttcccactttatatatataaaactgaagcttagggaaatcaaacaagcagcccaagtttacagatgtagtaggggtggaacagcactcaaactcaggtctatctgactctgaaaacaggcaacagtttttcttgttaagcggtgaaaaggccgagtgcagtggctcacgcctgccatcccaccactttgggaggccgaggcgggcggatcacgagggcaggagatcgagaccatcctggctaacacggtgaaatcccgtctctactaaaaaatacaaaaaattagccaggtgtggtggcgggcgcctgtagtcccagctactcgggaagctgaggcaggagaatggcgtgaacccgggaggcagagcttgcagtgagccaagatcgcgccactgcactccagcctgggcgacagagggagactccatctcaaaaaaaaaaaaaaaaaaggaaaagaaaagaaaaggggtgaaaaaaagtccatatacaaactcttccatatacttacaaaatcagctacatttgagatcttggaaagccagttttacaatcagaaaaaaatcactgtagctttttaaatgtaagtacatgtattgccattaatttgctaccaacaaaaataacttctccaaagtttatcagcgattaagaggcacacatattacttttgttagtggttttcttctccaagcactttttttaagaaaccataaactattaaaagcaacgtatattaattttattagcttgtctccaagtactaggaagtaccatataaattaggcacataaatttaaaataaaatgctttacattcagcttatttttcacaatggaattcctgattatgtggcagagctattaaaatctcattcaaaatccctttatttcaaccaccaaaacatcaacaacttctcaattattccactctggcttctcaatttactcatacaaaaaaaaatttactgtcccaaaagtatgacatggccaagcagcaaatctgtttcccaaattagtgaatatgcagtcatcatttgaagcctatttctaatgttctgtcatacttcttcatctacagattcatgtagaaaatgcactggtctcccttgtccctctacaaccttactctaaaacaagggtggaggggtagagtttttgtccctcccaacgtactacctgttccaaatacagtaagctggcaatatccggagacatttttaattgtcacaactgagagatgctaccagcatctagtgggtaaaagacagacatcccgctaaacatcccacaattcacagaacagcatttcgtcttcccctaacaaaaattatctaatccaaaatgtcaatagtgctgaagttggaaaatcctgcaactttctctcaatgatcaaaaatccttgggggaaaaaaaacaagaatgtcactttttaaatatcagcaatcgaccatctgaactgaattacacacctaaccattctttttgatacacagagtgaacattttagcacgatctggtagtaagtgatgataaagggtgtgccctttcttttaaacctaaatcccttttcacagaacttacccctatttccgtggctgctgtttcatgtctcctgcgatcgcactgcccacggacacccttcaccttaataccatagaaggcccgcagatgctgcaacagggccaacctcaccagcctctgatcccacattccggatacgtcgataactctctgaggcaggatgcaggtcctgaccctcgttcgccaccaagtcttccaatttccaaacgctctcaaatttgaactccgctcggctgctttccggccccgtctggcacttctgcggccccgacccccggccacttccacggcttttccttgatcctcactcacatccacttacacagacccgcttctcttagccctttgatccagccacacctcactcttccttcacttacaccgaccttctttctggtcacccaatgctttcagctactcacatagacttctttctgattctttcggtttctcgtctattgccagattctctccacttcttgctacttccaacgatcccccttcctccaaaccttactgtccccgtctggttcgctctgaaatgtgaagaaaacccttctcgctcctccagccccagcaggctcaactgggcgctcgcccccgccctagcctggccgccggaccagccggctgctcaggcaactcttccagtcccggtgcccgcccgggctggtagccgccgtcaccccgtctcacaggctgctcgttccctcccccatcagcctgcctctacctcccggcctgcacatcccggtgcgttcactgaagccaagccgttagcctcatgcttccgcccccagctcctccgcagacacccagagccaccacgggggggtcacacccgcagtttcagcccaggctcaaatggcagcgcgaaacagcgctccacatctgattggtccactcctcttttcaaaatcaggaccccggagggtggccgagagctgcctgtctagataagtgcgggcgaaggggtgtaacgggcaaacccagcaaacatgaaaagcaggatgagtttcacttgttccttcaaggccagtttttggggcgggggaatactgtttaaaggtttttaaatacacctgacctgcgcctcagaccattcacagtatttgaggaaatataaaagacaacttattcccgttcttttccgagcttggctgtcgctgaaggccctcttatgaagaaaccgttcttacggaagcccagatgagacaacttgagacaggattcagaaacgctgattttagtaaccttaaccctcggcccttggtgggaacttcggctctgtgggaattagtctttgggggactgatggtcatgctgaaatcttattgcgtaggaaattaagtacaacaaagaagacccgtcgtgagaggagagtgcggaagaaatgcgaagtctacgggaggtggcagctgcagaagcttggtgttggatttggcgttaggagaccgggaggagcccagcttccggtccagacggttatcttgttgacttgcacgactgcaaacgccctgagctgcttttgcagtctgaaacatcagcgatcccatcaaaatattctgtttcttgggatataagaaacatcccaaggcgggctgtagagcgagagatttggactcgatttaaatacagacaaaatagtatgcatttactaacaccacatctcacccccacgaaacttggtaagggcagcaacagaactttatctgccatatgcactcctgtattcctattaccaaatagtgccagggactaagtgaatatttgtccaatgaatgagttttaagtaggaaacgtttgcatagaatcattttgtttcttttggagttcaaatcttcggatattttacccttcccaatccaaagaaaagtctctgagtgaagagatgggaacaaaatgtaagttaaatatgttgctttaacaactgtttattgaactcgtgctatagactatagaatgatgagcaaaaccaggcacagtttcggccctggaagaggaaaggcaggcatatatttatcaagtaagtacattaatggcggcacttatcagttgagagaagtgcgctaaggaaaggaatatgattctatgatagcgtataataaaagatccttgaccggggaggggaaacgtaccagtgattaactgatctgaagaatcagtataaattgactttgtagaaagtataggtggatggctgagtgggaccatcattcaggaagcaaatgcctgcagaaaaaaacatcaattttaacaagaaacggtgtatcaga

SEQ ID NO: 1241854 - DNA, 4001 bp, Homo sapiens
aagaatccaatttcaacaacatgaaagaaacacgcaaggaggcaagagtctcaaattgcaatcgtcactcaaaagcaaacgggggaattcctctggagattttaaagttaattaatttgaaacagatatcaacattgtctgaacaacaagttaatgctgcttcttttttataaacagcgaagtaaatctcttcacatcccctttctttctgattcatttctattatgatattctctgacaaacacaaaaagaaaagtctttcgggccaaaagcattctgggggcaggtttatctgcattcttaccaatcagtctccaaacacacatcactttcacaccctcttctccttttactcccccacctctcccctgcaggccctcacccccaacaaacttcacttgagttatgtttcttcagcaagtctccataactgaatggattactatgcaagggcaattttaggtgaacaggacttgcaacatggcgtacaattttgtcatcacatgaaagaagctgcactgcacatgttgggacttgatatctgcattgttccagtgttttaggattgggtcgaaagacaaaaaacaaagtgtctttagtatcttcaaaaattcacggagaagtaatcacatcttcagcaataaaaactgcttggatttaagattttttccaggttagagtaaaaaagggtacaatttttaaagctaggccaattagtagagattaaaaattctcattttctgtttatcttatagccctgtttgtgccttttgtgttctgtgaaagattcgcattccaatttgcctcttactgcctttacttcctctcttggcacttcagaaagtgtgagttacgcttgcagcaatactttcattctgctttagctcttcttacagtgtaaaaaagcatgacaagatttacatccacattaaattcagttggcaaaagtgttcatttaaaatgaaaacaatttgggtcaaagaaaattacagaataaagcaaataattcggtgttcattttaaatgtcctcatagtcattacagtcaatcaatcacgatcggaataacttctcaaccaagtcctgccagtcactgaacaactgcttcttgtcttgtggcaccatcttctctgaatgctgtccccagcagagggggaggtgtccctcccacagcctcttatagtaagactgagatgactcagttctacaactcaatacacacaccctcccccaaagagcccattttcccgcagtccctaagcagccagcgatccaaacaatgccacctgcctacatttggagaacttatgtctcaaatctaaacctcttcatcccttcacacgggcccctcccccatttcccctaaagttcccggaccaccaagccgggtacaacggactacctgcagctttgaacccggcctgctgaccattcccctgcttttgctgccggattcttttggccccgggcccctgtaagccccacagcccaccttcccggtcacccctgcacgcctccccccattctttattcacctccccccattcagccctatcatttttacctctaccaaccctcccagccaatccgctggctcttccgatggcccccgccccacctatctgcgcgcccactcagctccagggcccctcacccttctcatcgctttatctcaaacgctttatctcaaatgccctaatgggcacagggcgctcggggctcccgcggcgctctcactttccttcgcggtccccgcgcccccgactcgcgcattcccctctctctctacacctgcctcggctcctggcctcggcccctccacctgtcgcagcctcctctcccgccatgcctgagggagcccggacccgggccacttacctgtgcggggcactccgggttttcgggcggcggaggaggcggcagctcaggccccggcgcggcagctgcgtctcggactcctccgcagccgggggccacagccggggcggggcccgcaccggaagcggcgccgcggggctggaccgccagccaggggcgggggcgggggcggggcggggccacagggggcggggcgggaccgaagccggaagctgctagaaagggaccggggggcggggtgggacgaggcggaagtgactcctacggaccgcgcagcccgactgagttgtgggaggaagcgaatggaagcgggcggaagcctcggccaatggcaaagtgcggacacagaggggttccggtgtgagcacttccgcggggagttgaaaagagctgggcgggagatcgtgttctccgagcgttttctattgcggaggttggtgtggcttgggcggttggctgggaggaaagtaactaaagagcagaggagtgtagggtttgccgtcgcttcggtcccctcctcaatctcctgccttcaagccggtcttcctcagaggttctcgtgtttagatcagcttgtctctaaacttctccgctccttcctgggacagagacctggctgtcccgagaatgttgcgtcccttgaaactttctcacatgaattagtattctcaggtctcagtttgcagaggtcgggattatgtgccaggtgctgtcacctcttgtaaaaacacttgcttcttcagcccttccccttagactctgtcacctacttcaccccgtttggagataatctgccgatctgtgtatccagctccttgtctgtctcccgtctgaccatctttgataatttcagagcctatgtggccaacccattcaacatcgggcctcgtctttagcgacccttatatcagcctcccaatcccagttaaaacctggaccttgtccctccaaacgctatcgcgtcacgactcagtaatttgaacaaccctcttttcaaccacagcctgctattctctcagcttgactacttttgaattataggcctgatgcagtagctcacgcctgtaatttcagcactttggaaggctgaggcaggcgaatctcttgggcccagtagttggagagcagcctgggcaacaaggcgataccccatctctacaaaaaatacaaagtttaatgaggcgttttggcgcatgcctgtggtcccatctactcggaaggctgaggtgggagatcacctgagcccaggagaggcggaggttgcagtgagccatgattgtgccactgcactccagcctgggtgacagagacactgttccccccccccaaaaaaaatagaattacagcataactgttattactgttatttcactttttttttttagaaggagtcttgctctgtcgcccaggctggagtgcagtggcgcaacctcagctcactgcaacctccgcctcctgggttcaagcaattctactgcctcagcctctcgagtagctaggattacaggtgtgcgccaccaagccagctaatttttgcatttttagtagagacaggtttcgccatgttggccaggctggtctcgaagtcctgaactcaggtgatccgctcgcctcggcctcccatagtgctgggattacaggcgtaagccactgcacccggcctgttctttcactttatcagagcagagcatctaatcggttgaaagcctctactttatctcttatacattaatcccctcttcacttccttccttatccattttagattcagtggtacattaatacagtcctgcccctacttaatcttaatcccaccacaacactcctttttccccaacgaaatccctcaccctggatggacctatgtgtttctccttgcttgtaccttgtcatagaaagttgtcctgttgctgggcgtggtggctcatgcctgtaatcccaacactttgggaggccgaggtgggcggatcacgaggtcaggagttagaaaccagcctggccaatatggtgaaaccccgtctctactaaaaatacaaaaattagctgggtgtggtggcgcatgcctgtagtcccagctactggggaggctgaggcagaagaatcgcttgaacctggacggcggag

SEQ ID NO: 1241855 - DNA, 4001 bp, Homo sapiens
ctagattaaaaatgaagacttccactatttagtaatggcactagatatcagagatttttctattatgcaaaacactgtattgaaacagtgcctgaatagatgcttcaatttttaaaactgttacttataatactataaaaatcagttaataatagaaagtcaacgagttgacagtgacatacttctaatttgtcaatgaatatttagccaaccaatttaagttaaacaaaaaagaaataatactgataaaagaggcaatagtaacttgctgctcatatatgtttccttccaggttttctaaaaattgcactgaatcaagcttcatttttattcttcagccatatccctgactcctcaggagaactgaggttttttttttccccaaatgaaaacttttgagtttctaaagctcaaaaatgcaaaatctgacgcacatggttaaatgagatgtggttatcaacttacaccaagcctaacttaccacaaaatagaaaatatcagagaaaggagttcacaagcagaaaacctctgctttctaactcacaatagagtcttgtccaatattagacaacactgcgttttgttgttgttttagctacaaggaagggtatgcaatatgcagtaactattccaacagcttcaagcaagtcatctgctacgactagaaaaagtagcaattaggtcccaaacagcaaagacataaaaaagatgtaagcagaagcctcaccatctgaaaagaaggcccatcagcacctcttccgagaaatacttcccttcccccacctttaagtaggcacttgagactgccaagatccatttctttattaactggtgcccacttggggcaactgtacaccaagctgctcttaggcctactctaatcccttccaaaagtgctcaaatgaggctacggccggggtaagtcccgtcagggcccaattcttcctgactcctcttctccaccccacctcctccgccccgccccagtaggcgatcgcccggccagagaaaggacacccggcccagggactggcagaaattgcccgcaagagaaggcttaggcgaccgaaggcctccgccatagcaggacttgggaagcaccgcccccagcgcacctccccacacccggctaatcggcgaacctctgctttcgacaccctctatccccagcagaggcagcggagaagacaaggccgggaggcaccgggctaggctgcgcaccaggcccaggcctgtccctcgggaccgcgcgtgccgcctgaatccgctcccccgtcgggcccggtccagctggcgcggcggccaccctcacctggatgacctcgttgacctcccggatacattccaccatgtgttgtagaatctgctcggccgtgagcacctcgtagcggtaatcctcctcctgctcatgccccggcccgccaccaccaccgccgccgccgccgccgccgccaccgccgggccccagagcgctgccgccgccaccgcccgtctccccgcacagcagtccgtcccgctccccgccgacgcccagcccgggctccaccagctccacctcgcccagatccagggtatcatcgtccggctcgtcgtcgtcttcgtcctcctcctcctcggcgccgctgtcctcctcactgcactcctcgtcctcgtcgaactcgtagttgtagccctcgtccgagtccatggcgcgacgcgcgggggcccggcggacgctggccgaggcggggagagggcggggacgccgaggccccggctctcgctccggctccggctgatgtccggacgcaggcctggctccggccccgcgagccgcggctcctccccaggagcggcggttggcgtttgacggctggtggcggcggggagggcgcggaggagggagggagggagcgagggggccgcttgctgcccgcctcagtcagacgcggctccgctccggcctccgagagaaaacagtccccaacgccacctccacggccgctgctatcgctactgagccaacaaaggggcgtgcgtcaccgcgtcgcgctgcgtcgtcgcgtcactcctctttgcgtcactgcgccccgccccaccgcccctgcgtggagcccggggagaccccacggcccggccttcctgggcctgggacccgaggggagccgagcgggaattgctttcctggttcgatccgctgccgctgtgagggccgagcggaaacccgtagaccttttatgtgaagagattgcggcctcctggtcaccagtcaccgagagagggacccctggaccgcctacgtggtggtgtctgccgcaggccatagggatccagcccacttaggcagtcccttggggacgcggccttccctccggagcggaaaggcgcttcccgcccgccctgcggtaatcccggaagccctcagccgttaagctaaaatttctgttgctttggctactgatggaaacctgttgtaagtggaacctctaaactgtatgacaggtgaacccactttaggtagctgtgtgattctgtccacttgtacagacgtgcagtggtttttaagtctcctataatgacgtcattttaaagaggcatttcctccaccccgctgacaagagcgcctcttgagggccctaaacaatgtaaacagcgatgattttcatgaattgagcactgtgtaagggctttacatatattctgtctcatcttcacggagccatagtacccattttatacctgaggaacctgaagctcagaaaggaaaagggacctggccaagaccacataacccttgccctattttaaccgctggatgccccaaaacatgaatcataaaaatgctttgtaatgtagatatattatgtactatgtagtacataaaagacatgaatgcttcaacaaaatacaggcaataatagaaatatctacaagggccaaatgtagccagagagataatgcttgaatctcatctgaaagtgtgctatgtgagctgagtgttgatgaatggctaggagttcaacagagaaggtagggaagatggtctagccgcagagaacaagcaaaagcgcagaaggtgtcaagtaagtaatagtttggggagcttaaagtgcatggagggtacatggcaaaatattaggcaagttagtcaggggtcatgtcagttaagagcattttatgcctaagagtgggcttaaatctttgcaaacaggacatgcgagccagagaagtgttatgaaggaagaagaggcataagaaggctccctcttgagataatctgaagaattggccagattgaaaaccttttaaaatcaaaacccctgatttgttgataaatcttactgttcaacctataggttccctttggaaattgattttgaaaagtgaaaaattccattataatgttaaaaagcctcttccaatttgtccattttgtaagttttaaaataccgataattatatttcttaacctcaggatttacaaagtaaagcatttaacctcaatactggtagtctaggtttttgttgttgttgttgttgtttgtttttttcttgagacggagtctcgctctgttgcccagattggagtacagtggtgatctcagctcactgcagcctctgcctcccaggttcaagcgattctcctgtctcagcctcctgagtagctgggactacaggcgcatgccaccaccccaggctaatttttgtatttttagtagagatggggtttcaccatattggccaggctggtctcgaattcctgacttcaggtgatccacctgcctcggcctcccaaagtgctgtgataacaggcataagccacagcgcccagccaggtctaggttctttgattcagtgtttctatttagcaattctagattgctgccacaactaaggcaagccatggacacaaggaacacttctgtccaccccgtctccattgtgatattacctacagaaaaattcagtaacactcgtcagtaccctaaactcctttgcctcacctttcttttcattgtacc

SEQ ID NO: 1241856 - DNA, 4001 bp, Homo sapiens
tggcacagatttgttttcagaccagccacgttcctcctcagtgttctggacagaggcctccttgtctgttcttccaagagtccctatttctgctgatggaactgccttccttggaattacacaggctcttcaccttggtgtctccatggacacctcccctttgtctctccttggcctcctcctttactcttactccaaatctaatcagtgccaaatctggaactcttctacccgcccagtggtgcattccttcctctctggtccagccatggccaccaattctggcctccccagcacctgcctcatttcatgctggcctccctgtctcaagtcttgttccctccttagaatgtttcctagacatagctgacaaatcagtcttccagaaaaagtgatcatgcgatttccttgttcaataccattgaggtctctctctctctctctctgtctctctctctcttttctattttattttatttttctggttcttaggaagtgtgcagaggactctcccttaatgtggagagagaaagtccatactcctcagtctgtcctttaaagcctggtcacatccaaacaactcagtgttaaatcccactgctgcctcttatatccccagtgcaccaactactcactgacctctgcacttgcttagagcaagtccactgttacttacgcctgcaatgcccctctgctactggctctgtatattcaaacattcccgttttcaaggttcagccgaaatgtccaatctccagaagccttccctggccgccttagatgaaagggatctttcattcctaattctatgatgagagacacttttctttgctaggcattgctgttcctcccccgaccctccctatctccaacacatgacctccctctgctgggaatttcctgggggccgccctctgtgactctccctgcatcttccacagggacccagcaacctgccgtgcccacagcagcctctgcacaacacccaaaagtttgtactagcttagatgttcacgtttctcttctcccacaccctgctcatcaggtagggaactttcccagtgaaaacggaacttccctactacaataccaaaacaagtcaatgttgccacttgatcaagaactcttccatttttgaaatatttcctaatgagctcagttgtcacagactgcaccctggggacaggtcagaccagaaagcagaggatgtcacctgggcaggaccagggctgctccacgctggtgaccacaggctgggtgttttgtgcccccggagggttaggacacacagcagccagtcgcaaagggcgcaaaggaccagcgcttagtgggcggggcgggcaggggagagtcccgggagttgtaccctgttgaatcccagctccaaacttttccctccgtcagcgcggagccctccaccagccaggactggctgacgccgtgatgccacaaaagccgggaccggaagagaaaaatgcgtgggatggggaaggcaaaggcggttattttcagaacttcgggggctcccgggcctgcccttcgggttcccgaggatgcgaggccagcgtccggccgcccgcgggtccggaccggcgcctgcccgggaccggatgggcagcgattgggatgcagatgccgctctggtgctgatgctgcggctgccgcgtagtgacagccgctccaccacccaccgcgccgagctgcggctccgcgcccccgggggcgcccggcgcgcctggtccgctccggccccgggcaaggcctgcgggctgcggcgggcggcggggcccaggccgctactcacccggagggttgaccgccgccggggttgccatcttgctcggagaggataggcgcccgcttggcaggggcgcgggaggggcggcgcggagcccggcgctcagccccggggacccggtcaggcccaggcgccgccgccgccacacaaaggacggcgcgggcgggcggcgctccctccgctctccccgccgccgcggccgctcgccgtccccgcctttctctcctcctcctccccctcctcggcctcctcctcccggttcagcctttgtcgcgcggcggggggcgcccggcccgcggctccccggtcagagcggtagcaccgcgagacttggggctgcggacggcgggacccccaagttgggcgccggcgactggcgggggcagagggccgggcgctccctcgggctcgcgcaggtgctcgggcctggccgggctgggaccgcaggcgcctctcccgcgctcgcctagcccgggctgcccccgcacgcccacgccccaggtgtccgggcgcgctttacccaggggcgccgtgcccaggccaggaggccagggcggagcgggtgagggagaagcccatttagattcagagggaagccggtcctgggagacggccgcgaggaacaaaggcgccccagtgctgcccacttagcatgccagagccgcgctgctcggctcccaggccggggacacggcccggtgttaagcggagggtgcccgaccgcgggaattcctaaggccacgcgcacctccaaggccaccgccgcacacagcttcggagtgcacagtgcacacgcccaggcacaggcagccggcccgagaaattgtgaatgtcttggctttgagtaaggcgctcatctctaccctccttccataatgactgccgttgattattacttgagggcgctgcaagggccttatttacaccaccaagttgagaatttaaaaagatttttttttttaaataggtttatctgcgtatcctggcgaagtttggatgcagagaacttggagctgttgttttctaccagacactaggatccctgagagaggtaatggcccctaggaaggacacgtcaccatcggggtcccctgtaaaggttaaatggaagaataaagacatcccaggtgaacgctgagaagggcaagttggtccctaaacgcagataatgtttgcagagacatcaaactgtcttaaatccttccaaggaagcattttctggagggcagaaaatttgggatgtatgttcaaataagcattttcttcggggagtatttgtcactactaatctaatagtctatcagttctacaaatgttgaatgtctgctgtgtgccaggcacaaagccaggtgttgggcctaccatggaaaggaagaaacaggagctctgttcttctggtttggggggtagagtggggaagagtgaaacaaagtatctgcactcaagaagcacacagctcccttgggggcttagggcagaagccctgaaattggcatctccagcctgtagtcactaatgaatgaatgagggcagagaggaggtggagtgatcagggaaaatgaaaattaggctttgaagacatgagtaggacaggtggaaaaagaagacatttcaagtaaaaaataaagcaggtgtgcacccagccacaagataggccaggcccagacagagaaaccagggtatcagctatggcccgctcttgtgccccgtatcaaagttgactgttcctgattccaacatcaagccaaatgagaattcagcctctcttctacataccccgaaaagcaacacactcaaaataccaacttaattaatgtataacgtatactggactgaagatttcttaaggaaagtaaaagaggaggctctcttcactcactccacatcaaaaaaggtaaaactccatctcagatatttctgctacccagagtcccttctggatccttctccccacaggcagttcaatctctggtggcccataaatagcccataaatagcacttggcatcactgccccctatcccacgaggctcttttattctccaactttccacaccccttagaaggaagcaagttcctctccttggtgtttatgtatcagtttagcatttcagccaggacccatggctcattttgtctccaaatacagttctaatatcatccctaaaaaataaaatatgagtgaacatgactcttacgcacac

SEQ ID NO: 1241857 - DNA, 4001 bp, Homo sapiens
tggatgatgaccgtgaagtcagtgccctctagctagcaccgaggaagcatcctcaccttcctgccatgagtgtccaagatgctgtgccgagatacatcgatcagttctccctccagcaggacaccatttcccctggggatgaaagggaaagaaaggatagccagttttgtcagtcctcagcaaatctcacccgtgtctcctatttacccagccctgagaaggctgggtactgagcagctcctttccccgtgcttccgacatagggatctccaaagggtcccaaaggctggggcattgcccagatgccaggaggaaccttgtcaggctgccctaagatcaagctatggccccctcctacaaggccactgggagttactggaaccagagcctcagtcttatctacaaaatggggaggaaaacagctgcctcactctgctcctctgatgttgacacaagatcatgtgtgtgaaggtgttttgtaagctattaagtgattactaaatacaaaagattttacttttttattggtccaaatgtgagggtaggtatctaagctgcaataaactattttccctttccacctgtttttaaacactctcatattccttttctcattcatatccaggtggtcattaacccgaggaaatggttattactgagaggtgaagaaaccaaaactcagaagtctgagactagtccaagatcacacggtccttcactgaggggaagtggacccctggcttctcgactctggttttcataaaagcagaacgtggaggcttccttttttgcatccacagaaatggagaagcatggggacagctgaagatgacagtggaatagggatgggagtgggaagtgaaaactctacctagctggtctctatccaattcttccccaccccccacaattatttttctaaatatttaactgacaaaagactgtatatattcaaggtgcacaacgtgatgatttaagtacacactatgtaatgattaccacagattaatgaacacacccaccagaccccatgctgtacattaggtccccagaaattgtttattctataactgaaagtttgtacctttgatcattaccccatccccatccactatcccctggcaatcactgttcactgttctactgtttcttttcttttgacacagtcttgctccatcgcccaggatggagtgcagtggcacaatctcggctcactgcaacctccacctcccaggttcaagcgattctcatgcctcagcctcccaaatagctgggattacaggtatctgccaccacgcccgactaatttttgtatttttagtacagacagggtttcaccattaggctggtctcaaactcctaacctcaagtgatccacccgcctcggcctcccaaagtgctgggattacaggcgtgaaccacagcgcctggtctgttctgccgtttctatggttcaacgcttttataggttccatatacgagatcacacagtatttgtctttctgtatctggcttatttcacttagcacaattcttcagcgcagttgtaaatggaatggtcccttcggcctcataaccctgtgacgacagggcctggccctccaaatcctcctcacccaggcaggccctgctctggaccagcccgcccgctgttcccgccacagcacggccactgtcccttctggggcagggcatgagtctgtgcaaaagcagcgcggcaagtagctggagtttatagttacgcgggtggggtggggccggaggtcggcgtgaggcgaagcccagccttcggagacctgtctgggggtcgggaccctctctcgagggcaggcggacaggcggggagctttaagccgatctgtgtcatggggtcgctgggcgggcgcggcggcaggggcgccgggagcggcggactggaggggcggactgaaggcggagaggcggctttggcaaccccagttttcccccacccgcatcccacccccccacccgatcctgttgcggggttcgagccggggcaggggaggccgacccgaggccgtgagcccaggcctacccctggtgggcggcggggtcccaggcccctggcagccggacgctctgcaccgccttgttccggagcgcgccgtcgtggtagatgcggctcattctcccgaccgcccgggcaccccggcacagagccggcgcactgggctgggggcgcggcgcgggaagtgctgcaggacgcgcggggacccgcgattcccagccggcggatccgggaatggcgcggcccggccctcaggcgttcctcggcgggatttaaagggaccgagctccattcctgcacgccaggccgcgcgcggcaggagttgggcttccgggaggaccctggctgggggcttagcacagtggggcagaaaggccatgcttttctcttgtctctctctcttcctcattcctagaggaagatccctgccccagcacacgcacaaaagggaaattgaggccccaagatcctattatagaagatcctttgtaggatcagcccgggaaggatgggtttctgggaagcaggaatggagaacagccactggggaggattgggtggtcagcttagaagctgtccattatgccccgcccgcggccctacaatggctgagtcaggtatcccagggatctgtgacgagggagctggggcatgggtgtcggaccaaagacgcctaagtttgaatcccagctgtgagcttgggcaagctcctcaacctctctgagcccatgcttcttcgtctgtaaaatggggtcagtatcagggggattgtaaagtttaatgagctcaccctttctacaacatagcattgccctccctccttcttcctgcacagctcctgaactcctccctggccccacaatgccctttgcccaagtatgtcatagtccgcaggtgcattttccaagcctggtacagaagattcttctgaccctgggattgttgaggaatctttgttcttttgtttggcttcttcgtgccaggcctcggggcaggtgggcccattcagggaggccaggtgtaccccgggagagggggcggcatttaaagggggtggtggccaggcaggtgcctaggagtctagcatgagctgtcaatgttggaagaagaaagcaccctctcccttccctgctacacacacacacacacacacacacacacacacacacacacagacaatgactttcttgggtcctaggcacttttgttttcaaaggaccctttctccattaaaaattttttaaaaaattattatcttaccactgggttggcataaagatgaatatatgaattatatatatatatatatatttttttttttttttttttgagacagtcttcctatgttgcccaggctggagtgcagtggtgaatcttggctcactgtaacctctgcctcccaggttctagtgattctcctgcctcagcctcctgagtagctgggattacaggcactcaccaccacacccgactaatttttgtatttttagtagagatggggtttcaccatgttggccaggctggtctcaagctcctgacttcatgtcaccacctgcctctgcctcccaaagtgctaggattacaggcctgagccactgctcccagtctaaagtgttttcttcaacctaaacatatatttttttttctgcatccaatcatccattactaaacatatttttaggaagaaagagcacctgtagtcccagctactcaggaggctgaagtgggaggatcacttgagcccaggagtttgagtccagcctaggcaacatagcgaaaccctgtctattaaaaaaaattaatgaaattaaatttaaattttaaaagaataaaaacattttgtggaccgctaaaagtatgatgggcctaatggatgagtcagccccactcctagctggcctacctggctgcccggtgtatgtctgagaaggaaaaacatagaaaagccctactggaaagcccctctgggtag

SEQ ID NO: 1241858 - DNA, 4001 bp, Homo sapiens
tgccaggaggaaccttgtcaggctgccctaagatcaagctatggccccctcctacaaggccactgggagttactggaaccagagcctcagtcttatctacaaaatggggaggaaaacagctgcctcactctgctcctctgatgttgacacaagatcatgtgtgtgaaggtgttttgtaagctattaagtgattactaaatacaaaagattttacttttttattggtccaaatgtgagggtaggtatctaagctgcaataaactattttccctttccacctgtttttaaacactctcatattccttttctcattcatatccaggtggtcattaacccgaggaaatggttattactgagaggtgaagaaaccaaaactcagaagtctgagactagtccaagatcacacggtccttcactgaggggaagtggacccctggcttctcgactctggttttcataaaagcagaacgtggaggcttccttttttgcatccacagaaatggagaagcatggggacagctgaagatgacagtggaatagggatgggagtgggaagtgaaaactctacctagctggtctctatccaattcttccccaccccccacaattatttttctaaatatttaactgacaaaagactgtatatattcaaggtgcacaacgtgatgatttaagtacacactatgtaatgattaccacagattaatgaacacacccaccagaccccatgctgtacattaggtccccagaaattgtttattctataactgaaagtttgtacctttgatcattaccccatccccatccactatcccctggcaatcactgttcactgttctactgtttcttttcttttgacacagtcttgctccatcgcccaggatggagtgcagtggcacaatctcggctcactgcaacctccacctcccaggttcaagcgattctcatgcctcagcctcccaaatagctgggattacaggtatctgccaccacgcccgactaatttttgtatttttagtacagacagggtttcaccattaggctggtctcaaactcctaacctcaagtgatccacccgcctcggcctcccaaagtgctgggattacaggcgtgaaccacagcgcctggtctgttctgccgtttctatggttcaacgcttttataggttccatatacgagatcacacagtatttgtctttctgtatctggcttatttcacttagcacaattcttcagcgcagttgtaaatggaatggtcccttcggcctcataaccctgtgacgacagggcctggccctccaaatcctcctcacccaggcaggccctgctctggaccagcccgcccgctgttcccgccacagcacggccactgtcccttctggggcagggcatgagtctgtgcaaaagcagcgcggcaagtagctggagtttatagttacgcgggtggggtggggccggaggtcggcgtgaggcgaagcccagccttcggagacctgtctgggggtcgggaccctctctcgagggcaggcggacaggcggggagctttaagccgatctgtgtcatggggtcgctgggcgggcgcggcggcaggggcgccgggagcggcggactggaggggcggactgaaggcggagaggcggctttggcaaccccagttttcccccacccgcatcccacccccccacccgatcctgttgcggggttcgagccggggcaggggaggccgacccgaggccgtgagcccaggcctacccctggtgggcggcggggtcccaggcccctggcagccggacgctctgcaccgccttgttccggagcgcgccgtcgtggtagatgcggctcattctcccgaccgcccgggcaccccggcacagagccggcgcactgggctgggggcgcggcgcgggaagtgctgcaggacgcgcggggacccgcgattcccagccggcggatccgggaatggcgcggcccggccctcaggcgttcctcggcgggatttaaagggaccgagctccattcctgcacgccaggccgcgcgcggcaggagttgggcttccgggaggaccctggctgggggcttagcacagtggggcagaaaggccatgcttttctcttgtctctctctcttcctcattcctagaggaagatccctgccccagcacacgcacaaaagggaaattgaggccccaagatcctattatagaagatcctttgtaggatcagcccgggaaggatgggtttctgggaagcaggaatggagaacagccactggggaggattgggtggtcagcttagaagctgtccattatgccccgcccgcggccctacaatggctgagtcaggtatcccagggatctgtgacgagggagctggggcatgggtgtcggaccaaagacgcctaagtttgaatcccagctgtgagcttgggcaagctcctcaacctctctgagcccatgcttcttcgtctgtaaaatggggtcagtatcagggggattgtaaagtttaatgagctcaccctttctacaacatagcattgccctccctccttcttcctgcacagctcctgaactcctccctggccccacaatgccctttgcccaagtatgtcatagtccgcaggtgcattttccaagcctggtacagaagattcttctgaccctgggattgttgaggaatctttgttcttttgtttggcttcttcgtgccaggcctcggggcaggtgggcccattcagggaggccaggtgtaccccgggagagggggcggcatttaaagggggtggtggccaggcaggtgcctaggagtctagcatgagctgtcaatgttggaagaagaaagcaccctctcccttccctgctacacacacacacacacacacacacacacacacacacacacagacaatgactttcttgggtcctaggcacttttgttttcaaaggaccctttctccattaaaaattttttaaaaaattattatcttaccactgggttggcataaagatgaatatatgaattatatatatatatatatatttttttttttttttttttgagacagtcttcctatgttgcccaggctggagtgcagtggtgaatcttggctcactgtaacctctgcctcccaggttctagtgattctcctgcctcagcctcctgagtagctgggattacaggcactcaccaccacacccgactaatttttgtatttttagtagagatggggtttcaccatgttggccaggctggtctcaagctcctgacttcatgtcaccacctgcctctgcctcccaaagtgctaggattacaggcctgagccactgctcccagtctaaagtgttttcttcaacctaaacatatatttttttttctgcatccaatcatccattactaaacatatttttaggaagaaagagcacctgtagtcccagctactcaggaggctgaagtgggaggatcacttgagcccaggagtttgagtccagcctaggcaacatagcgaaaccctgtctattaaaaaaaattaatgaaattaaatttaaattttaaaagaataaaaacattttgtggaccgctaaaagtatgatgggcctaatggatgagtcagccccactcctagctggcctacctggctgcccggtgtatgtctgagaaggaaaaacatagaaaagccctactggaaagcccctctgggtagaactgtcctttggccctctctgctcaaaaccctccagctgctcacagccacctggctggcatgtcctcctcctctttcccttttctgtgtcacgttccccctcactgtggctccaactgcacagccatccatggtagccactagccacatgtggctacttaaatttcgattctaactgattaaacctaaattaaatgtaaaactcaattcctcactttcactagccacatttttaagtgctcaatagcaacgtgtgtttagcgactacaagacacagaacatttctttgttgcagaaagttgt

SEQ ID NO: 1241859 - DNA, 4001 bp, Homo sapiens
acacagacaataacttaattttttaggtcatcgaactgatcttccaaatagaagaaacaggtgatttggcccacaggaacacagaagtgactgtgcacattttcttcatggttagggacaccatccacgccacaggcacttagcatttacagccaatcctcaatttaagaaggaacattatattcctaacacactttggttgattttaatgacagcagctaaaaccaaagcaccttaaatgtttaatgtagacaatcaataagagaaaacgttcaagctatccttaatattgttaaaagatacattaggcttttccaagtaaaagtatttacactctagaagtcaatactgcatactttggcaacatactaacagaacttatcaaagaaaattacatagcacactactgtgcaccagaagttaatgctaagtttgatgtaagtgtttaaggcaaaccaccacagacagggacttgttatttttgggggctcctaaatttcaagcaataatgaacacaatacgcattttacaataagcaggtgatacttaataatactgttaagattgcaaactttaatatttgtatttttgcccccaaaatccatttttttggtaatgcgtaaatatatctattttcacgggatattctcaaataatgtggtaacttggacttttacctatgctatatgttttcttgtttttcaattactttaacatcctaacagaagcacccaacttaagaaaagttaacacggttttaagaacatatggaatgggcttagaacactaatccaattcccaacttaattaggacataagtgcaacattaagcagaaacccgcacgaaggtcaagcagtagaccaaaatcgtatttaacggcaacacaacctgatttgtaagaaaaattgttgataaacaatttaggagacaagatacctcggccctttctcacttctcggccagtcacacctgcctaggagggcagggcggtggaaataattacagtgggagagacaaacaccagcctagataaatacaaaggcttgatattcataatttgaaccacagtgacactcccggcctattcccctacatcaggaagacacaagggcgtttacaaaatattcctgtttccaataaaaccctgattaatttcgtgagtaaaattttaaaattccaccctttcgatttttagtcaagtaccatatttgagtcccatcgactgaaacctttttgagcacagactgcgctgcacactacacctgactcacctcctctaggcctcaccccgccgtgggaggcaagcaccagtattcggcctttacaggtgaagacactgaaggccggactttactcactgaccatggttacaagggttggccctgaaatgccaatcctggcccacatcgcggcccgcacacgaggcactgcttttggagtgaaccgcacgctcacaatacaagtagttggagagttcttcaaaggaaaaaataaaacttcctaaccaaattgaggcttacagaaaaacttaggctctacgcccaaagcctgcgtcctgggctctcgcgtaaatataagtgactgaggaacaccgcgacccacggaggtgttacaaaaggcacgattcggagtaaacgcggggcacgttggaactcccaattcgtcggcgcaccagccagcgacggcgggaagccaaaggtggggcgcaggagcctcggcctcatgcgcctcggccccgcatctcgggcgcggccctccgcctggcgggagcaggccgcccgccagacccggccttgggcagggcccagggctcacgccccgcgcgctcaccttctgctcctccgcggaggctgcctcggggacttccgcagacatagtgctccctctgcagacgagacgccgggaaaagatgcaattagcgggtggccgaggccacccggccgccgcccgtcccagctctcccagggcccgccgggccgcctccgcccgcgaaaatggccgccgccttatgacgacacggagccgcgaaacgctccgctggccaaggccctcgcacgccggagcccgcctgcccctcccgcaccgcacccctacctacttgaccccgcttctcccgctcgctgtcgtccaaacacttccttttttccttcaaaggtcgccgctcctgcctcacctcacatccgtttgtggctgccgagtgcttcctgggaattgtagtttctaagtggaaccgcccctccccgccctttcctgtccactctggtcccctcgttctaggagctttattttactctttccacttacccatcctcgcctagttctgttctcctcgctctccgctctgtagccacacaggctgtcttttgggcacgccaaaagtcttgctccactctgccacgccttcacatctccagtcctacgtctctgcctcagaacctttccttcctaaacctctacactaggccagagccacctcttaaaggctgtcacagccctgtacagttcctcaacaacatgaactgtatcattacacaattgtcgtgactttaggtcacctttccttctcagataagccgcaccagggcagggatctcgtctgtaattacttatattttactctgagggtccagcacttcctagatatctaacgaaggaattcagattcatttgtccactcccagggggtccactcccacaagcttaccgaaactgctagcattgagctcccccaatgacctttttatttgccaagtcctgcggcttcttactgaatcctcattctacttgatatctgaatagttactcgcaatgtttgttggttccaacaaagtgtccctcagaaacttggaaataagattgccctctaaaagttaaactagtaaaaagccacagaaaatgaatgcatttctgggggcaggggaacaattgaaagaccctaaatgcctggataaggaatttggaaaccatcgaaactcaaccaggatgtagaatctcagacaggaagaattgcactggaattgcaactagaaaaacaaaaagagttaatattgcactccttttggagaaacgaaggaaggcatttgtcagccaaggaagtattgaaaataaaagggttcaacaggccaactgtttgacaaagatatcccttaagaatgtctcacgctgggctagctgagaaactgtaagatccacgacatatttgttctccttctatactcacaaagtaacatactgaaaatttgcctttcccttaagcagaactgcagagagaaagaagagtgcagtagttaggccactgaagcatttaacagttgtatttttattaataaattgactgacgttctagtatatgtcctatatcaatgtatttgtgaacttgagttaaaatctgatagacatacacttaatgatgaaactcagcctcaagaaaattggctgtggctgggcacagtggctcactcgtaatcccagcactttgggaggccaaggcgggcaaatcgctcgagctcaggagttcaagaccagcctggccaacatggcaaatctctgtctctacaaaaagaaaaaaaacttttttttctttttctttttgagacagagtctcaactctgtcacccaggctggagtgcaatggcacaatctcggctcactgcaacctccacttcctgggttcaagcaattctcctgcctctgcctcccaagtagctgggattacagttgcccaccaccacaccctgataattttttgtatttttagtagagacagggttttgccgtgttgtccaggctggtctcgaactcccggcctcaagtgatccacccgcctcggcctcccaaagtgctgggattataggagcgagccaccacatctggccttttttttaaaattggctatgtgaccttggataaaaagaatctgtttctgatagtgacactcgcagaaggggaagtttgaatttctgggggcagactttggtcaaatggagaattcaccatgggc

SEQ ID NO: 1241860 - DNA, 4001 bp, Homo sapiens
atacattctaaaacaagtttaagattttcaaattgtctagtttttacattctgttccacatgtgtatatatgtgtgtgtgtgacgaataaacatctgacttgtgaattaaaaaaaatgttagcccagattttaccaaagcagttttttattgctaatcccaggttcaactgcttttaattttacatctattgactcagcagttataggcccagagatacagtccaaagtcctggacaaaaatcaatgtatgtctcactcccaaggtccttgactccattcggccatcttgcaaattgtattgtctgcttccactggggcctgggttgatcctggaagccatactgaggaaagtgcatgaaggagtaagaactatcactaacacactgttcccattgatccaaaaggcagttttggttccaaatatagttttcctcactacaattttgggatgactcagatgatcacttacctcgaggagttcactgtgtccacagtaggatagggcaaaaccacatattctattatattttgtataagacatagcacatagatataatgcgtttactcttcaaggagaggaggtgcataccattgttttatttgatagataaaagctcatggcaaaaacgtaaaagtttaaactagtttccatccatgaaatgagtaagactcatggttcttagtattttcgtgactaaagggatccaattttggtatctaatattaatgaaacgctcatgtagtgtgtccccacatgggtacttctggaaaagtctacactgtgaactggacttcaccaaagtgagcaggaagggaaatcccgacacgccctgatgctcttgtctctaaaggcattttgagtggagagaagtgggggagaggggaagaagcgggtaggaggggaggaggaggatggggaggaagaggatgcggaggaaacagcagcagtatcaggtagaggtacaactcttactaagttgccctgctccccagaagagggaaaccaagcatgatgatcaagtctggaaaacacttcctttgaactcctacccctcagaaactacttccctattccccaaaccaaatttctgctaattcatcatgaaccaagaacgtatgcaggatagggaggagtggaggccataggacacgggcaccgcagaatggaacctcatagccgccggttccaccgtccctttcttggaccagaaggaacaggacctagatttctggatcccccattgtccaatcacaggttcccaccgcacccaatggccccctcccgtcgcggtcctagaaaatcccgagccactggtcccggtcaggcccggcgggccaggggcggggcgccaggaagagctgcgcacccaggacttgcggtctctccttacccgcgagggtaggccggaccccacccccggaagcccgccctgatctcacctgccaggtgggcatcccgagggtgcgcggcctcccagcccctccccggccccgcagcctggcgggggaaccccaggcgctcgcctgcgcttaccggccgggggctcccgcaggctgaggcgcacgttcaggtactccacctccgagaagacagccagggccgcggtgctggccgaggcgcgggggcaggtgctcgggccccaggcggcggtggcgcgcccctgggcctccaggcgcagcgcgcgcagggccaccggctcggacgcctccagcagcacgtgcccggccactgtctcgccgctggaatagcagcccttgcgctcgtcctcgaacaccagacccaggctcttcacgcggccctcggcacccacggccgccgcgcacccagcctccccgcccatcccgccgggcgactctttcctgcccctgaggtcggcagaggcccggagccggggtcgcgagcacagcggcgccgctgtcacaggcgctcgcggcagggtaaggccgccgcggcagccgtgcggtacccgatggggcaccggctcgccgagaggcctgtcgctttaacaaacccagttgggcctggaaaagggccgggacagcccacccccggcgggcggccattggtcagctgcgagccctgcttcttgctgatttgttgtagatggtcactgagtcatttcattggcgctcccacgcgtgggtgggcgcaggaaggccgtgcgtgatcagggagtgttggccaatcgggaggctccggcgtgcacgtgcacaggccgtttactggctgaggccaggcacagtcctggagccctggccaatagtgaggcggtgcgcccatgtggacagacagtgggaaacagtatctgtcagggagggggcggaacagggttatctccggctctcagcgtgtcagccgttcccatagttacgaacgggggcggggtttctagcagcgtaaggactttgcaggagccactgggttctcgctaaagcatgaagttgtggctgtaactggcttgtgtttatgattacatctgcaatactcgaggggaaatagatgctctgggaaacggaactcggcaatatttccttttgagatcttgggggccggccgcatcgggactttaatgaatgacttggaatcttctaacctccaggtttttgatcaccgcctctcccaggtttcagaattcccagcccatgtaagagccatagataagaaaaatgagggttgtggttttaaacctgatacatcccctaaggagttctcctcctaagctccgcagtgtcgctgttaggaatagctggaactctgattcttcctgctgtaaataagatcatgaatcacattgtttttgaacaacatctgtcactcaagtttctgccccacccgaaagtttcctgacatcattgtcatatccacagaaatttccaattgccttgatgacttgttcctcacgcccaagtttcctccggcttgtcctgctacattttccttttcaaccttccattttttctctgttctgttttttaccatcttgcatagctgtcattagctggtcatcattttcttaacttttaagttgtccccttatcgacatgccacgtttgtgagctgttatgtattgattaatctcacaatgaaatttagcaattttcctaaaaaaaaaacctcaaagtaaaggttgctctactaccctcgttgagtttagattattaatgtggagatttagtaaagttttataagttcaaaatttccttattacctctcagagaaagtggaaaagtcacaaattaggctctgtgtaaagttcagaaatagttgctattctctgaccatttcgtctagaatagctccctacatgatcttactctgcctacttttttttttatataacacaacgtgaccttacgtgtttatctatgtattatccatcccactcatttgaaacacagaacttgttctcattcgttttttgacctctagggcctaacacagatcttagcatacagtaagtgctcaataaatgttgagtgattgaatgatgtatcctaaccgtgtagtagtattggctctgcaatacatgaatagtgttctgcctcttactctactaaactttcactgtctccaggcaatggttccctccaaattaagtggctgggagagggagaaaaggacaatggtcctaacggtaatgaaaggacaaaatggcaggttttgcattctgtactgggaaagaccagactctctgttttcatttcagttaagaacagttttggccagccaggcatggtggctcacacctgtaataccagcatttcgggaggccgaggcgggcagatcacaaggtcaagagatcgagaccatcctggccaacatggtgaaaccccgtttctactaaaaatacaaaaattagctgggtgtggtggctcgcacctgtagtcgcaactactcgggaggctgaggcaggagaatctcttgaacccgggaggcggaggttttcagtgagccgagattgtgccactgcactccagcctgggtaagagagcgagactc

SEQ ID NO: 1241861 - DNA, 4001 bp, Homo sapiens
agtaaagatactaatttctttttgtggagggcagaaagtccagtggaacataggaaatcaaaaatattaacttctgctattttaagcacttccttgtaacaaaaattccctaaacaatttgggatattaaaataactcagattaacaagtcactttatacttttgctactggatgttaaaaaagtcatccatttggctaattttggaattaaaccttgtataatttccatgcttatatcccccctttaggaattacactaatgtcctaagtttactttcagagcattttcagaagcagcaacaaaatatggcagcagaaatgtgatcacatgaattagatgcttaaatttcaatccagcaaactctacgtaaaagttttaaaatgagaaatcttttttatagagtgctaaaattaagacccagatatgtaaacacaccaaaaggttcctttgtttttaaattcctgagtcaaacgattaataagatattgtgcaaatttttaaaagttctcctagaaaatctgaggtgtaagaaacattgtatctttataagtttcaaagcccatccacatttgtcacacacaaacacacagaaagcccaaagagttaattatgcctaagtgcttcagggtaataatgttgtcttcataccattcacactcttaaggtacacaggttggctttctagtaggaaataaaatcaaactattttctgaaactcataaatctcaggccaataatttacctttctctaccaaatcgttgtcagttagataactcaaaagatttttctgatgcaggtagaagaaaggtgataggaaagagtaagggggaaaacagtaaattgtggtttaattaaaaaggaaagtcattcagaattaacaagcaattaacaaggaattgaggaattcctatgagagtaaggaagggagggtagctacaaaaaggtctcaaagcctcagagcagagtaaatggcacagtgtaccaaaagataatgaaaaacacagaaacacactgtacagaaagaaagtgggaaaatactgtcctgggtagagaagttataaaatgttaagtatcaggcacgggtaatgtttttgtttttcctgggaaactgggggtgggggtggggggggtaggaaaggttgcattcccaggcaaccaccctgaaaataaaccactgcttaatgaggtaggggccaggaataaacaacgggggaggggagggctggctcattacctttacagacgatgctggtcagaggcactgtgccttctgcttctctgataggtgggcagacctcttcctgctttcgcgtcttcttcagccagctcaaacctagaaaaacagaaaccagtgagtggtgtagtgtctcagaggtggggaggggggagctcaggaaaggggctggagagtggcaagggcaggcaagaaaaagcagagattttcctccctcctaccctcccagccagcactcttcccctcgggggaagtaaaggactttacctgtctcctcagctgctgcttctcttcctcctttcagcctcctctacactcaccaacttctccattgaagaaataccccaggcagggccggaccctggtgttcctgatcctcctcggtgcctcacggccccagcccggcgaacatccgaacagccgagaaggcaggaggtggcgatcccggccgccgggcagccttggggcagaggtgcagggaggcagggaggaagtcctggctcgggtgggggggcagtcccggtccagggctcggagcagggggctgccgcgctccgggccggaggcttccagctacggagggacccaggaggtctcgggacggcgaggtcccaggtcatacggggcccgaagtgccagccgtggggtctccggacagggggctttcgggatgcactttgcactgggccacccccgccccctcccttcagcactttggggtcactgggatgggaccaagccttcaacaaccaatcagcgcccgcagtggagcctgagcctggagccgtaaaccaggtccgggatgggtgggggtggagggagtagggacgacttggttggttggttgcttccttctctcctccttacccccggcagcccccaccctctgcctgccgtaaagttgcctttgcattcgcgacagttaagggaggcgtgccgaacggggcagagattcgtctccgattggtctcactcacttccccttacagcttccccgtggtggcttccgaggctccgcccctggcggagggactcaaagccgttgctaagagacactattcgccgaaggcggtctctgcgcatgcgggaggaggtgccagcttgtactttctgtgaactacggtggcccagagcgggcatttgtgttccctcaaatggcggtgtgaagagagttcgcctgagccagatcccaggcaggtaaccgggaccggccgccgtgctggcagcaggggaggcacgagtgcggccaaatgagagcctggttcagggcttaaggttgggagggcggcaggctccaggaagcgagtagaggggtgccttgtttctccgcccctgttcagcgcttgtcagacgcaagtgcccggtcttggcgcggctgtcggtccttgagaccccgttagcttccaggctggcaatgcctcgcctgaagtgggagaacggactctctttgggatagcgatgacgatccaaggaccttcctgaaaggatagcaacgttggcgggttcctgtgaatgaatggagaggggtcgtggggaaaacgcgagatagactgatcaagacacgtttgttaagcactttattcattagcaagtgtttactggccactgttctagtccctggggagacaacagtgaacaagatagtgatttcggggaaacaaacacaaaattatcagatagggatgggttatatgaggaaaatcaagcagaatggtggaatcgattttgaccaggacgtgatgggctgtattagataggtagtgctatggtgtgaatatctgtccccttcaaaactcatgttgaaatttaatccccaatgtggcagtactgagaggtagagtctttaagaggtggttggaccgtgagggttctgtcttcacgagtggattgatctattcatggattaatgggttatcacggaggtagaactggtggctttttaaggagagacttgacaactcgtgagcctgctcagccccctggccacgtgatactttgcggtgctgtctcgtggtccgtcagtcttagacttcccagcctccaaaactagacaataaattacttttctttataaattaccgagttttaggaattattttataagcaacaggaaacggactaagacagataggaaaggtctctgaggaagtgacatttgagcagggatctgaatgacaaagagccagccatgccaagatctagggagagaattttgccagcagagagaattagaaatgcaaagcctctgatgctagaatatgctttgctgtttacaggaactgccagaaagaaggctagggtagctgaagcagagtggtaggaaaatgactggtaatgagactggggagtggggcatagagatgagaagacgccgagagtcagatcttgaagggccttggtaagccttgtttaggagtttggactgtatcctaaggaaagtggattggtttttcagaaggaagtgggtgtagggtgggcctggatacaaccactttggaagggatcggttgcagttgtccagagtagaagtgcagtagtggcagtgaagatagattcagctttttaatttttgtcccattatacttcccagcaatcatatttcataatttcaactttctaaatttccatttcttcttgaaattagtagctgaattataattagaaacaacttattcaggactattaaatgctatcaatttttagtagctttcggtctttcgattctaccatgatttctccctgttttttttttttttttttttgc

SEQ ID NO: 1241862 - DNA, 4001 bp, Homo sapiens
tctaatacattcctgggctcaatcccaggcctgctgagtgagacactttggaaaactgtaattttaacaagcgccttcagtgactcttacaaaagtttcagaagcacgagcaaagaaatattcaaaaagctgtgcgggcgggaagacctgggtcaaatcccagtaccacgaccttgctgctgtgtgacactgggcaggtttacttaacctctctgaacccgtttactctgtttacaaaaatatggagcataaccactgcagtgttgctgggagggtgaaaggtactcaactacagaggcacgcatccatggcttcatccaagctatgagtgcctgtgtctaaggcattcgtgaatgcctacgtttaagaggcaggagccactctgaccctcctcttttaggggaacaatctgccactaagagagcatagggcttcctagagtctccccatgcataatggaagccagataccgctaatgttctattcagaagcccatctcagtccctgttccggggtcaagcaaggtgaggcaggaggtaacgatgggctgagctttggaggaaagctaagacgacccacctttctcagggacagggccttgaggtggtccaggctgctggacacagctccaagatggatctaccaaggggctctcctggggtggagagcataaaggatgaaaaggccgcaggcctctggacaggtccgccggagactctaaaactcagggagggaaaaagagcaggagtggtccatcgcagggtcacccctggtactgcccgtggcagggctcacaaacaccccacagcctctttcccccaggaagcaggttaagatgaagaaaattaggcaggcagctaccgggcggtgcctggctcgcggctcatggctcacagtggaggatggacactgctgttatttcccctgccctggtacctgggccgtgccagacatatcagcacttggcggcagtttcactttgctgctgtcctgagccgagctgttagcagactgagctttactgtcctgtgccggctgttcagagaccactgtgcctggccgaagactgaggcagggacttcaggccagggggccaggctggcttttcctgcctttcacttcaggtgggagcggctgtggatgaggatgtccagcggccgtcggtttctagccttgggatcattctggccccgacacggagtgacaggggatccccacgcgtccccgcatccagggcgcccctttagctgcggcggaggcacagagaggccttggcggcgctgtggcttcggtcggcaccgggtcccgcgcagccgggccctccaccctgagtggagctgccttctaagcacccagcccctgccaatcactgtgcccaacaccaagttcccggggcgccctgccctgcgccaccgcgcgctcgctcgcccgcccgcccaactcacctgctgaagaccaggcagcccaggtggttgatcttgtggtcggagcggtggcggctgtagtcctcccacaggtccctgaaggccgtgatggccaggatgaagagcaccggcgccagtgccaggccgggctggaaggcgttcaccgccggcacgaagttgagcagcgcgatgaagacaaagtacacgttggccgggcggtggaactgctcgaacaggttcttgggcaggaaggacagcagcgtgtacttggtagtcttgagccggttgtcggccaggtgctgggcacacccgcgccgccgtcgccgctcgcccttggccgcgccagccgcagggtcctcggcgcccgggggcggcagcaggttggagcgcaccgtgcgcgtcctgccctctcggcgcctccgccgtcccggaggcccgggctcctcggtccccgccggctcccgctccatggccgcgtgtcgccgcgcccggctcctccgccgctcacgcccgcccgcgccggcctcttaggttatcatcactcgcggcccgggcgcggcggtgcgagctccccgcctgcgggacgcacggagaccgcggtcagcgcgccgcctggccggcccagcgcgcccagcccgcgcccagccccgtccactcccgtccagccccgccgcccggccgcagtccccagggcgcaagctgggcgggtgccgcacagagcccccttgtcctcgccgcccgcccccggcccgggtcgtttccgccgcggtggccacggccccgccctcgttccgcgcccggactgggccacgccggatagcgggaaacaaaaaaagcccgagctggaaacttcagagaggtttagtttcgtttcccagaagcatcagttcggtcccaaaacgctgcaaacgcgcgctgcctgcagtaggagagaggaaaccgcgaagcgcgagaaaaggcgcccccgtccccaagcagcccgcgcgcccttccaggggccagacctgctccatcctggacggcgaaacgacctcgggagaccccggttaggaccttactccagggatcaactggaatcaaaatccaaaggatccatggcatccagtgctccaatttttaagtcttttttacgcaggacctctgctcctggggagccctgggaagggcgattccgcgttgcctctaagaacttctttcctaccccacttcccagcccccaccactttcagattccgttgttgggcgaactagaccgtttcctttccaccatcatcattactgcctttccttcctctcctaaataaattctttttcttttttctgttctttcttcatggaaaggagaaatatatcgctatagcaaagacagaatttggtttgcaggtatttgagtgtctgtttccctccctgggaaatcatgaggaccgaaacgctccttgtgcgctgtagctctgaggtggctgtcatggcccggacggcgggggaggcgaggatggttgtggggaggcgaggatggttgtggggaggagaggggagcgtcaggagggtgtcccagaagtgtggggcgaagggctcccctccacatcatggggcatccgagaaggggtgggagaataagcacggcatggaaaaaggagctgggagtcccccacgtccgcagtgagaccccacagatgtttcatggctgtgactgtttgcctcccactcaagaagtacagagatgagaagcagttatttcttgcccaggaggccgtggctgggcggttggccgtggccccaggctcttcctgggggtgcctgctaacaaggcactgccctggatggactcaaatcacgtcttcgccaggaccctggcttggggaggccctcccctccagcaccctggcttacccggctccagttatgacattcttacatctctgcccagttttgccaccatccacaatgttgcccagaacccagtgttagaaggtagagtggtgacaggtgtgaagaaaataatcccatcccccagtcacaggggtgggcttttgacatgtagaggcccagatcagggaaaggtttggctgaagtctgcattgttggggaaaggagtcaggtctcacagtcaaccagcagaaacccaaacggagcatcaactgcaaatgaaggcccacagcgcctgcagtcttgaggcctcacatcccatggctccgtgttttcctctaccagcccacctggtgacccccgaggccttcggcctccctacacttcggcctcctgtcttcacaggcatccccgtggacccttcgcccaaagtctccaggggtgtccgcgcctaccagactcccagcttcagccagtccacactgttgccaaagtaattaccgcctcattccatttgcttaccctggagcttccaggagtactcctggtgcttacaaagccaaatgctgattcctcaggcagaggtcccttgaggccctgaggggaaccagcttgctgattttcttcagcccctccctggttcaggcccagccccaaggtgagaggtctccttatccttctcagaacagtccttactcatcccatccacat

SEQ ID NO: 1241863 - DNA, 4001 bp, Homo sapiens
tatttttagtagagagggcgtttcatcatgttggccagggtagtctcgaactcctgacctcaagtaatccacttgcctcagcctcccaaagtgctgggattacaggcatgagccactgcatctggccaaacatacattaagtttaatttcaatgacagctacaatttccaatttacttttagatggttagttaactcttttcctactaaatgaaaatattcaatatgccacatatgaaaaaaataaaattctcccacccacaaaaaaatcctccaggggcacaaaaaaaatcatttgttccctcatttttaaatatttctgcatgatgagacaatataaaggcacaatataggttaaaataaatcactctgtggtttctcaaaaaaagtgaaaacagatccaccatatgatccagcaatcccacttctgggaatacatccaaaagaaaggaaataagtaccttgaagagatatctgtactcccctgtttattgcagcactattcacaatagccaagatatggaagcaataatatttcttcttgaggaataaaatttttaaatgtggtatttatatacaatggaatattattcagccatgaaaaagaataaaactctatcatttgcagcaacatggatggaactggaggatattatgttaagcaaaataagccaggcacagaaagacaaatatcacatatcctctgtcatatgtgggagctaaaaaagttgatctcatgaaggtagagagggagaatggtggttaccagaggttaggaaggggaagaggaagaagggggtgaaggtaggctggttaatgggtacaaacatacagtcagatagaaggaacaggttctagtatttgataacacggtagtatgacaatagataatgataatttattttttatttataataaacgatatagatataaacgataaaataaacgatatagataatgataatttattgtatctcaaaatagctagcagatttggaatgttcccaacacaaagaaatggtaaatgtttgaggtgatatatatgctaattacacatcgtatgcatataccaaaatatcacatgtaccccataaatatgtgcagttattacatatcacataaaaaataaaaaatacatttaaaaaaatcaaaactgaaatcactctgagtttacattttgtagtaaaggccagcatggagcaacagctgagtaaaaggggatacttcatgggcacaggtgttggtaatcccacaagaaaacctgtgtttcctcatttactttctaacaagacttcagcttccaattaatgtttttcaccagttttcttttcttcaaaacagctaattgttaaccagggacctgagacactctcttgcctataaacaaaacaactagaaggatacctttttctgttcagacaaattttagcactaaaaacataaccctcaaacctcagagggatagctcagtgcaaactgttcatgtctaaagcataaattgaccataaacaatatattgaataggtgcactgtatacaaaccccgtgaaaaaaataaaaccaactactaccaaaggaagtgacaaagacctacaaaccaagaagaaatgtacctttatgctactatcattggtcatttaataggcatgctaacagagtaaaaaatagacatttcaaacaacaaaaaagaaaatgtcacatctcccatttccaactaactcccccaaatttattttttagcaaaaggggaataataaagaatatttgtgaaaccttagtcaccaagatgaaaacagcaaaacaaaatagggatctggagaaaagaaacagatcgttccaaccagcccacagctaaatttccacttcatctcactaaccattgaatgctacccatctactcacctcaacccagacttaatcctctcccccaaaaggaagatttctcagcagtgcaggaagatcaaacaggtatccattccgtgaccatgccaaggagaaaagcaaggctactctgaaagcttgagggatgatacagaaaacaaactgggtctctagggggcattctcaaaaacctgagatcaactcctggaaaaacactcttgaccacttaccaccaccggaagctgctagatggcaatcagaatcagcatctcatcagaagaagaggaagaccttacaagaaagcagcttcactgtcagtgaggaattgagggagaaaagcactccttggaaaaatgctgaaagccctgaagagcctctcctcccctagttgcctgctcctgctgacaggacagaactggttaatcttggggaaacaaaaggaaactcccaagaggctggcttctgaggatggcttcctctgtgggaatcaagaattcaggaggatgaaaatgaacaatggaaggggacaccggctaccaggcctacttaccaaacttttaccagcccttgactgaggaagataagcaaatctgtttgcagttcccacctgcttttgcagagatgaaagaatcagcagtgggtttttgtcactttttttttttttttttttttttttttacaggggaagttcagctctcttatggatgaaagctaagcatactcaagtgacatttagtaggcaaagcaatgacacttctttcccaacatccttaatttcagcacagaggatgcaaacattaaccctgatggtaccaaagaacaaatgcacataggaaatggatttacatcttttagtttggaattgcttttaaggggattctggttgttaaagcgggattagatgaaaataaaatattttggtgcatatctatttttaaaaggaaaaatatggcttcttttaaatatgcctaaagccatctaggaattttccagaagttgcatcagatttgccagttaagtactgaaatcaaatagattttaatcatgtctctataaccagagcaagctaatcccctgcgcaccatcaactccactctcctggaacatcctcacgctgggccctcaggttttcacagaaacaagggccttttcctaccaaggttccacagtaacaagaaactacagatttctggaaataagagagatggctttctttcttacatgataaaagaggaccaagaacagcttagagcaggaagcaatcatctctttaaaatatttaaaataaaaaacacttttaagtgaaaaacatttttaagtatcacctctataccatttttaaacctatcatatggggcaaatataagtttggtaattccctttgttaaagaagatataaggaaatcagggccttttccttttcctatactgttagtgggaatataaattggtaaaatattttttaaaggaaactgagtatagtagtgcctatcaagtattgaaatgtgtatgtgtttttatttcttaggaatttaccttatagaaaaccacacacacgtgcaaacatatctctaaatatgttaattatagcactatgatagcaacaacaaaaaaacacctaaaaatggcttacatataagagactgcctaaataagttaaggtatattgatacaaaagagtactatgtagccattcaaaagagggtagaattggagtaaggaatcaggtcatctgagtttagttctgtctccaccagtgactggccaggtgactatgcaagctcctacacttatctgggccatctgtaaaaagatgatcattatagaacttacctcataggattgttgcaactaaaacagtgcctggagcaaagtagagactcaataaatttagctattataaataagagataggcctcttcagactgacatagaaaaagatgtccaagatgtactgtcaagtgaaaagatcaagttgcagaagaattgtgtataagataatctcatttttaaaaaatattttaaatgtgctcgctgtttattgtctccctcccactaaaataaaagctccttgagagcagggacttttgtttactgttgaactcctggtgtccataataag

SEQ ID NO: 1241864 - DNA, 4001 bp, Homo sapiens
ccgtctcaaaaaaaaaaaaaaaatatataccatcatttcacccaatttaattcaacagagattaacaaaacagaagcaccttcactcactcaattcaacttaaagacacttattagtaaagtcctgtgcgccagacaccatagttaacaccaaatgtaccattactacaattactcttaaagcacgatccctgcagctaaggaatatctactttgttctcaataaagtggtaactggttcacgaaaaagtaagagataaaatactgttgactcaagggcagcttgatataaatcccagctctgccactagctgtgaaagcttaggcaagtcagttaacctgtaaaaataaagattactctctatatatggatatataaataatatataacattgtagttaatatataattacatactattatattacataattctacattacatatatattatatatatataatagagttataagaacaaaatgtgatatatagtgggcactaggttggtcttagtttctgtcatttaccttagtttctgtcagtttacacgaggtaaactgaccctaaaaatgtttttatatctcattcaagttttgcctattacctatcttaatcctaacaagatttaagtttgttacatttaaatttaagttttatacttttttttccagctctgtattgctgtatacaactactctctttagggatatcttatctgctatgccctcaagatattgtaaatacttcagtaagagcaaattttgcctcatgcaaaaaagaattttttaaatcagtgtgcataagaatgcagaatataaagatggtcttgtcctacagatgttaaggtaacagaacaactcataaaaagacagtcctctaactcctttagctgagatatggttagctttgcccccatatatatcatcccctgctccaatctccaaaaacttccttctatgaatgtgtcaataagactgatgatattgctattaaaactcagaacttgactgctcatttataaattgaaaattcaaaacgacaaagcccagtgctcgctgatttctacacatacaggcataataaaagagaactacgctattacaaagaactatgcatctggtcccgcccccaaatactagagtccagtcgtaggggtcattctttcactcaacaaactttttattatgcgcctactgtgtactaggcattgcacagacagttaacaaaacagaccaaaaaatcctttccctcctaataacaggagcgtgcccgtaaaggctgccgagggaccacgtcgtggccgcgcctccgtcccatagtggtactcgtacagacagcccagccggcccacgggccgccgagacttgcagccctgacacacggccttggcctctgggttcctaacccggaccctggggcaggctgggaagccctcctacccccactgtctcgcgccagcccggccaggaggccacgagggccaagcgcatacccaggcgcgcccccgccaccaggcgcgcccccgcgccaccatccgcccgtcccgcgcaggcgccggcgccgccgcccgtctggcgcgcgcctggcacgctctcttgcggctcttgactggcggcctcggccccacttgccccagttacacgcggtcccagccccaccagccgtcgcctcttaccggcgcgctggcccctgcgccccagcctcccggctcccggcggctgcctcgcggggcgcctcctcctcctcggcctccgcgagcgccgcggaagccccggccacggccacggccccggcgtccgcctccgtccccgccgccgcctccgccgccgcctctggctaccgccgctgcggctccgggccgctcgctgtggcgatctccgccaggccggccgcggcctggccgccgcccacggcctccccgagctcctcgctccgcctgcatctggccgccgctggcggtgctgagcgcgcgggagccgagctgcggcggagacgccctggccccaccggaagcgggccgcacggaggagccgcgagcgaaaggcgcccggtagcagcgaggcgcggggtgcggggctagggatcgaggccggccgcagcggagcggggcggggcggggcggccggcgtcccgcaggtggggccggaaccgggaccgcgggaaggccggaccgctgggagctggaagtggtgggggtctgcagcggggcggggggattctcaaggcatcagagataggttgggggagagaccgtgctaagtgcaaggacgagtcataaaataaaatttgtatgatgtgaactctcggaaaaaaaaagtttaaacgtatgtatttgcataagaaaaggtctaaacaaatacatactaaaatgttagtggttaactgctgagatttgaagtgagttaattttttttcctccgtttaatctaattttcagcaacgaatgtgtatcattttaaaactataccgaagtcagggttcaggaggtgtggatgtaaagacaagagtttgtgtctggtgagaggtggactgcagcacgtgggagagagaacagtgcgaaactgggagatggctagaaagggcgtcaaagtcctcagcagaatttctgtagaaatgactactacagctgacatttattgagcacatgagtatttcattctcataacagctctatgaggtagggatgactgtcatccttattctgcagtgaggtaacagccttggaaaggttaaaaaaaacttgactaaagtgaataactaggtagtggtggaactggcattctaaggcggtctcactccagtcccttctttcaaccaaggagaaaacaggaaggggaacagttggttacacagatgcatgaaagcagtttttaacttgggactgaaaccacctgaaaataatgaaagcaagggctaaaatgtcagcctagcagaataagtgttttcttccccctcagtactttctggttctttcctatatccatacatagttaatacttttcattgcttctaattgcctactctgcatcaggcacagtgctatgtcctgaaattaaaaacaaaaacaaaaaaaaaaccttgcccctgccctcaagtagctcactgcccacaaggaagataatctagtcgtgtgaatagatgattacagtaccgtgttgctgagtgcagtgagagattcaagatcaaggtccaaagaagaaaagttaaattatatttaaacgggttacccaaggcttcatgagaaatagacccctgagctaaagcctaatggttgagtaggagtttgcctggttggtaaatgggagtaggggcgccttccagacagggggaactattgaaggattgtcaactccagagaaacagtcttaaaaatagtaacacttgtagagcacttatatgcaccaaacactattctacatacttctcatatcacttcatttgggactaatagctggcctacgaggtaagctagtgttgtctccattttacagatcaggaatctaaaacagatgttaagtaacttccaagattacacagttacaggccaggtgtgtggttcgtgcctgtaatcccagcattttgggaggctgtggcgggtggattgcctgagacatgagttcaagatcagcctgggcaacatggtgaaaccccatttctacaaaaattagctgggcatggtggtatatgcctatagtcccactacttgggaggctaagatagagaatcatttgagcccaggaggttgaggctgtagtgagctgtgattgtacatgggcaacagaaggagactgtctaaaaaaaaaaaaaagatttcaacatgaattttgagggagatgaacatttagaccatagcagtggggaaggggcatggaagaatatggttaaatatctaccagcatatcactggtctggcctctcaccaagttgaagatccacacattaatctcaaactagacatttgcacaaatcggagtttctcaatgttggcaaatttagggc

SEQ ID NO: 1241865 - DNA, 4001 bp, Homo sapiens
aaacaaaacccacacacaggtcagaggaggaaaatagaccttcagaggcaatcatcattacatgtttcttgtggtatcttccagaaatggtctatgcatggcatgtattactttggaaattttcaaaataagatttttttttaaatatcagattgttattttttaaaatgacatctaacataaccagcaaataccagtaatggtggtgatatatacattatcctttatgttgtaaataaattgtattcaaattaaatgcaattttctcatgatcaaaacattctgctttcgatcatgttttgccagaggaaaaggtgagcgcgcttagtgtattgccaggtacttagaaagtgctcaagatctctggcgtcctcaacagtcttggtaaccatcttggattatctttattaatggttttacagctcccctgactgacaaaccttcacttctttctttcttttcttttctctttctttttttttttttttcttttttgagagacagggtctcgctctgttgcccacgctggagtgcactggcgccatgatagctcaaaagcctaagctcaagagatcctcccgcctcagccaccggagcagctgggaccacaggcacgagccaccacacccggctaatttttgttattattttttgtagagaccaggcttcaccatgttggccaggctggtctcaactacggacctcaagccatcctcccgcctcggcctccctaagtgctgggattacaggcgtaagctaccacgcccaaccccctcatgttttcaaaaccgaaagtaagaggcacagtacatcttggaaacaaccaggcaaagagccaaagaggaagccctctgtacgaaaagaccacagggcccatgccgcccagtttgctctggagaatctcacgcagaaggcaggcgtttttcttaaaaaaaaatgcacgaattacagccaaaaggcatgcgctcccgcaaaagccctggttaggcttgacttcaatctcgattgctgccatttatcccctgtgtaattaagtttcttaaaatctcggtgccttagtttcttcatctgtgagaggcagaagataaccatagtagttatctatggcggaagataactgttttcaaaattaaatgacgcaaagcacataaagtccttggcacacagaaagatgtcaataacgggtagttcttataattttttaaaagtgacatgtgatgggaacaaataagttaattattcgaaaccgctttgtatcacagccaagcattctacaaacgtcgcgtgctgtttcctccccacggtgtggccccacatagacccagaggtgctaggacatgcgaacttagcgggcgcctagacgaagtccacagctctccagtctaagggaagcagagccgcagcagacaggcttacccgggcgacgcctcccccagaccccaagcgcccctccacgcgttcacaaacctcagcgccgcgcctttgggacgagcctacccgtcccccactccagctgcgctgggggagccagaggccccgcgaaagagcggaagagaaaccctcccccaacctcggcgctctgacgcttatcgacgccctaaactttgtcccgaccctcccgtcgccgtaggccaaaggtctcccctgctccccgccgaaaggggcaagtagcgcgcgtcccgggtgcgcacccccttccccactcccaggccaccccgccgcttccccgagatccagccctggactagccccacggcgggccaccaaggagaacttggagaagggaagtcacggagcgagagagcacagcgagggccacagagggtgcagagcgggagaggaaggaccagagcgggagggtaggagagactcacgctggatagcctccaggccagaaagagagagtagcgcgagcacagctaaggccacggagcgagacatctcggcccgaatgctgtcagcttcaggaatgcccgccagcgcgacgcctccacttatattaaacgcgtgcccagccaatcaggacaaggcccgcagggaccgtcacctgtctccaagccagcgacgcagtgccaggttagagagagggactttcccgttttcagtttccttttcttagagtctcgtgatgtttaagaaggcatgcactagactgggtgagtttgctgtctgtacatcggcgccctccgatctggggtgcgcgccccagcttgggacaccgggcgctcattctaggacttcaggctggaggcacattaaggctgccccctcgctttgcagactggccccagagatgctaagtgacttgctaatggtgccccagccagttaactgctcggacctgcatttttcattcgagaaaacggaaacccagaagattaagatctttgaatgctacctagcagaaggagaacttctgtttataactacagcttgggaattccctgcagggtttctccattctctgggtaagaaaaatagtcccaaaagcatcctgaggacagctcagagaaggtcctagtgaaagagtacctttcttgcttcttgtatcccttcaggaaaaagtgtttggaaagttctgtgccaagaagttcctccctatgtccttgctgtttaggtaattttctttgttctgttgatttgtcggggggcgggggggagaaaaaaacgaccactaatagtaaaagcagtaactgctagggctttagagcttccagcgccctctaggtacatcattctcttagtttccaccctagaacaggggctggcacatagtaggtactcagtaaaccgaatgaacgaatggatggatgaatgaatgaattagtgaatatataaataaactgtaggaggaaagaattacccccattcattttatggacaggggaaacaaaggctaagagactagaattcaaactctggcctgattccattgacattaatattttagacactggaagacaaagggctcggcaattttagtgagagtttggactgcatctgccttggacccagccaaggacgttaaacatgacaggcagacccattaagaaaacctaccctctaaagtgaccataaataaggtgccgccatttcgtggtggtggagtccacagatcttttctaagaggaacagtgagaagaggaagtggaccatggcgatggggaggggcagagatcttggaagtcaccatggttttcagttgaaaggatttgcctagcttccccaaggagcacaacaaataacttctaggtttcttttacatatttttaggcttttgataatctttattgtggaggccatgcctaaactaagaaaatgcaatactctccatggacctaatgaaatgagataatgcacaagagagagcctcccacaatgcctggtacatagtaagtgttctgtagtgtttaataagcgctataattattaatattatttacctagtttttctaccagccctctcaataactaaaatatgagaataattgttatgcctaaatgtatgagttaagacactcttgctccctcccttttcccccttttaaaaactcatataaggcactaaaggcctgaaatgttagtgttgagttgtactagaaaagtgccttagaagtttagcaagggacagggctatttttgcctctagtttcttgtttactacatcacagagaaacactaaatttaaaatccattacagatagattctgatttactcacttggaaaaccaatttaaaaaccaataaaaaacagtacagatagaaaaaagtcgattttacagttttctttgggggggaatacctgtatttttcttggacttaccatttatgacatgttttgaatagtgagggggaaaattatgtatacaactatttgtttaaaaacaagagcactgtttgcctaggatggcaaatttgggaagtctacaaacatgacaatttcttttttttttaatttttaatatttttgtggagacagagtcttgctgtgttgcccaggc

SEQ ID NO: 1241866 - DNA, 4001 bp, Homo sapiens
cgggggcctcgccgcccgcgcactcggaggcgagccggctccgccgcggcgaggaaagaccggcgtcctcccgccctccgcagctcgggacgcccgcgccgccgccgcccggccgagctgccaccctgcggccgccacccaccccgcccccggcctgcaaggcgggcggcccccgggggctgtcacctcgaggcgcgccgcgttccccgatggcgggaccgtggtgccggacccaggggagggaggtggcgcgagcgggcgggcggccgcacctgcttcgcgtcgtccgtccgtccgtcccttcccgggctggcgggggcggtggcgcggcgcgctcggtggggcgcgctgacgggcggccggtgctctcccccttcgctcttctgcctacctcgctcgctccctccctccagctcgccccttccccctcctcgaccccggcccctgactcaccagaacgggcggcgcggacggcgcggctctgggcgcccgcaggccccggccgggctggaatccggcggctggaaccccccgggggcgctcaattcccgggctccacgctgctgcgtcagcgcctcctcctgggggccggggccgggcgggcggagcggggaccgcggccgggcggggccgtcggggggggcgggcgcgcctggccggggcgggcggacggcgggggccggacgggcggggcaggcagccggacgggcgggcggcgggggccgggctccgggatccgctacgccgctcgcggttcccccacaaactccccgagagcggagcctccgccgccctccttcctgcttcctcgtccccagccaatcagcagcgcgcccctcggccagctccgccaatcagccgccccgccctgcgctggctccgccagccaatccggccctcggctccccctcccggtctctgaccaatcagaaccgtgggtcggtcgtcccaacgcagggggcagcacgaggcggccgggggaggcggtgcggggagtggtggggccttgggggaggggtgccgtgccaagggtggtggcaaggggtgattttctttgccggcttcttggatttttctcttcgtcttcagaacctgagcccgtatcccacggtgactcgaccccaatctcccagctgctagcccccccggaaaaatcttatctccccccgccctggccatcacccctccgcatcccctttcccccaaatcctccccagcacgcgctggagaaaactgcgggccgaggaacaccccatcctcgccggaggctgctgcccccagggcaaagcttcaggaagaccagccgaaaatcaagcgagaacaacccccctttcctgcagaaagggccccagactcctgcaaaagggccccgactgctgagaagcccctcccgcccttgcctcatctttccgacttccctgcctgccacgtctcctttcctttccagcaaggtcggtcctggctcggtaacccctcacccgcatctctttttcctctttctgcccttcacctaccgcccccaaccccagctcctaattcaccctcttcagaagcagagtgtggagccctcatccatttccagctgacagcagagcctggtctgtgagtccttgacacccacacaccctcttccaccaccgcggggaacatcagagctctccgggggagggagaaaggggcgggcagcctgacaggagcggctggactccctccctcgcgtccccaagctacgggagaaccaagtgtagacacttacctggcttccccctagtcaccaaatgctgtggctccgtctctcacccccacagacgtgccctcccaagcccgagcacgctcgcggggtcagtggggtgggtgggcacagcaggctaagggcacagagagagatgggaagtccctgttaggtgcgggaaggagctgtgtcttgggcacctggtggtgccagagcccgcctaggacttcactaagcccgggatatgcacacagtaggttctcgagaaatgctgagttcacccctgaacaaagcctcattcccaattcaggcgggggaggggagctttaggaggtaaaaggagcagcggcagaaagggtagtgtcaagtcaccagagcgctggagcagcccagggaggggctgggccccaggaacgccttgggcagagagaggcacccagagtgctgaggctgcccaggcaagcaaggaaaacccagccttggagtgtggcccaggggcttcggaggggctcctcctgcaccacacacagcgcccagcctttcctagaccttgggactccagcgctcacccaggcagccttttaagacaatcagggctgctagccaatatggctgggaaacaacctcccccagaagcagttccccatctgcctccagagctgtccagggggcccagactgtcttagctgtttggggggacacacttaaaggaggggccccctcagcagggaaagtgtgtgaatggaagctaaaagctaaaactgtggcacggaaatgtctcgaaggtccaggttctcccactgccacttctcccacctcccacccttggggaaagcaaaaccccaaagctgtaaaagtaggacgctgaaagatttctccccttcctggacaggacagaggttcccggcagcgcccccccaacacacaccaggccagccctactccccacctcacagaattccccctctccctgtcccagtctggcccataggcaaattaaccccacggtggcccccactcgtcagagattggtggtggagggtacagcagtggtggccacgggggcagagccatgctacaggccaagacagaagagaggccgggctcctgtctgcagcccaggcggcgctgaccttggcagccacttcaggcctgataatgggcagggatggaggccgggagggccagaagaggaatgtacctggtggcagggaaggagacctaagtggcaggaagcccacgttcagccgaggaaatggcagcaggacgaggtggcaggattgggtgtcttcctggtgttggcattagagggccctggggtgagcaggggagtgttgtcttatctggggtctcagtgggagggaaaggaaggaataccaaccggagaggaggcagagtagtcatgacagcccaccaagtgcctgcctggccgctggaggagttctcccctcagagcctccagtgtgggtggcggtgtccgctgccccaggaggctctgactgagtgggctatggtgcggggacacgggctggctaaaggcactaagtgttcctcctgtgccagctcactgagccacctctgtccccccttcctccctattgcttgttaaaacaagccagcaaagaataggcaggggctacaccctgcctgtcccccaaagggaacttttggcctctcctagcctccttcacccaactttcagggacctctgcaactgggcctccttctttcccagtccaaagcccttccacagctggaaagggctccacctcttcctccttccttcggtcctgtaacctttcctgagtgaatgctgcctccaccccacttcactgggcagctgtgccaacgcctggggcccatcacctttcctctccctggtatgtttggcagcccagaggtctcccactgaaaaaagggtttggcacttggtgtagaaagaggaatgggtccatcgggtctccggagtctttcccgggctgctgccaggcaggggctctctctccccagacacctccagacccatcgggaagggttaactgcctcagagggagatgccctagagtaaaacatccagggccagagagaccacgcggcgcacccttcccccaccacacacaaccagactgacagccgggacagactggctgctcggtcatctccagcccagccccagcacctccccgccactgcccgctgcagtccccgaagaccgcctggcctgagatccaaccacctggcaccaggcagggcaccccaacggcagtgc

SEQ ID NO: 1241867 - DNA, 4001 bp, Homo sapiens
cctacctgaggtgggactcgaactcagattctcagcaaaatccacattctgaaacagcctgagtttccctgtccttatgatcccaactcttcttttgggtgtggggttcacatggagggcatgggagctctgaatgagtttttccaagcaggtaaacaacatccagctcacagctggtcaccgggggagatggaggcactcacagcttaagccagtggttcctaagcatcctccaagctggccaaggacagtggtgcccctccaagacatgtggtccctctgggccctttttctttttttttgtggaagacagcgaggtgaagagagtagggaggaaagtctcaggtggcacaaagtaaaaggactggaaagctttttatttcattattaaattcctgcctggatttataaactcagcttctcatttttctaagtgggtacctttgtggctaaggaaaagtgctggaggcagctgcggagggctggcgggagcccacggggtggggtgtctcttgtcctaatcaaactagtcttctgcacttctaacactgtcgacaatgggcgactaggagatgtcccaggtggggttagacttctgcctgtaggcagactctgcttgttgaaaaacccctcattcttgacaggctctacagcggctcactgggtctgtcgcctcggtgagtagcaaccccgtcgccaccagccaaggcacatcatgagcatacacccccaccccggcccctcggcccccggcaagtagaccccacttcccagagcctcgaggccaacagcgagcggctagagcggcaagccagtgccgcagctcctcccggcgggcgccccggcccccgcagtccccggggcagagtccggccccgtcgcccgcccctcggagtgggtgcctcggacccgctcccctccccgacgccaccacctgcgcccgctccggcgccgcctttgtccggcgcttcaccgccaagcgagcccctcgggcccgacctgacccggcccccagccccagaagagaggcggcggagcgagcagggcaagaccaggccgggccgcgagcacagggtcccgctgtcacttggaggcggtctgacaacttcgattccccccgccacacctcggactcggccgccgccccgcaaggtccccgcagggcctcccgcggcccacactcgcttttcgaaccggtccccttccgtcttcggcgcctcccttcctctcagcccgatcgagtcgggtctacactactcccccctgccgcccccggcccggcgcggccctcatcccctgccccccatccagcaataaccggtcagctcccagcgcgggagggcgccccccaccctgagcgggcgatcccgcggcgccgcccccggccgcggccccttgcctcggggaccgcgatgggggagggggcgcggcgggggcctcgccgcccgcgcactcggaggcgagccggctccgccgcggcgaggaaagaccggcgtcctcccgccctccgcagctcgggacgcccgcgccgccgccgcccggccgagctgccaccctgcggccgccacccaccccgcccccggcctgcaaggcgggcggcccccgggggctgtcacctcgaggcgcgccgcgttccccgatggcgggaccgtggtgccggacccaggggagggaggtggcgcgagcgggcgggcggccgcacctgcttcgcgtcgtccgtccgtccgtcccttcccgggctggcgggggcggtggcgcggcgcgctcggtggggcgcgctgacgggcggccggtgctctcccccttcgctcttctgcctacctcgctcgctccctccctccagctcgccccttccccctcctcgaccccggcccctgactcaccagaacgggcggcgcggacggcgcggctctgggcgcccgcaggccccggccgggctggaatccggcggctggaaccccccgggggcgctcaattcccgggctccacgctgctgcgtcagcgcctcctcctgggggccggggccgggcgggcggagcggggaccgcggccgggcggggccgtcggggggggcgggcgcgcctggccggggcgggcggacggcgggggccggacgggcggggcaggcagccggacgggcgggcggcgggggccgggctccgggatccgctacgccgctcgcggttcccccacaaactccccgagagcggagcctccgccgccctccttcctgcttcctcgtccccagccaatcagcagcgcgcccctcggccagctccgccaatcagccgccccgccctgcgctggctccgccagccaatccggccctcggctccccctcccggtctctgaccaatcagaaccgtgggtcggtcgtcccaacgcagggggcagcacgaggcggccgggggaggcggtgcggggagtggtggggccttgggggaggggtgccgtgccaagggtggtggcaaggggtgattttctttgccggcttcttggatttttctcttcgtcttcagaacctgagcccgtatcccacggtgactcgaccccaatctcccagctgctagcccccccggaaaaatcttatctccccccgccctggccatcacccctccgcatcccctttcccccaaatcctccccagcacgcgctggagaaaactgcgggccgaggaacaccccatcctcgccggaggctgctgcccccagggcaaagcttcaggaagaccagccgaaaatcaagcgagaacaacccccctttcctgcagaaagggccccagactcctgcaaaagggccccgactgctgagaagcccctcccgcccttgcctcatctttccgacttccctgcctgccacgtctcctttcctttccagcaaggtcggtcctggctcggtaacccctcacccgcatctctttttcctctttctgcccttcacctaccgcccccaaccccagctcctaattcaccctcttcagaagcagagtgtggagccctcatccatttccagctgacagcagagcctggtctgtgagtccttgacacccacacaccctcttccaccaccgcggggaacatcagagctctccgggggagggagaaaggggcgggcagcctgacaggagcggctggactccctccctcgcgtccccaagctacgggagaaccaagtgtagacacttacctggcttccccctagtcaccaaatgctgtggctccgtctctcacccccacagacgtgccctcccaagcccgagcacgctcgcggggtcagtggggtgggtgggcacagcaggctaagggcacagagagagatgggaagtccctgttaggtgcgggaaggagctgtgtcttgggcacctggtggtgccagagcccgcctaggacttcactaagcccgggatatgcacacagtaggttctcgagaaatgctgagttcacccctgaacaaagcctcattcccaattcaggcgggggaggggagctttaggaggtaaaaggagcagcggcagaaagggtagtgtcaagtcaccagagcgctggagcagcccagggaggggctgggccccaggaacgccttgggcagagagaggcacccagagtgctgaggctgcccaggcaagcaaggaaaacccagccttggagtgtggcccaggggcttcggaggggctcctcctgcaccacacacagcgcccagcctttcctagaccttgggactccagcgctcacccaggcagccttttaagacaatcagggctgctagccaatatggctgggaaacaacctcccccagaagcagttccccatctgcctccagagctgtccagggggcccagactgtcttagctgtttggggggacacacttaaaggaggggccccctcagcagggaaagtgtgtgaatggaagctaaaagctaaaactgtggcacggaaatgtctcgaaggtccaggttctcccactgccacttctcccacctcccacccttggggaaagcaaa

SEQ ID NO: 1241868 - DNA, 4001 bp, Homo sapiens
tattctattacacaaacacttgtgatgagcactagaggataagctatatttgtagcaatgttatgttacccattatcttttacactttaagattacttagaagtattttctttttttttttttttttttttttgagacggagtcttgctctgtcacccaggctggagtggaagtattttctttcctatgtttttaatatttaaaacccagtaacattaaccatgctatttactttttttttttttctgagacggagttttgctctggatgcccaggctgcagtgaaatggcacgatctcggctcactgcaacctctgcctcctgggttctaagcgattctcctgcctcagcctccctagtagctgggattaccagcgcccgccaccacgtccagctaattttttgtatttttttagtagggacagggtttcactacgttggccaggctggtctcgaactcctgacctcaggcgatccacccacctcagcctcccaaggtgctaggattacaggcgtgagccactgagcctggcctatttaattattttaaaatctgttttttctttctttttttttgagaaggagtctgtctctgtcgctcatgctggagtgcaatggcatgatctcggctcactgcaacctccgcctccggggttcaagcgattctcctgcctcagccttccaggtacctgggattacaggcgagcgccacgatgccccgctaatttttgtatttttagtagagacggggtttcaccatgttggccaggatggtctcaaactcatgacctcaagtgatccacccgtctcggcctcccaaagtgctgggattacaggcgtgatgcaccgcgtccggcctagctattttaaatttcttagcttaataaaaatgtttcggccgggcgtggtggcaggcgcctgtattctcagctaatccggaggctgaggcaggagaattgctggaacctgggaggcggaggttgcagtgagccgagatcgcgccattgcactccagcccgggccgacaacagcgacactccgtctcaaaaaaaaaagtttctgtcttcagagttttctaattagactagaataatatgactactctgcaaatgagagtagaaaacaaacaaaaggccctctaacaataacactaaccttgctgcttagccaaaactaagttgtaaaacagccaaaggctgctatttgtactgttttccagggcgtttttcgaaagacaataaattccgaatacctaaaatcattctaacaaatggacagaacaggctttcaaacccaacactaaagcaaggtaaacaaagcttcacacttggcactttaccgaaattagatccaattatagatatatgcctcaaaaaatagcgactaggtcatcctgaattcatcgggttcctctatattagcagttctgtggagtgaacgcccaactcagccttcagatgaattccaaaaccgtactttcctaaacttaatcaccacagaaaaaacacagtcccgctccactggcagaaggcagtgacgctgcaagcttccaggcatgttaaattcccaattcacgggattaacaggaactgtctacacaagtgctagtcattaccttccaaacccccgagacagaaaaagatggcactacggtaagagccattactggtgaaaagtctcccttctccgtccagcgcaccccaagagggactacagtcctagaacaggacctgtgctgctaagtatccagacttgccccaggcgaccagttcccgggacagtaaaaaggggaccgtgtcgccccgcccaccctgagacgctcggcacccagctccgcctctctccaggaaccgctgcatgggacaaaagccacccgccagcttgccttgccctgcggccgggcaactaaagagaatctcggcgctcaccgtcgcgactctctcctcagccattttagctcagcccaccgctgcgcggccggaagtcggcggtttcccagacgacgaggcaagcggaagtcgtagggctgtggaggactgtgaggaagcgggggaaggaagtaaatcgccgagtgacctaaggaatcagggggaggattagggtctgctccacagaaggcttacctctgaaagagtcggggagggaatgcgcagccactcgctgcctttatcccgagaagcccctaacacccctcgccgtggtctgtacatggtctgtacctccggccgcgctggctggtaggccagccacctgggatggcagcctagttctcccgccaccttaccctgccctgactctaatctgcatttaattcagtccttcttccgggagatttcggcggagaatttctttctcgccttaggtacaaaactccccgtttcttggctgtcactatcgaactgaggtactcaccttatcagcttcccactcttgtttactccagagtttgcaaacatgctcctggtgggctgcatttgaacggcagtcttttgattggaaatatttaaaagttaggagatttcacaagaaatcggccatgggataaagagacgacagtcggcgttttctgcaaggcagtgaaatagatctgaatagcggctgcgactgtagataacttcccttcctaacatacttaaggcgttctccattacctgtctggcccccggtgcggtgaattaaatgtttagtgtttctaaactaggaaaacgtgtgggctttggaatcaaacatgagttctgaatttgactactgcatgacctaagcccgtcgtttctttgagcctcatttattaaagtgccgggagctgtgtgatgaacaaaacggaggatccctgcacctgagcactgacattagccccaattcatacttttaagtctcgcccttgtaatttagacataaaatctgcctctcccaattcattaactgggaaagcatttaagacaagtttctccaggcctctaagagagggagaaccccactgacaattagagttacatagaagaaacaagtacggtaatctatccaaatacaaggggaaaggacagcaatagaataacagctcttctaagtatttcagtaacactctctcttttaatctttataacaatcccatgagactgttggtctcccacttttttcagataaatactctgcctttcatttattaaaaataaaattttccagcttggccagcatggtgaaaccccgtctctactaaaaatacaaaaaattagtcgggcatggtggtgcccgcctgtaatcgcagctactcgggaggctgagtcaggagaatcacttgaacccaagcggcagaggttgcagtgagccgagatcgcatttctgtgctccagcctgggcgatagagggagactccgtctaaaaaacaaaaatttgctgggctcggtggctcacgcctgtaatcccaggactttgtgaggctgaggtgggcagatcacctgaggtcaggagttcaagaccagcctggccaacatggtgtaaccctgtctctactaaaaatacaaaaaattatccgggcgtggtggccggctcctgtaatcccagctactagggaagctgaggcaggagaattgcttgaatccaggaggtggaagttacagtgagctgagatcatcccattgcactccagcctgggcaacaagagcaaaactctgtctcaaaaaaattttttttcagaggcaggggtctcactattgatgtccagactggacttgaactcctaggctcaagtaatcctcctgaggcaggaaaatagggtctggaggtagggaacataaggccaattcacacttcagctataacaggtaatattctgtccatagggcataggccataaatgtctttgtaactttacttcatcttctctatttacataaggcatacccgaagtaaccatggaatcctctggggttatttaaactccccaaaattctgtaacggagccactgaacttctaagctcaggcccgctcccacactggagtg

SEQ ID NO: 1241869 - DNA, 4001 bp, Homo sapiens
caaggacctaacaaattaaaaaatgtatgtacaccatgacccagcatctacaacccaacatccaccctagaaaactacacacacgcacaagggaagatttacgtaaaatgatattcaatgaagcattgtgtgtgacagcaaactcgaaataacctaaacagctatcagctagaaatggccaggtactctacagcacttacatataacagaatatacacagcactcttaataatactattttaaataattctgggtaaaaaaataagtggcagcattagtaccatgtactatttttacatatacacatgtaaaaatatgtatgcaaaatttatatgtatacataaaaaatctatgtgtatatgtaaaaaaggtatgtgttatatggtataacatatatgttatgtaaaacatatacataagcatacatatacattttatataaaactttttttacaaaaaatgttttacaaagaagtattgtttattttctatggatagattcagtaggcatgttttgcatgcaaaataattgataacagtggttacctcttgggagaggtgaaggccgttggagagaggatcaatgaacacttaagtgctttaaaaaaataattattaagtatattggaatataaaggaaaccatatacatccagctgtgtcaggctttttaccaacatgagtttcaacacaggcctctacatagtcttggcttttttaggcactgataataaagtaaatttttatttgaaaattcttgaataaaggttcttgctggtcatacagtatattatgttttaatcaacaaactttaacagcccggaatttattattagtaataatgtgttatatattatatgtaatgtaatttgctatatattaatatatgttactatttattatgtattagtaaactgaaaaacaccaatttgtaagcgatgaacttacaaaaatttacacctgtcttttgcaacccataaatacctaaaaataacagcatctgatagcaactttctgtgctgattgtagaaatttctgtactgtctgtactgtcatgacaaccctagcaaaagctaagtactagattagagtgtgtgcacagctgattgtgaagctgcatgagagaggtgctttattaatccccaaagctcactactgtaatttatactgttaagaataaaaactgaaaacataagtgctttccaactataaagttcaagttcaaggattcattggaaataagccagaaagtatatttttattttaaaaattaaaacaaaccacccaaggaaaatagtattcttaggtaaagtgttttgttgttgttttaactagcaaggaaattctcaatttctatttcacaggaaagaacaatgaagaatttttccatcacacatacccagcctccgttttgccttatccattctcctgtgttattcattatgaactccgcaacaaaatatgaaatctccttataggtatccacatccggggcaatttgctgtcgtagaagtttcttgatgagaataccttcaaatgcaaatatggttacaattcttccccagttaatgatgccgtcttcaaactccttttccatcacttggttgaatagtgttctggcagtgtctacggacacaacattaacattgtccaagcatgacttcagattcttttccacttctttttggactgagaacgcaacattttgtagcactctggacgttttgcttggacctgatccaggttgtggtatctgtaggacgcactgcagatagtcctgagccagcctgtaaatatatccaaattcacagtctgtcatcttctgcctggtggagagcaaagtcttgagctggctcaccttgaagctgttgaggcaatgtgctgagaatgctcactgagcttgactgagttatgacacatgatgatacatggaggctggtggaatttctgtttgcatcactttataatatccttcctcctagtcactttcgtgcgtaggctgtgtttcatgtcatgtatgaaagagaaagtttaaaatgtgaaagaggaaaatgtttcagagaagccacttcctcatcctgtgattaattcagctttgcaagtcttaaatgcaggatgtggagaaattagaatccttgtagattgctggtgggaatgtgaaatggtacaacccctgtgaaaatgttggcagtttctcaaaaagttaaatacagaattgtcaaaagacccagcaattccattcataggtatacacccaacagatactcaaatacttacatacgaatgtacatggcagcactattcacaatagccaagatgtggacacaactcaaatgttcatcaacagacgaaaggataaataaattatggaacattattcatcccaaaaaaggaatgaagaactgatacatgcttcaacaggaatgaacctcaaaaacattaggctaatagaaagaagccaaacagaaaaggtcatacattatgtgattctatttctatgaaatatccagacagttaaatccataggatagaaagcaaattggtggttgacaggggctgagaagaggaaggagtaactgcttaatgggtagaaggttttcttttgtgtgatgaaaatgttttacaaggccggccgcgttggctcacgcctgtaatcctagcactttgggaggacaaggcgggcggattgcctgagctcaggagtttgagaccagcctgggcaatatggtaaatccccgtctgtactaaaatacaaaaaattagccaggcgggtggcgtgtgcctgtaatcccagctactcgggaggctgaggcaggagaattgcttgaacccgggagacagaagttgcagtgagccaagatcacgccactgcactccagtctgggcaacagagcgagactctgtctccaaaaaaaaaaagaaaagaaaatgttttgcagctagatagaggtggaagttgcacaacactgcgaaggtactaaatgccactgaattgttcactttaaaatggttctgtgaatttcaaatttaagaaaagtcttaaacgccatccacggggtaaaccggagtaacgacaatttggaatggagactacaaaacagcctgggtggcagagaacagggcctctcgaggtgactctggcagtaccgcccttgatcatttgtaattgagtaaggatgataccgagagggaagaaaaaaataccctctttgggccaggcacggtggctcacccctgtaatcccagcactttgggaggctgaggcgagcggatcacgagatcagaagatcgagaccatcctggctaacacagtgaaaccccatctctaccaaaaatacaaaaaattagccaggcatggtggcgggcacctgtagtcccagctacttgggaggctgaggcaggagaatcctttgaacccaggaggcggagcttgcagtgagctgagattgtgccactgcactccagcctgggcgacagagcgagactccatctcaaaaaaaaaaaaaagaaaaagaaaaagaaaataccttctttggtcttcaccttccacctactctagaatttctgatagaaaacaaaattctgctttaagcctgacttaattcacatttttaactcaggtaaactatccgatgtgtggattagaaattgcaggaccagaaagagcactggacttacagtcagagggcctggactcagtcccagccaaatctctctttctttactcagtatgtaccttgggtctgtgcttaatttgtaaaatgaggcaatacatgttgacctcagagggttgaggtgaagttcaaagagatgacctatgtaaagcctctatcaccatgcctggtaaaacgtacgtgcctaatcaaagctagttcctcattgttcttttgtggactaatgaggaatttggcctcccaatcatctctttacctatcaaggatataacttcataggtgaaatgcaaatctcatttgatttagctatggcagcaatcctgagaaa

SEQ ID NO: 1241870 - DNA, 4001 bp, Homo sapiens
acagtgattagccaaaaacaacaaaaaaaggcttcaacggcccctttccaattctaatctcttcttcaggtacagagagcccggaggggccagatgccgtattgagacagggctcaggtgaggctcttaggcacgcagctgaagggagttcaccggcccagagggttgaagaccaacactaacattatgaacaaggcaggagttcctgctaacacacctcccactccctttcccttctcagatagaacccaacttgtcactatagaaagtctaaatgggggccaggtgaggtggctcacgtctgtaatcccagaactttgggaggctgaggtagacagatcacgagatcaagagatcgagatcttggccaacatggtgaaagcccatctctactgaaaacacacacacacacacacacacacacacacacacacacacacacagttagccaggcttggtggggcgcgcctgtagtcccagctactccggaggctgagacaggagaatccttgaacccgggaggcagaggttgcagtgagctgggatccaccaccgcactccagcctggccacagagcgagactccgcctcaaagaaaaaaagaaaaaggtctaaatggaaactgcccccaggaggctacatttcggatcaaaaaacttgctggttttaatagtttggctataggtatccgataacatgggccacttcagtcattgaatcaacgccaataaggtggtggggaaagaaatggggtctagctcagagcccccagaggcatgcagtgggctcatcaccaggtggctttccttgatcatcagctgcagggcaagggcctgtccctctaaccttgaccacagagatgaaggcttgcagctgaaagccaggggcctagaacgttctcaccgaggactgggtgcagaggactagaaattaaggaaccttgggtcagcgccaccactgggcgaccaccacactccacaacctctctggccaggctgagaggcgtagggggttgtgatcaatgggtctgagtctctccaaaggcgcatttaataggcgaaggagaaaaacaccccacctggctggggccccgccattgctgacttcattggttggggatttctataggagcaaaacgttcagacctaacgtgggtgcccccctaaaagtccccgacggctaaggccagggcaaggtccaagtgagcagacctaagcctgcgcagctgcttcggaacggttcacggccgtctaagaaggccgatttctgccggcctttctgccaggggaggagaaaccccagacttcacagcgaacgttccaggcccgctgaaacgagcctttctgctttcacgaaacctcgttccaggggcctggcgcggtgggttcctcaccgtgccagcctcgtgggcgcttcccggctgcccgtcccgccccgtgtcccggtgtccgccgcgtgctcacccagccgccctgagcctgcagccaggcgcggtgctgccccatgagccgcgagctcagcaaggccaccaggcgctggcagtcccgggcgacgtcgccctcctgctcctttagccgcggctggaagccccacttcttccaccgggcggtcaccagcggccctctctccagcagcgtccctgcgaaggtcacgagcgtcaccactctgccccaggtggggccggggctgtcggagagcacggaatccgccatcagcgccaccagctcgaagcggttcccggggtagccgaggtaggcggagaaaaaggaccggtgaatctgccgtaacctggcggccgcggagcgcagcacggcggcctcgggcgtggatggcgccggctcgggggtgccgggttcccgggcgcagtaccccaggtagtcggccagcaacagctcggtgcgctcccgcagcgggtcggccatggtggtgcgctcccgcaactggtcaaccatggtccggcctctgctggggggccgggccttcgctggttttcttggcccggccgcgcctcccccagggtagggctgccgtgccccgccccggcccccggcccccggcccccggtatattgtttttcaggactgagagaagagcctttgatgggaatcccacctgcacctgttccagtccccaaggcaaggcctggtggtgcgcacgtgttcgcgtagcaatcagatgcactgtgagactcgggttatttagctccagtggcgcgatcttggttcactgcaagctccgcctcccaggttcacaccgttctcctgcctcagcctcccgagtagctgggactacaggcgcccgccaccatacctggctaatttttttggattgtttagtggaaacggggtttcaccgtgttagccgggatggtctcgatctcctgacctcgtgatccgcccgcctctgcctcccaaagtgctgggattataggcgtgagccaccgcgcccggccatctaatatttatattaaactttctcagttcatattactccgtggcttctttctcctgattggatccagactgatgcagaatggatactagcagtggtatttctgggggttcaggggtctggagcatgttgaaatagccctcccagggtgaaagatgagttgctgcatcttgcatcactacaaaagaggcacggcacttggcagctgtcttagtctgtccaggcggctatagcagaatgccatagactgggtgacttataaataaaggcatttatttctcacagttttgttggctaaaaagtccaaggttgaggccctggcaggttctgtgtcttgtaaggacctgcttcctggttcatagacaacaggcttcttgctgtgtcctcacattgcagtaggtgtggagtagctttccggggtctcttttataaggacaataatctcattcgtgagggctccacctttgtgatctaatacctcccaaaggccccatctctgaataccatcacactgggggttaggatttcaacatatgaattttgggggacacagcctggaacagtaagccattttggactttgaaggcaacatatactgtgtttgtgctatttcaacccaattgacaggctggtggattgaggagcagaataagagaagactctgcagaaggttcaggctgcagtaaagctgccctaccacttgggtcttgtgatccaacagatccagtgggactttgtccaacagggatgctgtatggagcctctggcaagcactgacaggagagagtacagacctctagaattctaaagtaaatctagaacctcttctgaagataactactctccttctgagaagcaggttctgccttgctactaggccttgatagaggcagaatgcctgaccatgaagcttgagctcccatcatgaactggatgtcatctgacctacgtagccataaaattggatgtatacagcagccacctatcatcaaatggaaatggtgtattagaaacagcccaggcaggttcagaaggtataagtaaattgtatgagcaggcggctcagactcttccaacatcaactcctgttgctttgcctcctctccctcattctacaactatggcttcttgggatgctgcctatgtccagttgactgagggagaaaaacctccagcctggattatagatgggtctgtatgatgtgctggtaccacatgaaagagaacagctgcagtattcactcacactcactcaggggtgactgtgaagggcagtggtgaaggagaatccttccagtgagcagaaactcaaggctgtccactatgtctggagtgagagatggccagaatacagacctaaattgattcatggacagtcgctgatggtttagctggatggtcagggccttaaaaagaacaggactggaagattggtgacaagaaaatcttggaaagagatatgtggctgaatccctccgaatgggcagactgaagatatctgcatctcacctgaatgcccaccaaagggcatccactgcagagaagaccctg

SEQ ID NO: 1241871 - DNA, 4001 bp, Homo sapiens
gcctggcctcatttcagatatatttaaaatctcactcatggccgggcgcggtggctcgcctgtaatcccagcaccttgggaggcggaggcaggcggatcacgaggtcaggagatcgagaccatcctggctaacacagtgaaaccccgtctctactaaaaatacaaaaaattagctgggcgtggtggtgggtgcctgtagtcccagctatttgggaggctgaggcaggagaatggcatgaacccgggaggcggagcttgcagtgagccaagatcgcgccactgcactccagcctgggcgacagagcgagactccatcccccaaaaacaaaaacaaaaacaaactcactcattccaggaatgactatgaaaaaggaaaaaacagataaaaatttaaaaatcaaaacaataaactatcactcattccccttacctttttcccttcccttcctgctcataggtaataccacctgtcctgaagcggatgtgtagaacttcccagcatgatgatgttctactgcacatctaacacttttcctgattttttaactcttggtttcctcagtaaaacgaaggaaataactacttctccaggttactgataggactgtaaactatacttataaggtacctgtcatggtgagtggcattgaaagtgacacaggacccagaaatttcatttcttcccagtagattataagctactgtctgacagtataagcagcccagctaacaaaatgttgatttaattaattctatttactattccccaaacagaatacttttgcctacccgcttcttcatcttctgatctctcatgcagtctctcgaattcctgtcccttaatcttgacagtgacacaccagtgttatttatctgcatgggtggcacaaggagctgtcagtcacctgctccatctcacgccatgaggtacctaaagttctgtgtgacctaaggacaggtgagggctataggagaaagcctaatgttgtgggacatactttaaaatcaggcgcttagttcaaatcctgtatctctagcacttaatcaccaaatgctctttctgtacggagacaacctctttgtacttcagattctccatgtctaaaatggggacaatttcatccgcttctctgggtaatgataacagaacccttactgtgtactatgtaacaggtagccttcgaagcatttattattgcatatattaagtcgtttaatcctaacaaaaacgccaggaagtagaagagaccatttcccccatatgacagacgaaaaccaagacacttagtgtttcagtaacgtgcagtagacacagagctaaatgtgaaggagccagaattcgaacccaagcaatctgatgcagtattcttaagcacttcgctttgctgggatatcgtaaagctacagttgtaagatcaagggtgccaggaacatggcacacagtagacactcaaaaacaagagtagcccagctcgtgattatggaaggccacagaaaaagtacaaagtgttttcgttgttcctcaggagggacacggaggtagtagtgccagaggtctgggctgggattactctgtgcagggcatcatgttacgcactggagtatatgggcaacaacatgccaggtcctagcccatgctcggcctccgacgccccgggagaccttggcagagttcgcccccgccccgggcctctgtttccccatttgggaacgtatttatgtatctgctgtcctcccaggatgttggccagactagaggactcagcgggccgaggcgaaccagtgcaggaaacggaagaacccgagcggcctccagctccgggccgggccgccagagcagggctagatcaatgcggaccgacccgtagttacgcgcgcggtactcacctcgcacgcagactcctagcggacggaaccaggatccaaacttcccgcgccgcaaccacggccgccgcgccaagccctggctcacttcccgccggaagcttgcctattccgattggctgcttcctggggaagccgaccaatactgtcgcactcggacatctgttcccgccccctcaggctgctggggcggggtcgccgtacagcgccgggagggacgcgtatctccaaagcccaatcagagtccggacgggagggtcagatgactacggttacatctcgggcttccggagctagttgggtctttgtttttggtgttttagagtcggtgaaggctttaaaggaagtaggcagctggaacccggctgtggcgggttgaaaagcccgggcgtttgagagctgagacttgccagttcccacaggccaagccaggcgtctgcaccccattctcttggttccgacggtgtgtctctgcgatgttttggcggtctctcctctccatccccttaataatactggtctctgtttcacccgtacccctctacacgagcaggtgcaaattgtcattgaaccgggaaagtgggcacacactcagatgcctccatggacacgtgagaaaccatgcttctgtttcagcctattgctgacacgcgggaatgtgggccctgtgatgccagatcttactttctttcctttcttcctctcttctcccctctctacttccttccctctctccttccctcccgccctccctcctctttgtgtgtgtgataaaatctatctaacataaaattcaccatttttaagtgtacagttcactggcattaagtacattcacattgttgtgaaaccatcaccactatccatctccagaactttttcattatcccaaatagaaaatctgcctgttacacagtaactccccgttacccgtttctcacaaccccttatagccgatattgcactttctgtctgtaagtgcgaggtaccgcatataaattgaatcatacaataattgctcttttctgattggcttatttcacttagcataatgtcttcaaggagcatctatgttgtagcatgtatcagaatttcttccttcttgaggctaaataatattccattatacatgtatactacattttgtttatccattcatccatataaatggatgcttggttattcccaccttttggctattgtgaataatgctgctatgaactttggtatacaaataatcattctccacataatacgcagaaagagttttctaaaatgtaaaaatctgttcaagttacctccctcctgaaaatcttctatggtaaattgaaaccaaaatatgatactattaaacactccatagaatagctgaaatgaaaagactgacaattcccttagttgcaaagatgcagaaatgggactctcatacagtgttgatgggagtgtaaaatggtacaaccactttggaaacatcagtctctactgaaatcaaatttacccctaccctataccccagaaatcccatttctagatatttaccccaaaaaatgaatgcctttattcaccaaaagactcatagcagctttattcataatagccaaagggaaaaaacccagatgtccaccaatagatgaatagataaattgcagcttattcatataactgtatactactgttgaagaataattttaatatcaaatataatacagatataaaataaatgttagagattttatttaactcattaatgaatgagatatccagaaagattacaactgcttcaatggaaaattcaaagtaccacacacatagtcaaatgaggaataatgaaataactacaaatatatacaaaaactggcagaactgatgaaatccacagcttagtaatcaattgcattctactgaaaacaatttgcatttctttttttttttttttttttgagacggagtctcactcagccgcccaggctggagtgcagtggcgcaagctcggctcaccgcaaccaccatctcccaggttcaatagagtctcccgtctcagcctcccgagtagctgggattacaggcacccgccatcatgcccagctagctttttgtattttagtagagacagggtt

SEQ ID NO: 1241872 - DNA, 4001 bp, Homo sapiens
cttaggtatctttccataccaacatatagggatctactacattatttttagcagaatagaattctaccatagtttgtttaaccagtcccccatagatggattatttaggttattttcactttttgctatttcagacaatgctgcagtgagcttccttgcttatctgcatatttgtgtcactttctgtaggataaattcttagaagtagactgttgggacaaagagtttatgcattttttaaacagacattgccaaactgccctcctaagaaattggcaccaatttccactcccaccaacaatctgtgaggactatttccaaatggggaagaaatctatggcaggagtggaatggatgcaatatgggtaaagaaagcagcatgaggaaaggctggaatacagtacaggatacttctggagaggcatggggcatatgcagcatagcaatagtgagctttaagaccggaaggccagtaagggcctctaaatgccaagttaatggtttggacctttgttaataagtagtgaggagctatttaaggtttctgagttcaggaatgacatgactgaagctttatcttgggacagtgatgtgacagcagcgggacagatgcgttgaaagagtaagactggaggtgaaccagcctttcaacagctgttttaaaggtgaaattacaaggagatggaattgtataggagaatcccctagaggtggaaggagagagagaggaaaaagtccagagcaatttcaaagtttcaagtcagagtgacctaccaccattaacaggatgagacatgttttcatttatgtacatgccttacgtgagattagtgcaaaacagccacgtcaaagtatccagctagcagatggagaagtaaacaagagttaagagaggggcccaagtttcaaatacatacaaagaagtcatatttatagaagcgacttaatgaaagtgtgaagagatccttgaggaaaagcatgaacaggaaagtgctgagagcactatttgggggtaacccctatatttctgaaacaggaggtaaaagaaaaagcatatccaaggagccctgcagcctttctcatctaaggcctcatctaaaccacagaacacagaaaatgctctgagtgaccattttctcagttctcccaaggatggtacataaatagtaccattttgggtgcacagcaagttaattcattccattcaatggatgccttagggcattagagcttaaatccctcctggaactcggtcgagaagactgctgcaggaatagggatgaagtaatatcaccgagctgaccaagcatttcatgagtggtcaatattataggatacgtcacctctctgaattataagctgatcatctttctggtaaatccatcccccaccactgccgtatgacaaataaccaatgacgtaccggagtcaacacataaactcagaatggcttcaccatcaaccgccttcaattgcacccccaatacaaagcttcccctcgggacttcagttccgcccattgcgctgggcagaggggccggcgcggttccccatttctgcactcggggcagggcccgggggccgcagccgccaaaaaccgcttactcccccagggtttctccggagttctactcactcaggtccccgcccctcacacccagcccgggccgcgcttcccacccgatagtacgtaccaggcgtcggctccccggcctccaggcagtagggtggccgtgtcagggccccgtccggagacgacggcccagggacactcatgtccctccagctgggaacacagggaagaagcaaacgtgtggctcgtcagaagcaaggcggcacctaacgactccagcggctggccggacagaagagattgtcgcacccggaagtgacgggggcgaaaaaactgcgggcttcgatcacgcgctcgagagttggctctgccccatggcgttgtggggaccccgcgctgatatcgtcgtctggccccggacgcagtgtcagcggactcagcagtgtggggctcgagtccctgcgatccgattggtgggagctgggggaggacggtggtcggtttgggctgctcacggggtgggtcacgaagaccggaagagcgttgtctttgttggacgcgggggagccgtcaggctttcttcactgaagctagggagaaaacaggactttcagccctcacgcggcacagctttttagtgttgtctccgtgtttagggaaaaccttcagaacagggagtgctcgctttccctgcgatttggaccattaaaaaattcgatgcctaggtctctgcgagcctcagccttgctaactagggttttgccacttttccgggctccccttgttaagtgtagatgaaagatttaagccctccgttgcagcagctactgaacaaattcggccaagttatcagaaactgcacttgctgagatcctgtggaatgatctcatgaattctgttggaaaacacttagaaaagggcataggcagctttggaccaaagaaaacgatttagctctgccatctctagcttataccctctcatctcaactgtaatggtggcctcctaatgttgctccccaattatgcctgttcagttttctcagctgcaaccaaagcttatttcaaaaaaataagaatttgcaagactcagaaacttgcactggttccccattgcctttatcagtgcattcacacactttcctctttgggcctcttttcctcttagtattagctccttcttattaactctggtaggcagaatactagcccctcaaagatgtccacagcctgaacaccagaagctgtgaatatgttagcttgcatagcaaatgggaattaaggttgttaattacctggtgttgaaatagattatcctggaatcgctttaaccagggaggcagaggttgcagtgagctgagcagctccactgcactccagcctgggcgacagggcgagattccatcttaaaaaaaaaacattatcctggattgttccagtgggctgattgtaatcatagggcctccaaaactgcaaaagagagtcaagagtgacaagtaactatgaagaatgattagagagatacaacattgttggctttgaatatagaggaagggagcctccagcattgtgggtgacctccagaagctggaactggtaaggaaacattcccctgaagcctctctaatgctctgatgacaccttgattttatcctcatgtgatcaatgttggacttctgaccaacagaactgtgaaataatctgtgtcttaagtttgtgataacttgttataacaccaataataatgtacggtatacccttcaagacattctttattccatgtgagcattctcctaaaattatgccctttcatgtctgcagtgctcttgcctatgcttcaacctgaaatattctatccttttgtaaaccaaaaataaaattataaaccccacaactgactgatggaccccctgcccctcacctcttggccaagggcattccaaagtaaacctgaaaatctagttattccatcatctagatggaagtggggatgggggggttagtcccgggggtgggtcggacatggctcattataccctcctccctttggaattcaggctgagctgaacagcattcacatgaaaacagatcttaagactgccagactttttctagcttttctagaactttatttttgacaccaagccagcctgactctagtatagcatcacgacagatagcaggccctgaaggaaattgaattatttaaccccaaaatatattcctttgacatatttttaaatggccctgcaaagctgtatcttgtgggggaaaacctacagtctgtagaaaagccctgttcctttccaggtgttttcccttacccaggagggaattaaccaagtctggcacctttttaggtctgataagagctctaccagaggcttcatctgcataataaaaccttgatctctgccagggacagtggc
